United States Patent Application Publication US 2020/0377945 A1 - sequence listing, part 39

SEQ ID NO: 7464 - DNA, 22005 bp, Unknown
  gut microbiota DNA sequence
ccaagcgccccatcaccaagatggccgacatgcagggcctgaagttccgcgtgccccagagcgccgtgctgatcgccgcctataaggccttcggcggcagcccgacccccatctcctgggccgaaaccttcaccgccctccagcagggcgtcgtggacggccagtgctacggctacatcggcttcaaggccatgaagttcaacgaagccaaccagaaatacctcaccgaagtccactacacctatcagctgcagcctctggtcatcagcgaacgcgtgtttaagaagatgacccccgaaatgcagaaggttatcgttgacgcgggcaagtacgctcaggatgccgtcctgaagttccagctcgaaaacgccgaagccgccaagaaggaactcattgccggcggcctcgtggtttcccagcttgaagacgaggacctgtggaagaaggccgccatcgaaaaggtgtggcccgaaatggctgacttcgtgggcggcaaggacgccatcaacgaatacctgaaggcttgcggcaaggacgcctggaagtaattcgtcatgaagacatagggtcgggtctgcgggggcggaccctgccctcttgagtacggaaggaatccgtgtagcgccgctggcgtcggtctgttcttgcggaacggcgtcagaggcaggggaacacggattcctcctgtacggaatgtcttcttgccgcgggttccgcctttttccggcccggcgcccgttcggggaatgccgtcccgcgctttttaaggatttgggaggaggaatagcaaacgtgaaaaaaatagtcctggcccttctggaccacttcgaaagctatctgtgccagttcctgctggttttctttgtcgtcgtcattctgctccagatcgtcctgcggcagatcaacatgtcgctgccgtggacggaagaaatcgcccgtttcgcctttatctggttcatcctgttcggcgcatgttatgcgacgcgcctgtgcgccctgaaccgcgtgacgctccagttctccagagcgcccaaatgggtgggcaacctgttcctgttcatcggggacatcatctggctctgcttttcgctcatcatggcgtgggaaggctatatcgccgtcctcgacctcgtggagttcccgtacgcaaccccggccttggactgggatttgggcatggtttaccttgtcttccccttgagcttcctgctgatggccatccgcatcgttcaggtgaacgtcatcaagtacatcctgaaagaagagattcttgacccggatcaggaatccatcaaagaaagccaaaagacgctcatggcagaaggagacaaggaatgatggaagccctttcccccgcgaacatcggccttctgctgttcggcatcttcttcgtgctgctccttatcggcagcccgatcatggtcgccctcggcgttgcgaccatggcctgcttcatcgtgctcgacattgacctcagcctgatgatcgaacgtgccttcgcctcgctgacggccttcccgctcatggcgttgccggcattcgtcctagcgggctcgctcatggaagcggcaggcgtgtccagacgtctcgtgcatgtcgccgaaaacatcgtcggccccacgcccggcggcctcgcgatctccacgaccctgtcctgcgtcttcttcggcgccatttccggctccggccctgcgaccacggccgccgtgggtatgctcatgatcccggccatggccaagcgcggctataacgtaggctatgcggccgccgccaccgccacggcgggcggcatcggcatcatcatcccgccgagcatccccatggtcatctacggcgtatccggccagcagagcatttcaaaaatgttcatggccggcatcatcccgggcatcctcatcgccgtcggcctcagcgtcatgcacttcttcctgtgccggaacctcaaaacggaagggctggactggtccatgaagaccttcatccactccctgcgcgacggcttctggtccatcctcgccccggtgatcatccttggcggcatctacgccggtatcttcacgccgacggaagccgccgtcgtggccattttctacaccatcctcgtgggtatcttcatccataaggaactgacgctgaaaagtttcatggcgtccctcaagaccacgtcctggctgacgggccgcgtgctcgtactcgtcttcacggcaacggctttcggctacctgctcacctcgtaccggatcccggtggaaatcgccaactggatcctgtccttcaccaacaatgtgaacctggtgtggttctttgtggttatcctcttgctgttcctcggcatgtttatggaaacccttgccatcatcatgctggtgacgccggttctgctgcccattatgacagcatacggggttgatccgatccatttcggcatcatcctcatctgctgctgcggcatcgggttctccacgccgcccttgggcgaaaacatgttcatcgcctccggcatcgccaatatttcccttgaggaaatatccctcaaggcgctgcccctcgtggcgatcaacatcgccgtcatcgccattctggtgatgttcccggatatcgtgctcttcctgcccaacctcatgggtaccgggctgcaataactgccgggcggcggggccctcccgccgccttcgcttcacacaagccaatcagaaagaagagaatgctatgagctgcaaaaccatcgtttccttgctgatggcggggttcttcctgtgcgccgcctccgcttccgccgcgcccgccgccgcgccgcacacaacgctgacgatcgccatgggcgatcccgaaagctccgaaatgggcgtcgtgggcaatgcgttcaaaaaatatgtggaagacaagaccaacggcgccatccaggttgtctgcatttacggcggttcgccgggcgacgacgaaggggaacgtttccgcaaggtccagaagggcacgctcgacatggcccttggcggcatcgccaacatcgtgccccttgaaaagaagctgggccttctgaccctgccctacctgttcgccaacctgaacgaggtcgtggccgggaccaacggcgcccctgcggaactgctgaacaagtacgccaccgaagccgggttccgtatcctgacgtggacgtacacgggattccgcttcatctccaacgacaagcacccgattaccaaactgagcgatatgaaggggttgaaattccgcgtgcctcaaagcgcggtcatgatcgccacctacaaggcgttcggggctatcccgtccctcatcccgtggtccatgaccttcaacgccctccagtccggcgacgtcgacggccagtgttacggctacatcggcttccgggccatgaagttcaacgaagccaaccagcgctacctgaccgaggtgcactacacctaccatctccagccgctggtgatcagcgagcgcgttttcgaaaaactgacgcccgaagtccgtcagatcctgatcgatgcgggcaagtacgcgcaggaaaaatccctgctgttccaggtcgagcaggccgaagcctccaagcgggaactcgtggccggagggctcaaggtttcccagctcgaagacgaagagcagtggaaaaaagtcgccattgaaaaggtgtggcctgaaatggcggacttcgtgggcggcaaggatgccatcaacgaatatctgaaggcttgcggcaagcagccctggaactaaacgacattccccacaaaaaagcccggacggtttttgtccgggctttttttgcgggaagagggaaaacgccgttgcccgtctgcggaaaggcgtcaggcccggccctgcttccagcaccatacctttccgagtgccatcgcgggaatcatggacaaggcagggataagcgaaaccagcgaacccgcgaggataaacaggacgcccaccaccatgctcaccggaatggcttcctgcagaaaaaccaaggccagcacgggcgcgagggcgggcttgaagaagaagaccaatgaggcggtgatcggagaggtcgcctccatcgccataaagtagcaggcaaagcccgccccggtcacgccgacgcagatgtacagcatcatcagcgcgctgaacggggtatacccggaaagcagggggatatccgcgaaaaggccgagcccgatgtccgcgagaaccccggcgaccgccgagaggcggctgaccgcgacgatggccgccatttcaaggctggcgaacaggaagctcccgcatgtcacgaccacgccggaatacttggcgcacattttggtcccgagcacggcatacagggcgaacaccgccgtggacagcagggtgaacgtgatgcccgccgtgctgatggacgtatccagaggattgatcaggataaggatgccgaggcattccagcaccagcgccatgacgtgctggcgcaggatctgcgtgcgcaggatgagcccggcgaaaacgagcacgaacacgggattgcagctgaacaggacggcgacgaccgaggcgttcgtgttctccacggcgagctgatacaaggtcatgctgaccacaatccccagaaagccgagcccggccagtttaacgaggctcaagccgtcgatccggacaccgcgcttcctgagcatccgcctggcgaacgggatgaggacaaggccgccgatgagaaaccgcgtgaggttcaactggacaggattaaacagtccggcaacttccttgagcgcgatttccatcgtgctgaaaaacagcgttgccagtgcaataaacagggaacctcttttcataatggcatatccccttactgcaaaaccggcgtcccctcgcgcgacggccattctggccgtacgcctccgcaacgtgggcgcctcctgcctcccgttcgtacgctacgcccattcatgcgtaaaatgaaatatactcatgagaaacatgcccttaagttaatgattcgatcagcctggaccacacttttcccgcggttgctcacctccggcctcttcagtttcttttccggtcaggcaacgtatgaaggcatggcccgcgtgtgaaatctggcttcgctttctggtcaccacagcaatggcccgcttcggtatcttatgcgttgtctggagctcgaagacgcttcccgccctgaggctctcctccgcaaatcgccgcacggttatgcccacccccaaccctcgctccgcaaaaggcacgatcagcaccgtcgtcgccagttcgcattccgggtcaagcacaacgccgtgcgactggaaaaatgcatccagatacgcccgggtgctggtccccttttccgggcacacgatagggagcttggcaacctcatccggcgagagcacggagccttccagatggcgaaatgtgttacccgcgataaacgtatcctgaaccctgcaaacggggattatgtccagatcctcgttttcttccactggcgaaaacacgacgcccagatcgatccggcgggcccgcagcgaggcaatcgtttcaggcgtcgatgccgtgatggtgctgatgcggaccttgggataatccttatggaaccgctccagatacgggagcaggaaggcatgcatgatcatatcggaggaaccgatatggatgctcccccagtccagatgcagcatggcctgaatcttcttttccccgatggcgatctgctcgcaggcctgcgcaacgtgctggtagagcacttccccttcaggcgtgagccgcattcctttgtgcatccgataaaacaacgcgcagccgagtaccttttcaagctgccgtatgcacttgctcaccgccggttgcgaaaggaacaacgccttggccgcaagggtaatgctcccgagcctcgccacgtgataaaagaccttgtagtattcaaacgagacgttcatgcccaccatccttgttcagccgattccccctgcattgacatgcaacagcccggcaaggcaacccttttcgacagattgaaggaaaagcgcgtctttccgccgctgccaccctcttctagtgtgcggatcaaagcggcttcccccaagcgctgggttccgcggcccccagaaaagaaccctcagcagccgaaacaaacagatttctcctccccttccatagcaaggaatgcggctcctccccactcgagccatccgtaacgcccgcaaagggaaaaaggccgggaccccatgcggacaggcgaaaaaatttcactgaatcgcaaaaaaaagcttgccagccgcctctgttttgcatatacctcttttcgcgccgaggtggtggaattggtagacacgctatcttgaggtggtagtgggaattcctgtgcgggttcgagtcccgccctcggcaccatgagaatataagcggttgcttttacagtaaccgcttttctttttaggcgttcttgttccaagtgttacacaaaggtgttacatagaggggcatggacgccttgtctttatcctccaatatcgtgcggcgcggggctgtttattacattcgggttagggttccctctgacctgctggactactatgcccccaagaaagagatcacctacagcctcaagaccaaagatccgcgtgaagccaagcggaaaggaaatcttgagagggtgaagattgaccaacagttcgcggaagcccgacggaacggtcaaatgacagcggcgacggcgcaagggcaaacgacaaccgccgctacgtctaccgaaagttccctgttcctctcgcctcttgagcttgaacggctttctctcctttacctgcactacgcccttgcggatgatgaagcatcccgcgttgtcccaaagtctcctgaaactatcgaacgggaacgccaacaggcacaggaaagggaagacctgatacgggagctttccgaaaaaaagggcatcccctacacgcctcccgcaacagcccccgttatccgccctgtagggctgacggctgaggaaacggacgccaaacgcgcctatgccgaacgcttcatccatgatgcgcctttcttcatagccaagggtgaaacctacccagtacaccaccttacggatgccttcatagagcgggaacacctgaacattgccaaggaaaacctcgcctactatcagcttgcccttgccatcatgcggacggaaagcaaggcgcaagaggccattctcaagaggctctccggggaatgggtagaaacaccgctggcgggggcgtcatacgccgttccatccaacatcatttgtagtggtgatgttgttgctgttggcgtctccctggactctacacatgaagacaatccccttttctcggaagtatgggaacgctaccttgccgaacgcaagcccgcccccaagacagcgcaggactttggggccgctgtacgccgcttcatggagatcaacggggatctgcctgtccagagcatcaaggcgcgacatatccgcctgttcaaggacacccttcttaaatgcccttcccgtgttcctaaggaacttcaaaatcttcctatcctcaaggtcatcaaacgccttgaaagcagaaagacagaagatccatacccaaagacactttccccaaagaccatcaatgacaaggcacttacggcaatcaaggccgtcttgagccatgccgttgacaatgggttcattgaaacgaatccggcgcaccagatacgcgccgttgaccctgcacagcacaacaccgacaatgcggggccttcccgtattccttatgacatggacgacatccggggcattctctgttctcccctttttcagcaagaacaaggcccgcattccaacggaatcgtcaaacggcttacactagaggagaaacgggactatcagcgccttatcctgttgggcatcttcacaggtgcccgccttgaggaaatagggcaactagatattgaggacattcgagaagaggacggaatcacctacattttcatacatgcagacgccgccacaggacgccgcatcaaaaacaagacatcccggcgcaaggtgcctgtacatcctttcttgctggagaaggggtttctaccaaccgttcatgaaggggaaagatgcggtggcggtggcggtaagctctttcctaccctcacttcaaagacggacaccttgaccgcgcctttctcgaaatggtggcggagatacacaatcagcatcggagtctatacgccgcaaaagacgttccattccttccggcataccttcaagcgtaccatgcgggacgcggggatagacgggaagctgacggacgccctccaagggcacgcgggaaccagtattgccgacagctacggacgggacgcggaaggcatggggtattccatgcccgtgctgttccgggccttgtgtgaagggatggagaaaggagggcttgaaaaggccgtcaaggaaagccttgcctctttcacatcctctcccatccacggcaagaaatagccacctctcaggggtgtttaatagacacccctacccaaggtcatctttttcgaaaaacgcccatgaacacgcccctaacggcgcgttgcagcaggagcccatacccaaggtcatgtttccccgttcaaaggaaaatcatgctcgtgggcacaggatttttgagcttaaatgaaggatggagatgggaggggagaagggaggtaggagaggagaagggaaaaagggagtcggggtttgtgaccccctcccaaacccgacaaatcggcgggattacccttgcgtgtgaccctacgttcccgccccctactccgtacaatatacgggacagcccttttatccaatatcaaaagctagttggaattaggttccaccttcggagagagacggggtttctttctaaaagttccaagatagaactattcaacaatcacaaacagttaaattaagtcctacctacggagagagacggcttgaattttcaagttgtcgctttctcaattcttcaatatcaaaagcaggttggaattaccatccacctacggagagagacaccccttacaacaagggagggcgtctacctcatccaaccattttcttttctttcgtgctttctttggggggtcttttgcagaaaagacgcctccctgtcctctttcacggataggggggttccacatgcacggggtgaatacaattttgtattgacctgtgcatgtgtccttaccaccatgcaaccttgcgtggggggtaaggggggtcttttccacctttcttttcttcactttcaattcccttaaagaagctttaagtttctttaagtctttttaaagatccttttcaatattctttacttttccttatgcttcttaattatgctccttcttaatcaagatcacctgcctttcaagtaaaaagaaccatagctaatgtaagttctttaagataccttatgtatccataaagcatcctttcttttatggtgattacgtggacataatgattcttaaaaatattacatgaactatgagcacataacggaaaagcatttatcatagatcacaatcatcatcttcctgcaccatcccaaattgacggacagaacataccccttgtccaatgaaaggcccccttgacgtacctgtacatacgttgagggggcttccattttttgaacacaacgcaagggggagtgttcaatccacataatggcgtcaaagggtattgaacatccagttctcttaaccaaccaccatcaccactagcaacatattaaaaggggtatcacatcatgtccaacaattccgtcattgaaggcgtcaagggtacggtcattgtaagccgctgcaagagaaagagcatcccggttattgacgctcccttgaatgaagggggatacagtgattggcgtcttctcattccccacggctacataaccctatcggaagcggtgaagcgtttcggttgcgggctgtctttgagtgctttgatgaaaatcatggatgccgcaaaggttcctacgcacaccctccacatcctcaagaatgaaggtgtggttgcccctgaaaccgatgttgtcgaggtcttccctgtctaccgtcttctttgcctgcctcagactgcggagtatcaacgccttgaacgtgagaacgggtacggcagcggcgttttgattccagacggtactacggagaaccggggggagtccgccaccacagccgacgccacagccgacgccgctaccccctattacatctttgacggcattgaccctatcaccgccaccctcgttaataccttttccgctagattggcaatgcaaaacttcctccatgacgtcagggagcgtcccttccatacgtatgacttcacgcaccccttgttcaaagacaatggacatggcggtctgttgcgcgggctcgacgtgcggaaggcatggaagcagcacaagatcgacgtgttgatgcggcgacaggggtaacgtaacagtaatatggcaagggggtcatgattcgtgataccctttccgcaaccatcaatctccccccaatgtgaggagggaatggaaatcctgtgcatatcaaagacctgcatgggatgtctgttccctcctctatttttttgttaccgattgataacaatcaactgaataaatcgattttgttggtgagcgtgccttcttcccccaacgatgagggcggatgagacgcccacagttttgtattcgtctcacggggtacattcgtaacctgctggaatctaatggtttcactgaatccaattttggattgagtgaatatatagactccacaggacgcactcttcccatgtacatcacgtgagccgggacggttttggagcctttgaaattcaaggctcctagcccaacatctggaatgatgaggttgatgttgaggactgctaagatttcaggagtcctatccttgccggggtaaggagaggcataatcacccctgccccctccccgccgtcacgtccagccttcaggtagccgaggcgtttgggaaggaacacaaacatgttatgagagacattcgtaaactgttggaatccgacgatttcaaccagtccaaaattggactggttcattacatggacgcaaaaggtgaagaacgccccatgtcatgcgggatattcgtgaaatactttccaaatgttctcagtatcttggagccagcaattttgcggccgcctcctacaagtccaagcagaacaggaaatgcccatgtactgctttccaaagacggcttcacgtgatggtggacatgggcggcttcaccggagccaaggcacgcgcgctccctctctcgatctctccctctctttttttccgtcaaaaaccatgtgcccacgagcatcttttgcccatgaacgaggaaacatgacccacgccctgccatgacgttttcgagggcgtctcatgggcgtttttgaggaaacatgaccttgggtaaggggaggccgtaaagcgtgcgtgaaacagaccgttttccccctatggctggagggggatgataaggacgggccggggatgagaggatgcgggggtagtggcggtagcggcggcggacgtggaagggagtcgtgactgatgaccccttgacatttcccggcctttccccgatttttgaaccccctaatcttcgaaggcgtgaccgacgcctccccccgcccccaagcgggaaggaaagaacggtttcttgtttcagcagccaccaacgcgctacaggtgcatcctgtggacgtggttacatattggcggaaacaacgtcctgatgttcgtgagactcaggcggctttcgaagagccggggagcgttgttccgccttttcttttgcctatacggtaaatcaccgtaattgaaatcatttggaaatttctaaaaactttcaacacaggagagaaccaccgccgccgctcaatcccctcgcatcaccacgacaacgcatcccggacatatagggccgtgcctctcaatccctgaatcccccaaatcttcgaggcccccatgatcaatcttttccgttttcttcattcgtcacgttggctaaggctccggtatcacgtcctccgttctttacattccttcatctccctcgccgcttgccgttggcttcccgccgccgtcgcggtcgtcttccttggtgccttgctggtgttacctgccctctacattgcgcaagggggtattcactaatgaccgccaccaccacacagtacgccagccccgcccccgcatcatccagcggagggtctacggcaaccttccgcaccatacgccggacgttctggacagatccctacatcgaatccatgccgcccgcccggaagctcctgtacatctacctgttcacgtctccgcacacgaacaaccttggagtcctgaacacgaccacccgcctcatcgcctttgaaacgggcatgactgaggatgaggtcaaggaacacctaaacgtccttgaacagcaagacggtaaggttgcccttgatgatggtagctgtggcggcggcctctccatcctcgtggtcaacttcatcaagcaccagtgcacgacctcccccaagctggtcatgtccctccgcgccttgttcaggggcgttgaatccgaaaaaatcagggcggtcttgatagccaagaatccccacctgttagacggtatggatacggtatccggtaccctatccatacgttccggggaaatagatcaagatcaaatacaagagaataagaaaagagaagagatcagatcttttccttgcagtggtggtgatgaagagagggggaagaggggaagacagggaaagggggacgatattgtcgcaccccttctgccgccgcagctcctcaacacggacaccccgaagcaggacaggaaagggtacgtacagtatacgcccccttcccccttgccgttgcggtggaggttgacgaccgcctccaagacatccctctcgacctcttggaagccttgcaacgggactatccaaccatcgacgtttcaaaggagattgatagggctagggaatgggctaggaaccatacgtcacccgagaagcctttacgcaacgcatggcgtttcatcacggcatggctgaggaatgccgttgcagcggcggcggtggtgacgaaaggagcggcgacagcgacgacagcccccgcgaacacctgccctgtccctaccaccagcggaaaagaaagggggcggcggcctctacttcaaacatgctccaaaactgcccacaggctggacgactggacgtctgaaaagaaaaacatgacccacggtaaggggcaggtcacagacacccctgaaagggcatgttcatgggcacagccacagaaggagacggtcgtggtggcggggtcgctattccctacccctgaacagcttgaagaaaacgcacaacgcgggcttgctttccttgcgcgctggaagaaggagcacggctatgcattcgcgtaacgatgccccccatcaccacaacagcggcgacggctgcggtgtggaaggacgctatgttcctttttcctcctctggtggagcaagacccctgccttatcctttcgggctatgtggaaaggtacgcctccatcatgaaaaaaaagaaaaagtaggagtagcagaagaggctacccctcctcctgttatcgccgttgctcctgatgcatcccatcctttcccgacagaacgacagcttgtcgaggagcttacacaacgtaaacgtggggaacggcggcgacggcgcacaggaggatgcaacgggcgtaaatctcttgacatccttatggaagttcttggggatacaaaggccgtcttgtcactgattcaaatgaaaggaggaactggtttcgacgtcccccttggggtaacgccacagggccgccggaacatacgccagcttgaggaaacgctagggaaggaacctacgcgaaaactcattgcttttgcaggaggggcacgcctttacatccctaaagtgacctaccttggaacggacacgcgaagccgggagatatgccttgaacgggatagaatggcaaaagaacaccctgacatgtccgaacggaaacttaccgatattttagccttgaagtaccgcgtaacgagcagacacatctggagggtactaaagcagtattatgaatttgttgagccggacaataccgacaacggcggtagtgaatagtgcgtagggagaatcaggaggcaccccaagccgctcaaaagtggtggcgtcctaccatcttttaatgcttccgtgcggttagtgtgggttcggttccctttttgcaaaggagggggggcgtcggggatggtatccacactctgaatcaatcagcttggttactggaggggtgtggggaggagggggtctacaatgtggacgccctttcctctgactacccaattggtagggtgggtgaatttattggaaaaatgtgaaggggcttacgttatcatgatgatacgcagttccccccatgccctccccgccgctctcatggtggcagactgtggacgctctaaagaatcgggcgcgtgcggttcattatataagggcaaaaatacgcacagacggcacggggaacaagtacgaggaaaaggaagagggggagacgttaaccgcttcttcctcctcctgtacaccaaacccatccttgaccaacgacaccgtagccccctgcaaaaacaaaagtgccgtcagacagtcggaagctgtgacggcacatttgcaggttgtctgcttagatgcataaaccgagcggtcagggacaaggcacaacaagcaccatgcccaagccgggggagtgttcgcacacttcctcggctcctttgcggtactcttgccttgagtagtgagactgtgtaggctgcgttcttgtggggcgcgcctcccgaaaaggggggtaccccatgaaacacttcctgcgggacgttgcggcgcttgcgctggctgacgtcatagcggctgtggtggttcgcatcttgctgaacctctaacgcagttgccccggtaggaagtgaggttcctagccggggcgcaaacactgatgttctgaacatcgggggacgtgtcccacatcgggacggtaggcgttggctcgcttgccgtcccacttgtttttagggtagttggagttttgaaaaagtcaacaattttttcaaacatccttgctatgtcctacatctcctatgcgcttcaaatgctcatagaccgtctgccttgataccccatactcacgcgccagcctagccaccttttcgccgttctcttcaacacgcttgcgtagttccgccgcttgttcaggggtgaggctaggcttgcggcctttatatttccctgcggccttggcaatagcgattccttccctctgcctctctcgaatcatggcgcgttcaaactccgctactgagccgataagttgaagctgtaggcgttggaaagggttttccttgtcgggggtgaaggtcaaattttccttgtggaacttcacagacacgccccgccccgtgaggtctgaaagaagagaaagcaagtcctgcatgttccgcgcaaggcggtctatgctgtggacatgaagggtatcgccgtccctcaccacttcaaggcaacgctccaaggcggggcggtgtacgtccttcccactggccttgtcctcaaacaccttgttgaggttcaaaccgtcaaaggctgattcctgccgtgccgtgttctggtcaaccccgctgactcggatatagcctatgtccattcccttgcctcctttccgtcaaactttcaaagtgtcaggatagagtctataacctctagaaagaagtgtcaagaaatactaaaaagaatcctattctgacataaaaagtgtcaacccattttgtcagattggtgtatactctatattgacatttcaaataacgcttgacgaaaagaggaagaccggaaagagtctttcaacaaactgttacacagctaacaccttattgataagaacgcttgtattttcagtgaattgtggagaatcattttttctcccgccctcggcaccatatcgaagttcggtaaagcccgttaaggttcacaaagccttggcgggctttacttttatgctgtttgcatgttcataggcgttcgctggagtcgtgtacatccgccctttttgctggtattctcgctggcatctttccataccagcaaaagccgcaaaaacggataccaagctcagagcgttgaagccctccggcaaggttcaaaagctctcggactgtgacgggctgtacatccatgtctcacctgccgggggaaagctctggaggctcttctaccgttttgacggcaaacagaagactcttgcccttggcaagtacccagaagtcagccttgccgaagccagaaaaaggcgtgactaagcacgggctctgaatgagtcctgcccctagctcctcctcttccgctgttctctatctccacaaataaaaaagagttgcggcctcattccacaactcttttttcaatcccattccgcatgccgcaggcattgacggagcaataccgccacatcacggccggtttcctttatcatgttccagccagtagtgcagtgccgcgcaaatggaatccatatccataggcttgttaaaatgcgtgttcatgccgcactgcagggatcgttggatgtcgtccgcaaaggcgttcgcggacagggcgaaaatcggaatacgccgcgcgtcttcccttgtcatgccgcgtatgtgccgtgtggcttcaaggccgtccatgaccggcatacggacatccatcaggatagcggcgtattcccccggttcggattccgcaaagcgctccaccgcaaccttgccgttctcggcccagacgacggagagattacttgactccagaagcgttttgaggatctcggcattcagatcgttatcttcggcaatcaggatcttttcacggttaaaacggacttcctccggcatggccggaacatcaaaggcgtgcctatgatgggtcaccaccaagagcatatcacgcagatgctcccgcaatacgggcttgttgataaaataatccacgccggcggtacgggcaggggcttccatctccctccaatcacaggccgacatggcgatgggggtcgtggcctttccaacgatttccctgatatgccggaccgtttccatatcgtccatgcccggctttttccaatcgatcaggatcatgccgtaatcccgccgcctctccctggcttgccgaacacagacgacgccctcttcgccggaaagcacgaaggacgcttcaaccgccatacggcgcagcagtaccgccgtatgctcacaggcagccctgtcatcgcctatgaccagcactcgcacgctctcggattgttccaaggcgtccttatcccatccgtacagcgccccctcgaacagcccgagcggtatgtccacggaaaaagacgacccctttccttgctcgctctccacgcgaatggtcccgtccatcagctggacgaagctcctgacaatggccaggccaagccctgatcccgaaaggccccgctgatccgtcatctcctgctcgaacggctggaacatcctttcctgaaagctcttgctcatgccgatcccattatcggaaatgacgaaccgtacgagttcccgatgcccgactttttggactggcgtgatgttgaattcgatcctgcccttttcgggcgcaaacttcagggcgttggacagcaagttcatcaagacttgcttgatgcgcaggggatcgccgacatagatcttctcaaggagcggagaggcaaacaggttgaatattatgcccttcgccaccgcgctgccgtatgtgaacgagctgacggagctgacgagttcatcaaaatcaaacggttcggaagccaagctcatcttgccgctttcgatcttggcgacgtccaagacgtcattgatgagcgacagcaggaaacgggacgacaaggcgatattgttcaggcactcgctgagccgttcggggttgcccacgttcatgcccgcaatggccgccatgccgatgatcgcgttcatcggcgttctgatgtcgtgcgacatccgggaaaggaactcgcttttggcatggttggcctgttcggcggcaacgagcgccatactcaacgtagccttctggcgctcctcttcctcaacgtctttggcgcaaaagaggagcatccgccttacggggtcaaaaagatacgcccgtaagcaatgccaccgggcttgcccgttgcccatgagcacacgatacttgagctcatgggacaaccccggcgtgccattttcccaggcaaggcgttccggtttgaaaaaggcccggtaagcctccacatcatcaggatggacgaccgtttcgctccggagccgcaccagctcgctgaaaacgccctgcatcccgcttccgatcatgctgttccgacccgaaaaaaagtactcgtacctgtccgccgggatgtcgaccaacaagatccattcgtagtcgtggttgaccgtgaacctgcaaacatcctggacggttttggtcttttcctccatgtttttcaggtcggtgcagtccgagacgtagccgtacacgatggtcccgtccaccgttttgacaaacgaacactgcgtgaggagccagcggaccttgccgtcccgcctgatgactttcatctcgaagccgacggaggactttccgtcttcataggccgtcctgatcaagtcgttaaagcgttggaggtggtcggggtgaataagctcgctccccctgatatccggagccgttttcatctggtcctgcgtatacccgtgcatcgcgcaaaacccttccgaaacgtaaaaaaacgagaagtgctcgtccatgacgaactggaaaatacctatgggcgcgttgcttttcaggaattcgagcatttccttgtcccggtacgtggacgtcacgtcatgaatccgggacaactcgagcatacccgatttggtatgaaaccggctgatcccatcgacttcataaaaatgcccttcccgcgtgaacagcacaggggccttgccgctcctgttgaaccgtgggcgccgggaaacggataggagggacgcgagtggtttacctatgcaggcatcttcggctttccctacaatatccagcgtgtgcccgttcgcaaacacgaaacgcccgtcctcgtccgtgatcaccatcgggacatcggccatatccacaacgaacttgagagcatccagcgaggaatcatgcggcgaaagcttcatttgcccacccactccgacaggaggatccgctcccctcatagggacagcgctgcatcaatataaaagggacagccagccttttgtcccttctcagttcccttccccacacctcatttttccttgcggaaggaaaccccatcacccttcgcacaagaaagcattcaacccgccgggccgtcatccccttttcttatggcaggacgccgcgatcatggcgtacagcttgtccgggtcgaacggcttcgaaatatgcccgttcattcccgatgcctcggccttgatgacgtcgtccgagaacacgttggcggtcatcgccagaatgatggcagtcttcgcatcatccctgcgcaaggaacggagtgcggcagtcgccgtgtatccgtccatgacgggcatctggatatccatcaggacaagctgataatacccttcctccgaccgggcaaagatgttgagcgcttgttccccgttgtcggcgacgtcaacggacgccccttccatcaggaggagttctttagctatttcttgattgatttcattgtcttccacaagcaagacatgcaatccgtccaagcgttgaccttcgggcctgggcacagccgaggcatgtccacatccccgatcctccgcaaaatttcgcaacaggtgcaccatgttggatttgaaaagcggcttcatgatgaagacgtccacgcccgcggcgaggaaatccgcccccacatccgaacagtcatagcccgacagcatgatgatggggagatccggcccgaccctgcggcggatttcccgggccgtatcgagcccgtccatatccggcattttccagtccaggatgaccgcgaagtagtcgtccctttcctcatgggcgcgcacaatctcggcgacggcttcttgcccgctcaagacccaaaaagcccgcatccccacttccttgagcaacaggctcgcgtattcgcagacatcccgttcgtcatccaccacaagcacgggaagatcggtcaaaacagggggttccccgtcttcggcatcccggaatttcagcgcaacgctcaccgtaaaccggctcccttttcccagcgtgctgtccacggtgatctcgccgttcatcatatggatgatgttctggctgatcgccatgccaaggcccgttccctggattttgctgatccgggaatcctcggcccgggaaaacggttcgaagatgcgcccgacgaactcctcagacatgccgatcccgtcgtcttcaaacgtaaagtagaagacactggccccttcggcatgggttggcttttcctcaatgctgaaatgcagacgcccgcccgccggcgtatactttacggcgttcgacaagatgttcaccaaaacctgctggaggcggctctcatccccatgcaggccctcgtgcctcaccttgctgatgttcatggtcaggtgatgccccttttcaatgatcatcggcctgcacacctcgaacacgttctgcaccagattggaaaggctgaaatcgttcgcccgcacatccaagcgtccgctctcgattttggacatatccaaaacttcgttgatcagattgagcagatgtttgctggacgtattgatcttcttgaggcagtccctcactttctgggtatcctcaatatgggcgcccgcaatcgccgtcatccccacaatggcgttcatgggggtccggatgtcatgggacatccgggaaagaaactccgtctttccctggttggcgtgcttcgccacccgacaggcgtcttccagcgcctgttgctggagccgctgccgctcgaccgtttccgtcacgtcaatgcccaggctgtagtaggacggtatcccatcctcgctgtccttcccgtccatatagctgaacgtaatggtcaagtgacggatttttccagaccgggtcacgatccggccctgcatgatgctgctccgccccgtttccttcgcctcgtgcatcgccgcctcggcctgctccatatcctccggatgaacatacaggcactggctctgcagctcttctttaaactgctcttccgtgtagccgatgatcgacaggaattccgaaccataccacaggattgtgcgttcatcgcgcgcgtcgagccgggcgatgcctcccggaagactccgcagcatcgccgcctgctgttttccctgcttgtccagtttgttcttgtacttggagacatcaaaaacgaactcgattctggattcccgcccgtcccacagtaccttccgatctttcaggagatacgttttccccagctgttcgttataatgctcccactcataaaatcctgaatctttcaggtatttgttggtacaaaaaggacaaggcgtatttcttccgtggaatatctcatagcaaaggtgcttttttccagaaaagagttcttcccgagaaagatggaacatatcaagacctgctcggttcacatacagcaattcataattgtccagatcgctgacataaaccatatcgtcatattcttcgagtatccagttccattccatatttctctaccttcaggatcattatagatcgtataacggatcaaaaatgataatagaaaactgggttatcggctcaagaggtatttctgcaatcttttctagcgaatccagatacggaaatgccgtaatacaatatcaggaaaccctcccagcagaatggagagcctttccagcatacatttcgatggcacatgagccttaatgttttacactaaaatatttaatataatattt

SEQ ID NO: 7465 - DNA, 843 bp, Unknown
  gut microbiota DNA sequence
gggatgtccagttccggcacgccttcacagctcttgatgttgtcgacgacacactggacggctgcgcgccggccttcacggtcgcgccgctcgaagtccttgacctgcatgtccagcgcgatgcgggcatccacgatgcgggcgatcagcgccttgacctcggcgtcgaacccgtccagcggcccggcaatccgccgcttgatgtccttccgggcgttgtccatccgttccctgagcctgttcagccccgccatttcgtttttgatggcgggcacgtcggcttcctgtacctccagccccacatactgcgcgaggacggcatccagcagggcggatacggcgtccttgtcccacgtgatgaccagcggcgtcgcggtgacgttcaggtcaagcagggcgagcccggcgggttgctcctgcgcgggcgggagggcttccagaatttctgcggtctgtgccatattcctatcctagtggttttgcctaaaaaggcacgtcatcgaggccggaggcttcggaagggaaggcggggccgaggtcttcatagtccgcggagtgccgcccctgtgcctggcgtccgcctccctgtcggccctgctgcccgtcgccttcccccttgcggtcaaggaactggatgcgctgcccctgaatctcggtgacgtagcggtcctgcccttgctgatcctgatacttgcgggtggagagcctgccctcgacgaacacgaggctccccttggcgaggtactgcgaacaggtttcggcttgccggtcccaaaagacgaccttgtgccattccgtcttgtcgaccttctcgccccggtcgttggtgtagccctcatccgt

SEQ ID NO: 7466 - DNA, 535 bp, Unknown
  gut microbiota DNA sequence
ctcggcgatattcgtaatatgatcaccggaacgttccagcttacggaaaacactaaccagattcagaccagagagtgcgctttcgggatgcttgccgatataatctgccagaacagcagtggcatttgcattaatttcatccagcaggttatctttggcgaataccgcggttgccagttcctgactttcttcctgaagagctcttttggcaagttcaagcatagccgaaacttgatttatcatctcttccaggcgcagttccttcaccagtccacttgccagaatcggttccttgcaattcaacgcaaagcgggctatgccttcggcgaaatcgcccaaacgctccaggttcgtattaattttgagcatggcaagcacaaaacgcaagtcgatagcaacaggattatagagagcgatgatgtcttctatatcactgtctatcttgagttcgaaggcattgacacgatgttcgcgcaccaatacctgctgtgccagctcgcggtccaaagtcagtacggcttctccggcacggccg

SEQ ID NO: 7467 - DNA, 483 bp, Unknown
  gut microbiota DNA sequence
gctccgaaaaaaaacttcggggttcgaaaaaaagttgttgacaagctggaccgggcggggtaagttcccgcttcgccgctgacggaaacgcagcggctgaggcaacggcctctggttctttgacaagtgaagagcgagttgggaataagaaactttgagttttagcccatagagatatgggcaagctagttgttttcaatcaactggagagtttgattctggctcagattgaacgctggcggcgtgcttaacacatgcaagtcgaacgtgaaagtccttcggggcgagtaaagtggcgcacgggtgagtaacgcgtggataatctacccttaagatggggataacggctggaaacggtcgctaataccgaatacgctcccgattttatcattggggggaaagatggcctctgcttgcaagctatcgcttaaggatgagtccgcgtcccattagctagttggcggggtaacagcccaccaaggc

SEQ ID NO: 7468 - DNA, 1181 bp, Unknown
  gut microbiota DNA sequence
cagctcttcgtccgtcaggaacttgtcgatgccctcaagctcggcaatctgcttgccgtcattatcccagaccagttttttcagctcgtccatgtccttgccggaaagcttgttctctccgaacaaagaagggatttcctgaaggctgcgggcgcgttccgccgcccgttcatcctgccgcctgacctgacggtcgtacacggccttgaagccggggaaccgcttcgccacccagtgcggcaacatgaaaatccgctgcatgagcgtcacgtcgtcggattttccaaagatgcttccaatccacggatcgttctgggcaaggttcatggcatcctcggcactcatgccggtgatgtcgcggacatctttgatgtcccgcagggaggccaacggcttgtcttctacccgtccctgctgtatattttccttactgctttgcccccgttggccttgtaggtttcccgtctggtcttgaaagggattccggtgcccggaaacgggaatagagggggattgctcgccagtggcgatcgaagaggggggtgcactcttccaaagctgtttacgcgtagccgccgtaggatagcttctgtccacggggtacgcgttttttactttgtagaaacttccatttctctcaagttcgatgaagccggcaggacgagaatccgtcccattgtttttgagcaacagaagcgacttgccttctccttcccatatttcattgtatccatttaccaagtcccaaacaaactcctgaacgctaccataccctgcggcgcggatttcatcaccgtggttggcctcaatgtgccggagtccctgtcccccttccatagaatgtactccgcgctccagccgaatcggagcagctctcagcaaacgcatgtccttcaggcgcgtcgccgggaattgcgcaaagtccacgcttccatccggcaaggtgacgaagtccgtcttctttcccgtatccggcgagaaacgggcattgttcgggtcgctccgcttcgacgccatagccgggaccatgccgccttcggccatgccttcgggcctgccctcaaagacataccgatccagcgcggacaacagcctgtccacgttctcgtatttcatggagcccatgcgcccagtcacggcatccaccagcgcatgccatgctcgcaagaccgcctccacaa

SEQ ID NO: 7469 - DNA, 327 bp, Unknown
  gut microbiota DNA sequence
ctggacgctcctttggggatttccccggtcagatagttttcgatgacttcccgcgcctcccaccagcccttgcagacctcgacgcggtacccggcctgacggagcgctgtgatcagctccttctgcgtggcctgaaccgtccccccgcgctggcgcttcatctcgatgtacagcccgtggaacccctgccggggcgaggcaaggaacacgtcgggaacgcccgccaccacgccctcggccttcaaccgcgccccggtgatcttgtcccggcgcccgccgttggggatgtggtacatgacgaagtgccgggcatacggcgttcgctgc

SEQ ID NO: 7470 - DNA, 2811 bp, Unknown
  gut microbiota DNA sequence
ccccaaaccccaccccttctcccccaaagacttttataaagatcagtggcggaacgggcggcacgggaggccaaaccttggcgcacgtctcccggtaaggctgcaaaatccattttattcacataaggatttatcatgaaacgcaatatctacctcaaaacaatccctcccgcggaagccgtcgcacgggtgaaggcttccatagaccgcgaagcgctgatccgcgaggaaacgatcccttcgcatgaagcttcgggcagggtactggcgcacgcggtgcacgcccgctattcctcgcccaccttccactcggcggcgatggacggctacgcggtcaacgcccgttcgaccttcgcggcacgggaagggcacccgttaacgctcaaggccggggaaacctgctttgccgtcaataccggccaccccatgcccgagggctgcgacgccgtgatcatgatcgaacaggtcgtgctggacggcggcagcgtcaccattgaagcccccgcctttccgtggcagcacgtccgccgcatcggggaggacattgtggcgacggaactgctctttccgcgcaaccaccagttgaggccgtgggatgtgggcgcgctgctttccggcggcatctgggacgtgcccgtctgggagcgcgtcactgtccgcatcatccccacaggggacgaagtgctcgacttcaccacgcaccccgatcccggcaagggtcaggtcgtggaatccaattcccagatgctggcggcgctggcccgtgaattgggttgcgtcgtggaacgcgccgcccccgttccggacaacccggaagccctgcatcaggccctgaaggacagccttgacgcgggcaggcacctgaccatcttctgtgctggctcgtccgcaggctccaaggacttcacccgcgccacgctggaaaaggaaggcgaaatcctcacgcacggcatcgccgccatgccgggcaagccgtccctgctcgccaactgccggggccgcctcgtggccggggcgccggggtatccggtaagcgcgctggtatgcttcaaggaactgctcgaaccgctcatttcatggctttcgcaccgcgagccgcccgcaaaaaccgttgtccccgtcgagctgacccgtaccgtgccatcccgtccgggcgtcgaggagcatgtgcgcgtgtccatcgggcgggtcggcgacaaactggtcgccacgccgctcggacgcggggccgggaacatcaccaccgtcacccgcgcgcagggcgacgttcgcatccccgagcaggccgaaggcctgaacgagcacgccgtggtgcccgcggaactgtccgtttcggaagcggaactcgaccgcatccttgtctgtgtgggcagccacgacaacacccttgatctgctcgccgacgaactcatgggcctgcccgagcccttccggttcgcctccacgcacgtcggcagcatgggcggcattacggccttgaaaaacggctcctgccacctctccgggatgcatcttttcgatcccggatccgacgacttcaacttcccgttcatcaagaaattcctgcccgatgtggacgtaacggtcatcaatctcgccatccggcatcagggcatcatcgttccgcacggcaacccgatgaatattcagggcatcgacgatttcacccgcgtccgcttcatcaaccgccagcgcggggccgggacgcgcatcctcctcgactggaagctgaagcaggccgggctcaagccttccgacgtcaaagggtatgataaggaggagtttacgcacatggccgtggcggtaaacgtgctcaccggggcggccgactgcggcatgggcatctacgccgctgccaaggcgcttggccttgatttcgtgccgctcgcccttgaacgctatgatctcgtcatccccacgcgtttcctcgatgatccccgtgttcaggccgtccgcgccctgctcgattcgccggcattcaaggcgcgcatcgaagcccagggcggctatgacacgcccctcaccgggcagatcatggcggaaggcgaaaaacggatgtaggaaaaggggaggggaacctttgggataggggttgcgttgccgccgatgtccgtaagggctaggccccgcctgacggtcaaggcccttgcggggccgtccgtaggggaaccctcccccgccaagctccacccctaacccgtttccttgtcagggaaaccgattagcacagccaaggaaagcctcatgatccgccctgccacagaagcagacctgcaagcgattttggatatttataacgatgccgtcatcaacaccacggcagtctacacctatacgccgcatacgctggacatgcgcaggcaatggttcaaagagcaccatgaggccgggcttcccgttttcgtgctggaagaggacggcgtggtagccggattcgccacctatgggaatttccgtccgtggcccgcctacaagtacagcatcgaacattccatttatgtacataaggacttccggcggcaccacatcgccacccggctgatggagaagctgctggaggcggcgaacagggctggctatgcgaccatgatcgcgggcatcgatgccgacaatgccgccagcatccgtatgcacgagcgattcggattcacgttcgccggaaagatcgtcaaagcggggtacaagttcggccgctggctcgatctcgttttctaccagaagcttctcgacggcccgaagcagcctgttggtgaatgagagaagaaaaaattggagagggggaggggaacctttctttagaaaggttcccct

SEQ ID NO: 7471 - DNA, 741 bp, Unknown
  gut microbiota DNA sequence
cctttaaaaagggcttccctccccttccccgaaccccatcccctccctcctaaatttttcgtagtggaggcgggggggatatgtttttcccgtctgtaaacggacgatccgggagttcggatgtttctggaagtcgaaaatctgcaagccgggtacggcacggaagaagtgctgcacggcgtgagcctgcgcgttgacgaaggcgaaatcgtgagtatccttggtgcgaatggcgccggaaaaaccacgaccctgctgaccatcagcgggcttgtgcgggcttccggcggcgcggttcgttttcagggagaggatctgcacaccctgccgagccatgaagtggtgcggcgcgggttgacccagtcgcccgaaggccgccgggtgttcggggtgctctccgtgctcgaaaacctgcgcctcggtgcgttcaccgtgggggacaaggaaaaggccgagcagacgctggactggatttttgatctgttcccccgtctgcacgagcgcaaggatcagcttgccgggacgctttccggcggcgaacagcagatgctggccatcgggcgtgcgctcatgggccagcccaagctgctgttgctggatgagccttcgctcggcctcgcccccctgctcgtgaagtccatcttcgagacgatccgcgccatcaaccagtccggcgtgaccattcttattgtggaacagaacgcccgcgccgcgctcaaattggcgacccgagggtatgtg

SEQ ID NO: 7472 - DNA, 270 bp, Unknown
  gut microbiota DNA sequence
agggtgcccgtgagcgcggcctcgccgtcggcaaccgtcgtctgcgtggtgtccagcgtgctcagcacgggcgcgtcgtcaagcgcgtccaccgtgatttggccggtcgccgtgccgcccgtggtcgtgatggtcacgccgaacgcgtccgcgtgcacggcctccccgcgccccgcggcgttgtcgtccggatagtctttgccgtccacgggcgtggtcagggtataggtgtagtgcacggtcccgtccgcatccatgcccgtcaccgtc

SEQ ID NO: 7473 - DNA, 11405 bp, Unknown
  gut microbiota DNA sequence
tcaggggattcaataaaaggggaagagtttagagggatgaggggggcccggggagggggaagggaacctttaaaaaggttcccttccccctcccccgcttctctcttcgttacgccccgcgcgcggcaagctcacgcttaagggcgcgggcgagctgatcagggcaggacgtgggcttgctgccgcactggatcccttcaagccgggaaatgacggcttcggcgggaagcccttcagcaaggcgggcgacggcttcaaggttgccggggcaaccgcccgcgaaacggatgccggtcacgcggccgtcatcggtgatatcatactggagcgcgctggaacacacgcccataagtggagcaatagccatgaaaacaaatccttatacaatcaaaatgtgaccagaaaacgcggaaccgcgggtcccgcaatcccgatatcccgaaccgggaaaccccgcaacaaaagaccatcccgcaaaacgccgggacaagggccttagctgcggaaaagatcggagagcgtgttaatcgtcatcgcggtcatcgtcgcggcgatcatcctgggaacgggagttccttggcatacgcgacggattggaatcccggccgatttccccgccattccagcggaagccgtattgccgcggctgcacgatgcgcccaaacgaatgcccgacactgtccacggacttgaccaggtcgtcaaggttctccagcgcttccgaagcatcttccagcggttctgcggcatgagccggatacgcgtacagaacgccgaggacggccagagcgggaagccattttacaaacacggtaaactccttgttcggttgcacggcacagagagcgccggtcagcagcatactccaaaacgggccgggggaaaacagggcggaaaagaaagctgctttatcaacaagaacactatgatagcgtcgaaaggaaagggtacgtgcgggaactttgcggcatgaggcgggacatgccggggcgaaggcgggcaagccgcttctgtgaaagcagtcggcgcaatgggcaaatgcggatattgcgcccaagaacgcaacagtgcgtaacagccccaaattggtgctggaacacggaaaacccacccaatagcacccttgacccaaaatcgattttgcgggaacacggaatgggcgtttttacgcatgacatgatacgaggtgcgatatggctcatcattattccaattccctttatgaccgccttgcggatcggctgaaccagttcccgcagggcgcgccgctttccgacagcctctttgccattctgaaaatcctcttttccgaaaaagaagccgggctggtggcgcagctgcccatcaaacccttcaccgtagaccgcgccgccgcaatctggaagctcgacaaggccaccgcccagaatatgctggaagacctcgcgggacgggccatgttgctcgacatggagcaaaacggccagcagatgttctgcttgcccccgccgatggccgggttctttgaattttccatgatgcgcgtacgcggcgatgtcaaccaaaaagcgctggcggaactgtattaccagtatctcaacgtcgaagaggatttcgtcaaggcgctgttcgtcgagaacgggacgccgcttggccgcatcttcgtacaggaagccgcgctcccgcaggacggcaagctcgaggtcctcgattacgagcgcgcttcacacatcatcaagacggcctcgcacatcggcgtcagcatgtgctactgccgccataaaatgcagcatctcgggcgggcgtgtgatgccccaatggacatctgcatgaccttcaacacctcggcccgctcgctcatcaaatacggccacgcccggcaggtggacgccgccgagtgccttgatctgctcgccgtggcgcaggggcacaacctcgtccagtttggcgaaaacgcccgtgaaggcgtgaacttcatctgcaactgctgcgggtgctgttgcgaggcactgctggcgatcaagcggttcgccatcgcccggaccatccattccaacttcatcgcccgcgccgggaacgattgccgggggtgcggcaagtgtgaaaaggtctgtccggtcaatgcgatccacatggaagacggtccggccggcaagcgcttcgctttcgtcgatcccgagcgctgcatcgggtgcggcgtgtgcgtgcgttcctgtgccttcggccagcttacgctcgaagcccggcccgaacgcgccatcacccccctcaataccgtgaaccgcgtggtcgccatggccgccgaacggggcatgatcaaggaacttctcgaagacaacgacgcgatgggcaatcatcggatcatggcggcggtcatcggggcgatcatgaagcttcccggcgcgccgagggcgctcgccgtggcgcagctcaaatcccgctatctggaaaacctcatcggcaaaatgggatgacggaagcgaaagccccaaaaggccagctagcgatggttcgcaaagcatcgcccgctggccttttctttttcctggttgcacgcggcatcgggagtaccgcgcaagccttggacgcgggatggccccgctcccccgcacggcgcggcttttccggcaaccccgatacactttgttacattccgctgcattcggcacatcctcatgaaacattccacgggtagtttcgcttccacagggcaacgagccctaaaggagcaactaccatgttgaagcatacatctttgatcgtcgccggggctctcgtcctcggaatggggatttccaccgcctctttcgctgaaatgccttctctggacagccagtcctacacgtggcccggttccaccatcaacaccagcagcgataccgacaagatcgcgcccgatccgaagaccggcaagcggcccggcatccttgactgggagggcatgggtgccgatgtgtcgaggcatcccgacaagcccggccatgatcccaagaactgcggcatctgccagtagccctttccgggggaaaatgccgtcctccgggaaagttccccgcgtcccctcggtcgtaacgggccatcctcaaggggggggcgctgaggaacccctcacctccggacgggccgaagacaaggcatctccggttccgtccaagaggaatctttctttttgcctgcaaatggagcatgatcggattgccccggacagggccatccggcgacacggccaccgttggcggatcggaaggcccggcgggatgggaggtaaaccgtgccagaccaaacacgccttctcgtcgttgacgacgacgcggacatccgtgaactgctctccgcctacctcgcccgttacgacatgaccgtcgaaaccgcggcggacggcgcggggcttttcgaaaagctcgatcatgcccacttcgatctcatcattctcgacatcatgctccccggcgaagacggcctcagcttgtgccgccgccttcggggaacctcggcgatcccggtcattttcctgacctcgctggacagctccacggatcgggtcgtcgggcttgaactcggcgcggacgactatgtggtcaaaccgttcgatccccgcgaactgctcgcccgcatccgcacggtcctccgccgcgcttccgacaaggggcaggccgcggcgcagtcagatatacgccgtttcgccggatggaccctcaacgtccgctcccgcgagctttcgcagggtgacgagcggattgccctcagcgacgcgatgtaccggctgctgctcgtgttccttgacgagccgttcgccgtattgagccgcgagtatctgttgcggcaaacgcaggggcgcgacgccgacgtattcgatcgcagcgtcgacatacaggtgagccgactgcgcggggtgctcaaggatacgggcacgtccaaaatcatcaagaccgtacgcggcggcgggtacatgctttccgtcgacgtggagcacgacgcgtgaaccttgaccgcctgcttccgaaaacctccttcggacgctttttcctgatcaacgtgatcagcctcgccctattctggctgctcatccagcccatggccaactactggcgcaaccaggccctgttccgcatggtggcctcgaacgaaagccgcctcttcctcacccatatccgcctgctggacaaactgcccacgattgccgagcgcaacgggctgttcaatccgaatgacgacgtattctcgatccgggtttcgcacttgccgccggatatgccgcgggacggctcgaactgctcgcagagcctgcggagacgcctcgagcgggcattcaagcaggaaaacatccggtatacggacctcctgacccgtatcgtggtgtcacatgcaccgatcacggtcatgggcagtgaagaaaagtacagcgatctcgaaacgtttttgacgcaccactatatgcaggccgaaatcgccctgcgcaggcccgacgggatctggatttacgccaagcaccagatagaaatcatgccgcaaaaccggctgtggctgaatacggcggcgctggcgatagaattccttctggtcatgagcggggtggccttggcgctgaactggctgctgcggcccttgcgcaagctggtggcggcaaccgaccgcttcggcaggacgcaggagatcacgccgctgcggacggattccgggcccgtggaagtacgcgaggccgcatccgcgttcaacaggatgttttcgagtattcagcgatcattcgaggaacgggaacgcttcctgacgtcgttttcgcatgacctgcgcaccccgttgacccggctgcggttgcggctcgaacaggtggcacaggacgatctgcgggaaaagctgtgcgccgacgtggacgatttgaccgatacgctgaaccgtacgattacgtttttgcggagcgcgcggagcattgaagacgtccggcggccgattgcggtgatgccgctgttggaagctctggtggaggacaggcagggcattggggagcaggtaacgctgaacgggaacacggccgccgtgcttttaagctggaaccggttgcggagcgcctttgaaaatgtcgtggacaacgcgctgcgctatggggattgcgccgacattgaggtccaccacgaaagagactccgaaggcagggagtggctgtacatcgacttccgggacaacgggccgggcatccccgaagaaaagcttgaattcgtattggagccgtatgtgcgactggagacatcgcgtaaccggaaaacaggcgggcatgggcttgggttgtccatcgtgcgcaacctcgtggaagcgagcggaggcagggtgctcctcatgaaccgcccggaaggggggcttctggtcaggatgttgttcccgctctagccacgccgggcgcccttcatgggtgaacccgcgggaaaaaccaagagcattggccccatattcggccttccggccgtcttttgcctgctttcataaaaaaacacggctagccaaattttttggtgggctttttctttttcaggcacaaaaaaacgatatgcaacgaaaatagccctgttcgctcaaaagtttctagacctttccggcaatcgggcctactctaaaaaggagtctatcctatctcaacatcaaccgcctttacccatgccagacaccaccgcttacaatttaagcaggacaggcaccatctcttctttgttttttaaaaacttgtgggtgctcttttccgctatcttcgtcgtcagtctgatcgggactctgttcacgacgtatttgttcatgaaaagcaccgcggtggaatccacacgcttccttgccgacgatctgacttcccagctgaacacggtctattcactgctcgaaggcatgagcgagcagccgctgatcaaagatacgtccatccccgtgcaggaacgcgccgcgtccatgaaaacgtatgcggacgctttcggcttctggatgatcggcgtcgtcgatcccgacgggaccatttcgagcaccttgcggcccaaaaccggcaaggtgcagcgcggctacatcccccgcatcatggcttctggaaaacgggaaatcagcgatccgttccccgccggggccaccggggacatgacctacagccagtttatgcccatcaagaaagacggcaaggtcgtcagcatctgtttcgtcaccacgcccctttccctgctcagtgaacgcgttacccgccgcgaccatacgggaaacggctactacctgatgctcagcagcaccggttccctcatcgcgcatcccaatcccgcaatgagccttacgcacatcagggatcacgtcgcgggagaacggttcctctacggcagcagccgggaaaccttcctccgcgacatcaaaagcgatcagccggggacgttcatcagcatttttaggaatacgctctatttcacggcgttcatgaacatacccgaaacaggctggacgctcatccaccgggtcaaaatcctgccgacggtcaagtacatgctgctggcctttttcacacagacgctgctgtacaccctgctgttcgtggtgctctatcgctacgggcgtaccgccatttcgcaggaactcaggccggtggacaacatcctgcggcaagtcgaagagctgaaaagaagcgtcaatgccgccgacagcatcacggaagaggatgtgttcaacatcatcaacatcagccgcaaagggttgtacgacgcccttaccgggctgcctacgcgcaacctcttccgccagcgggtcaacgacaccatcgaaaagatgccgggcaggctattcggggtcttcatcctcgacatggacaaccttaaggccatcaacgaccatctcgggcatgaggcgggcgataaggccatccggagcttcgcctcgaccctcaaagaattcacggaacgccacttcgggctggcctgccgttacgggggcgacgaattcgtcctgctcatcccgctggacacaccttccgatgcttccgccctagcccgggaactcctcgaaacccagcacgggagcatcgtcgggaacgatgtggtttatgcctacggtacgagcatcggggtcagtttctacccgctttccggcacattcgacgaagccctccacatggcggacacggctttgtactcctccaaacggagcggcaagggaacgttcacctgccttccctcccatgcggaatggctttaatcccttccctagccggaatcgccgctttcccgtcccgaaaggcatcctgcacagcttcctgaaaaaatccggcgtccgcacgcgcctgcaaagggaatcctcaccccgtggcctgcctccgcgataagtggtgttgcacgctccagagatcgaaggccccatatgccttcggacacgggaaaagcccccgccttcgacggcgcggggcggggacggctcccgatgggaaagcttcgcgggcacagtcccgtgtggtggaaaacgcctcgggccgccgggccatccgaaagcgccgcctcaacccgctccgagggaaaagggccgaaggcgggccagttcctcacgcaaccgcccgttttcctgcagcagcttacggttttcggcgtagagttgacggttttctacggaaagctcccggcgctcggtgcgttcctcatccaattccttcagcaccagagggcactggcggcagccacatcctgaagaaggatattcctttgattgttcgcgcattacaccgcgcccgaacagcaaccactcgggagagacatcaaaaatggtacatacattaatgataaacgccaaatctggcatattggcgccccgttcgtacctcccaagcgtggtgagcggcgtccgcagacgtgtggcaaattcgctctgtgtcatggcgccccgtacggccttcagccgttcctgcaatgattccataggcagcgtgcatccaaagcccgcagcccctctacttttctccggcagggcgcaccatcggatcgtcgtttccggatccggccggaaaattccatttttgattgacaataatccaaaaatggttaataaagggcgtgggcggttgagaaatgatgtgacaacagaactctaccgaacccctaccaaatgatcaacgtacaccccaaggagtgtggccgaacaggaccctctcttctccgcctcaacagtctccccaacagcgcctgtacccttatccgggcaagcgcggcatgttgtgcctccaggtgtgtcggcaatacatgaatatatatacaacctattctgtatttgctctttagcgcggagcatgttaattcctgtctgtcatgaagagacacacctgtaaggacgttcaatgacaaggcaagttcagaatccgttgacttgcgcctctccttcggacgaggtttctgaggttgcagcctcctctcaacggcgcgatacagccctgcaaaggaccgcatcttcacttaatctctacaagatcattggggatagctcatccgaaatcgtctgggaacaggcctccgcgccgaatgcagactgtattttttccggtgatccccgctttgcctgcgccaacaagtgcctcaccgtcgaagaagcttacgaaacggttcaccccgatgatcagccgctgctccgttccgacattgattcgctccattccggagagcaagactctttttcgcgccgtatccgcgcccttggctgcgacgggagctggattcccgtggatgtctgcgcccggagcctgcgcgacaacaataggacgcccctttaccttatcggcggctttaagggcatctccaaccttcctcccgtctcctccgctatcgcgtcatcccgcgatcccctcatatccgacattatctgggaacgtttcgtttccgggggcggcttcgccatttccgacggtgtggaacggttcctcggccatccgcgccaccacttcaggagcgtggaggaccttgtctgcctgcttcaccccagtgatcttgccatcgtccacgaacgcatgaaagccgtgagcagcctgaccggctgcgactgcctctccgtccggatgcgccataatgacggcacatggcggcaagtcgaggctcgggtggtcgtcttgcgcggccgggccggtgaagacaggatcatcggcgcactcaaggacatcacccccaaggccgtgcgggatctcccgtcgctccagcccgcgcagatttcatccttgacggggttgtacacgctcgaagccgggcaagccattattgaaaaaaaccttctcacaggcctcaacctgcaggctctcatcctcgtggatttccgcaacctcgacgagatcgagcagcgtcacggcaatcgctggaagaacctttttctccagcacgcgggggccatcctccgcaacctcgcccgcgagaacgatgttcccatccactgccgcgccggttcgttcatcctgtttgcggatcagtacgagtccttccgtgaggtgaccgacctcacccgcaacctccagcggacgctcggagccgtctgcgcgttcgacggcgaatccgattccgtggaattttccatcggcatcgccgtcgcgccctatgatgccctcactttttccggcctcgtagaccgcgccgctcaggcgtgcagccagcgttcgggcgtcaacttctacgacaaacaggccgccgatcgtttccggcttgactcggagctcctcgaagaggaacggcgccgcgaaaaagagcaaatgcgcgaagccctccagaccatcatggataacgtggacgcctacctcttcgtcgtccacccgttccgccatgaggttctgttcgccaaccgccaaatccgcagcatccggcccgaatgtgtgcccggttcagtctgctaccgttcctttttccgtttcgacaagccctgcgtcgactgtgcgatcctcaaagggcgggattgccttatcgaaaaggacggccaacagatttatctccagctccgccataaaaagatccggtggctcaacgatgagatggtctacctcgtcagcggcaccgacatcaccgaacgtatgctccatgcccgcaagcttgagcacatggcctatcacgattccctactcgacatccccaatcggcaggccgcgctcaggaacctccagcacatgctgcgcgagggcaagcgttgtgccgtcgtcctgttcgacatcagcgatttcaagctgttcaacgaaaccttcggccacgccaagggcgacctgctgctcaaggacgtgagcctgtccatcgcccgtttcgtgcctgaaggcagcctctaccgttccggaggggacgacttccttgtcctgctttccggcgctgacggcccgcaggccgaacgcctcgcccagtccgtcaggaactccttcctgcgcgtgctcaccattgaggatctcgaatacacctgcaacatcgacgccgggatcagcatttcaccccaacacgggaccaatccaagcaccctcatcacccatgccgagctcgcccttgccgaagcccgcaaggaaggccggggcatctaccagttcaacaaggaactcgatcagatcctctcccgcaagaagctgctccagatccttatccgatccgccctggccaacggcgactttgaggtgcatttccaaccggtcttcgagatcagcacgggcttgttccgcaaggccgaggccctgttgcgtctgcgggacgctgcgggcagctttatttcacccgccgagttcatccctgtagccgaagagaccggcctcatcgtggatgtcgggtatcttgtgctcgataccgtctgccgccagctgttgagcatggcgagcgtagcggggcttcctttccagatcgccgtgaacatttccgccatccagcttctccagaccaatttcgtcagcagggtcgtggagatcatccagtatcacggcatcaacccgcagcagcttgaatttgaaatcaccgagagcgtgctcatcaattccttcgagcaggtcaagggcgtcatgcagcagctgcgggacaagggcatccggtttgcgctcgatgacttcggcacgggctactccagcctgagctatctgacccaccttcccatcagtaccctcaagctcgaccgctcgttcatcaggaatctcgaaacatccgaaagcaaccggcaggtatgcaaggccgtcatcgacatcgcccgccacttcaatatggcgatcgtcgccgaaggtgttgaaaacgcggaacagtctaaaatcatttcagaacttggagcaacaagcatacagggcttctactatgcccggcctctgcccggcggccagcttgttccgtggctttcggaacatgaagatcacgatatcccaacgcccgagcaagacaggccgagagagagagagagagagagagagagagagagagagagagagagagagagagagagagagagagaga

SEQ ID NO: 7474 - DNA, 26852 bp, Unknown
  gut microbiota DNA sequence
aagctgaatggcctgcgctcctgcccctccgggggaagcgatgaggagagcgggtcttttcacgcaggcgagaaaagatacgtgatgccgcacggttttcaggctgggcaagttctccctgttatagtggatgacgcggtatcttccctgctttccgatctagagcccagggttcaaatggcagatacggaactgctgggaaactgcggtatttccatgcatgatggagcggtaagcggtcttgtggagccgtatcggatcgattgcctcgccgctcttcaagatctccgggaaaggcgacgcgatgccgccgttgcgcaatccggcccctcaacaactcccaccttgctctctgcccgtccggcgctgtgcccggatgaaggaaccgccgaaaacagcatcatatccgggctcgggcctgagcgagaaccagccgcttcctgtatccaatccaccgatcgactgcccccctctcctgaagggagcgcaccaccctgcattccccggtttccgggttcttcggctgtgtctccggatctgtcctcacaacagggatatcctcccgacatgcagcttttcccaccggatttgaacaaaaaagttctattatctgaagatgctagagagagagagagagagagagagagagagagagagagagagagagagttctggactccgccaaaactgatcggggcacgggccgccttccgggctgagccactttccctttccccagactctcttcaggatataaaccatgtccaatagccccatttcttccagcaggatcgacagcaaagacgaatcctggctcctcctgttgtccgatccctcggctgaaaaagctaaaatgcggtcaaagctggttttctttagctgctgtaccttgatgaccatgatccccgccattgccgcactggtgctctatcccttggggcaagtctttgcggcgcttatctccctcatcctcgccggcgccgggctcgcggggggattctgcctttacgtcaaccggatgctccggcccacccaccatattgccacagccatcgagcggttccgcaggggagattccgccgtgcgttgcccggaaaaggctccgggactgctcggactgctcggagaacgcgtcaatctcttcctctcccaaattcaggaagggcgcaaagaactcatgcgcgtggctccccacatcgatataatcgcccacaacctccccggtggcctgctctgctgtgccgaggatttcgagctgcgcttcgtcagtgacggcatgttgcggctcttacgctgttcccgcgaggaaatcacgggccgctacggaaacaactggaagaacatcgtccaccccgacgatttcgccttcaccgtggcccacctcgatgagcagcgcaagatccagcctgaataccggctcagttaccgtatccagcgcgcggacggctcatcctgctgggtgatggaaagttcccggctgacggtcaacgccgacggcgtcccggaatatgtttgcatcattatcgacgatacggaacaaaagatcatcgagaaccgccgcatcgccgtggagcggcaataccgccgggcactccagtccgtgtgcgaaatgctcattcaggtggatctcacgaacgatctcgtgttgtccgaatacgtgcgctggggagcctcttcccggttcccccggggcgagaactacagccagtgctgtgtggaattcatgcaggaatgtgtccaccccgacgacagggggacattcagcgcggcgttctgccgcaagaacctgcatctccagaatatggatgaggacgcgcccgtcacataccttgaataccgcattaaagaaccttcgggcaactatcactgggtcgcgggcacgctggtcccgctcgaagacgaagccacgcacacgatcaccgcgatctcctacgtggtggacatcgacgaacgcagacgccgcgaagacgccgtcatcgacaaatcccgccgtgacggtttgaccgggctgctcaaccgcaacgccatgttcgagctcattgcctccacactcgaaggcctagggcacaaagggcggcattcgctgttcatgattgatctcgacaatttcaaggcaatcaacgacaacttcgggcatgtcttcggcgacgcggtgctgcgcgaggtggcggacggcatccgctccgtcttccgtcccacggacgcgctggcgcgcattggcggagacgagttccttgtgttcctcgaaaatgtggacaagccggacgtcctcgccagaaaagccggcgaagtggtcagcactctacacaagtcctatatcggccccggccaaaacttccctctctcgtgcagcgtcggcatttccgtctaccccgacgacgggcgcaccgtcatcgacctctttaagagcgccgacgccgccatgtatgcctccaaacagcacggcaaggaccgctattcctttagggagtgaaccccgtttctttgcgttgctcttgccttccgtgtgccggaatgcccgaggatacagttcccgttcgacgtattccttggaaaaggctttccccaccgcttcggggtgttcaaaaagcagcctccgatccctgtcaaagagcacaaccagggaggcccacacaggctgttgcggcgtactcataactccttcccaccgttgtcgttgctggtattcgttattccagcttcctttttcaccacgagtccctccgcccgtcaatgacaagctgacggcgccgcgcgctcttttcatcgccagccccgcggacggccctttctccgtctttcagagagggctcatatccttccatacgaatccggaacccacctcctgaaccggcctcccggccttttccggataccgctctaacaaggtggtgacatgcggcaacaggcgtgctacgcagggcgagaacttcaggagggacaggtcgtatgtccggattcggtgtttttctggctatagcgacggccttttcatgggcccttgggtgcgtcgtccatacgacggcctcaagggtggtggggataccggcggtcatgctcatccggcagccgctggcgagcgtggtgctcggcatcttttgcctggttatgggcgatctatggcttccgtcgctgcatttgttttggctggcggcggcctccggagtgttcgggatcatcataggcgacgcctgccagtacgcgggcgcactgaccatcggcctgcgtccggcgcaggtgtgccaatcgctgtcctcatgcttcaccgccctgttcggctccatctatctgaacgaatatatagggctgcaaggctggctcgggatgttcgtagcgacgtgcggggtgatcctcgtggtcctctccgaacagcgggacgcccataaccctcccgtatccagcaaacagcgcaacaaaggggtcatcatttcgctcctcgccgccgtcttcgtcgcgctcggcatcgtcttttccaaacaagccctccaggagggcatcggggcgctgcctctggctttctaccgcaacgccatttccactgcgggcatctgggcggtaggcctcgccttcggagccatccgcccggcgttcgggaacctcaaggccaaccccggcatcctcaagcttttcccgctcggctgcctcttcggccccgccgggggcatctggctttcgtgcgtcgccctcgactatcttcccgccgccgtcgccgcaatgctcatcggccttcaacccatcgccctgcttatcatcaccggcatcatggaacgccgcatacccgcccccaactccatcatcggctccatcatagcctgcaccggggcggcaatcctgctgctccgataacacaaaaagaagcgccctcatcaggcggattccgttaaaacggcctcccaaggtgccccgctccaacagcgcggcaccttttttcgcgcgctgcgtcaatccgttcatgctttccagcggcattcccgccttgaaacgtgttccctcccccatacctcatgagaatcattcaaataatcatgggagttcgcccaaaacgggctattcctaaaagaaaagggcttcctttcccccatcagtgcttgaagccttgacgtgatccttttgcattcaggatgccgtatgccaaacaacgtattctctactgcattggcccgtaatccctacccattcgacagccgttcctctcgagtgcgatcacactggctcagggcgggcatcgccaagccactcatcgtggcgctatgcctgatcggggtgccggggtgctccacatggagcgtggggcctgatttcgagcgacccgatatgcaaaacatgccggaaaaatgggatgcgggcgacccgcaacaccctctcgtcggcaatgtctctctggatacatggtggcagagcttcaacgaccccgccctgaaccagcttgtgacgcgggcgcgcctctccagccccaccatcgaggcggccctgctgaaaatcgtacagtaccgcgcacaatatgccattgccataggcagtttctttccgcagacgcaggagctcaccggaacatacagctccgaacaccccagccgccggtccgcagacgcgccccaaccgggcgagccctcgcagcccggcaccatccagcaactgaatctgggctttcaggcgacgtgggaaatcgacatctggggcaaataccggcgcaacgccgaagccgccaaagccgccctgcaaggcgcccatgcgggctatgaactcgcgctcgtaacgctcagcgccgatgtcgcccaacagtatttcagctatcgcatgacggaaaaacagctggaaatcgcacggcgcaacagcttggcgcagaaggaatccgtacgcctgaccgaagccatgttccgcttgggagcctcaagcgggcgggactatgatcaagccgtcgccatgcagaagaatacggaagccgacatcccgcagctggaagcacagctgatcaccaaccgcaatgccctgtgcgtgctgctcggcatcccccccggccccataccggaactggccccgggctgggtgccgcaaccgcctcaaacggcttccggtgcagcgctggcgtcttccgtgcccacagcggggaaaacgcttcctcagggggcaacgccatacgcggcggaacgcaccgcccaatcctttattcctctggacatagccataggcgtcccggcggatctcctgcgccggaggcccgatgtacggcaggcggaacaggaggcggcggcccagtgcgcgcgtataggcatcaacaaggcggcgctgttcccttcgttttccatcagcggctttctgggattccaaggaagcgacgtcggagccttcacgctgggggacaccttctcgcacaacgccttcaccgcaagcgcctcgccgtccctggtgctgcccttcctcaactacgggcggctgtacaatgccgtacgcgcgcaggacgccgttttccagcaaagcctcgtcacatacaaacaaacggtgctacaggcattgcaggaagccgagaacgccatgagttccttcatccgttcccgccagcgcctgaccctgctccagcaggcctccgaagccgccgggcgctccaccaagctggcgcttgagcagtacaacgcgggcagcaccgattttaccacggtcgtctcggcccagaccacgcaataccagcaagaaaacagcgttgcggcggcagcgggaaacacggcgctgcaagccgtggccctgttccgggccctgggcggcggctggcagccccagcccctcccgttgcccaaggccaccatcgacgcgatgaaaaagcgtaccgactggggcggcatgttgcgcgatatggaaagcgtccccgttgccgggcagtccgagatcccacaagccgaaacgcacagaggttactgatatgcacagctgcgactcccaaacatcccttcgccaaaatcccgcccgcgtgcccgcgttcctcctgcccggactgccggggatcgttgtggccttctgccttgttctggccagctgcaacgacacgccgcataaggcggaaacggatgaacccctgcccgtggccgccgtcaaaccggagcggcggaacgtgcctttgctggtggaaagcacggggatgacgcaggccgtgcgcactgcggacattgttgcccgggtagaaggcacgctgcaaaaaatagcctatgaggacggtgcgctcgtgcaggaaggggacaccctgttcgtcattgatcccacgatgtacaaggccaaacggcagcaggccgaggccacgctggcggcgcagaaggcggtgcggaacagggcggcggtcgaatacgcccgcaaccagaagctctatgcggaacgggcggcctcacagtccacggtggtcagctggcgcgaacagttgagcaatgccgaagcgcaggtcgccgccgcacaagccgccctgacccaagcgggcatcgaattgggatatacggtcatcaaggccccgttcaccgggcgcgtgtcgcgccataaagtggacgtcggcaatgtgatcagcccgcagaccggaacgcttgcctccatcgtttcccaagatcccgtctatgccagttttacggccccggcggacagcatcctgccgcttctgaacagcttcgacgacgccaaatccatccccttggaactggccgtcggcgatgggccttattccatcaaggggaagctcgactacatttccccgcaagtggacgcctcttccgggacgctcgccctgcgcggcgttttccccaatacggacggcaagctgcttccgggccttttcgtacgggttcaggtccccacggagcgtgaggacgaagtgatggtgatcccccggcaggccgtgctggagaatcagggaaagtcctttgtatacgtcatcgcacaggacagccgggcccgcatggtccccgtggcgaccgggcccgccgtgggcagtgaccgcattgccgtcatcagcgggattaccccggaatccttggttatctatgacggcatggcccatatccggcagggcatggccgtcaccaacaccgcacaatgacgccccgccgcacgctatcggcacctccccccgcagtatgaggaatgtcctatgtttacacgcctgttcgtccaaaatcccatttttaccaacgtcattgccatcattgcggtcattctgggcgtcgtgtcgctgacgcgccttcccatagcgctgtatcccgacatcaccccgccgacgatcgccgtttccgccagctatcccggcgcggacgcggaaaccgtggccaagaccgtcggcgcgcccatagaattgcaggtcaacggcgtggaaaacatgatctacatgtcctccaccagcgccgatgacggcacctattccctcaccgtcaccttcgcgctggggaccgatgtcaatatcgccatggtattgctgcaaaacctggtcaacaacgcgctcccgctgctgccgcaggtcgtacagcagcaaggggtcacggtcaccaaacattccccctccatcctgcaggtcatagccctcgattcccccggcggctcctacgacaacctttttctggccaactacgcgaacctgcaaatcgaaaacgtcctttcccgcgtgaagggggtcgggcaggtgcaggctttcggggccgggttctacgccatgcggatctggctggatctcgacaagctcaactacctcggcgtgagcgtggacgaagtcaatcaggccatcagccagcaaaacgtccaggtagccgcgggcaacgtcggcggcaggcccaattccgacaagcaggccatgcagttgacggtgctcatgcaggggcagttggacacgcccacggcattcggcgacatcatcgtcaagacgctgcccggcaaccagataatccggctgcgcgacgtgggcgaaatcgaaatgggggcgcagtcctacggggcgcagtcccagatccgcggggacaacgcggcgctcatcgccatctaccagctgcccgacgccaacgcccttgaaaccgccgccaacatccgcagcgccatggaaaaactgtccaaggatttcccgcccgacatgcgctggacaatgccgttcgacacgtcgcacttcgtttccatcgccgtgacgcaagtatatctgacctttgtgaagtccattgtgctggtcatgctggtcgtgctggtcttcctccagaacttccgggcggcggtcggcccggcggtggtcattcccgtgaccctcatgggggcgttcgttttcctgaacatcgccggtttttcggtgaacatgatatcgcttttcgcgctcgtgctggcgatagggctcatcgtggacgactcgatcatcgttgtggaagccaccatgtcccatctggagcgggggctgacgccgcaggaagccgccctcgcgggcatgagggatctgttcctctccatcgtggcggtgatgttcgtctttgccagcgtattcctcccggcggccacgctccccggcatcacagggcagctgtacagccagttcgcgctggtcataggcggcgcggcactcctcagcgccgttttcgccatctcgctcacgcccacggaatgttccctgctgctccgccagcagaaagccgtgcgcccggcctcgttcgacgccccgcagggcgaacggcccgatttcgcggaagacaaggccgacgtgacgacaggcaatgtcttttgccgggtcttcaaccgcgggtacaacgccctgcacggctttgccatgcgcattgtggggatcaccctgcgctcgcccgccatcgccctgctgacgtacggcgtcctcgccgcctttgccgtctgggggctgataaccctgccgcagggcttcctgcccgaagaagatcaggggtatgtccttgtgagcgcacaactgcccgacgctgcggccagcccgcgcacttcggaattggcgggccgtatggatgaggtgttcgccaacacgcccggcgtggaaacatgggtcaccatcagcggcttttccatgatggaaggcgcggccctgcccaacgcggtgacggccttcgtgatctttgaaagctgggcgaaacgcggcaccaaactgaaccagtacgccatcatggacgaactctaccggggattcggccaaatccccgaaggggaattcatggtcatcccgccaccgcccatcatgggcatcggcaatgccgggggcttcgacatgatgatcgaagaccgggccagccgcgggcctcaggcgctggaagcggcggtccgggcctacgaggaagcggcggcgaaagatccgcgccttgagcatgtcatgtccctgtattccgcctcgacgcccaagctctacctgaacgtgaaccgcacgcaggccatgacggaaggcattgccctgccgcagcttttcacggccatacaaacggcgttcggcggccaatacatcaataccttcagcaaatacaaccagaattatcaggtgcgcgtgcaggccgccgaacgctaccgcagcacggcggacaaccttttgtccctgcgcgtgcccaacggcaaaggcgaggaagtgccgctggcgggtttcgcttccgtccagcaggtcagcgggccgagcatcgtgacgcgctataacctctactcttccgcatccatgcagggcagcgccgcccccggcgtcagcacgggcgccggcatgaaggctatggaagaaatcgccgggcgggtactgccccaaggtttcggctacgagtggacggggatgagctttcaggaagagaaaagccacgggcaggccgccattgccgtcggtctggcgatcctgctggtctacctgatcctcgccgcgctgtatgccaactggatattgcccctcggcgtgctgctggtcatcccgctggcgctgttcggcaccgtggccgccatcatgctgcgcggcatggacaacaatatttatgtacagatcgggatgctgctgctcatcgccatgtccagcaaaaacgcgctgattctggtcttgtacgcgcgccgttacggggagcaggggatgaccgccatgcaggcggcgcacaaggccgcgagcgtcagattccggcccatcctcatgtcctcgctggcctatgccgtgggcgccctgcccatgctctgggccacgggagcgggcgcgatcaaccagcaatatctggggacggccgttttcggcggcatggtggcgacggcgttgctcaccgtgctgtacgccccgtttttctatgcggtgttcatgggcctttccagcaaactgggcggcaaacggacgcccgaaccgaagcaagcctgaagcggggcctcacccagaggcttctccctgacccctgacaagggcgcttcccctgtgctccgcaaggcgagagccatgcgctggcaagggaagcacccttgacctgagccgcgtttcctttgaccgcaaggccgccaacggaaccgcttgaaacatggcgctgaatgggccctcgggaagtgaacttttttccttgtaaagcaaacagataccgttcaaaaaaaccatatgggaaccaaagccccaagcctcctctcataggaaaaagaagagggagccatgcgaatacttctttgtggcctccccttctctccatcacatttccggagcttccacgctgacaaagttcctaccattccgcttttcctatcagccggatgccacagcaaaggtgaagaaaaccaaaagagggaaacctctctccagaaaggtttccctccatcaggaactccgtaccgttccttaccggaaattattgcttggcgtcgtagatgaacgcgatgatcgaaccggggttcttcatgtcgttgacggggttgccgtcgttgccgagagcgttgccgcgcacgtcggtagccacgtaaatggtcttcccgtcgggcgaaacgagcgccgaacggtagcggttgggcgtatggaagtacttggccacgtcgccctgcgcggtcttgccgtcggcattgaggggtacacgatacagcgcgccgttcttgaggctggtcacgagaagggagttgccccagccggggatcgggccgttcgccgggtagtaggcgacgctcgacggcgcgatggtcggccagcacaggtaggccatgtcgccgcaacgcccgtcgcggaagttgtacgaattcggcacggtatagaacgtcttgatgggttcgcggaaatcctcggccttccactcggtttccttctgctgcggaacgctggcgggaatatcggtcgggaagtagctcttcgccagcttttcgcaatcaggggccgccgaccagttgccgtatacgtagccctgatcatcccggaacccggcgacgtgcggccagccgtagttgccgcccgccacgaggagattgatctcatcgtcggacgaagggccgtgctcggcctcaaagagcagatcacccacaaacacaagcccctgcgggttacgatggccgtaggtgtacacgtggctcctgacgccgttgatgacagggttgtcgtccgggatgccgccgtcgggattgaggcgcagtaccttgcccgcataggcggaatgatcgcccgcgtcgagttcggccttggtgggaatacgctgggcgtcgatgggcttgcagacattcgcgccctgattgtgcccctgctccccgatggagtagtagagcttgccgtcgggcccgaaacgcaggcggccgccgttgtggtcatcccccgcgggcatgttgctcaggattactttgggatcggcaatcttccgggtctgcggatcatagtggaaccggacgatgcgggcgtgttccctgccgccgtccatatatgtatgcgcgatatagacgttgttcttgctgccgtttttgccgagatcgggatcaagggcgatgccgagcacgccttcatgctgcggcccgaccttcacgtccggaatgctgccgacgagctttttctcgcccgttttgggatccacgctgataatgcggctcccctcgcgctcggaaacccaaatatgattatccggcccccagaccatatcccacggggcggcaaggccttcggcgataacgaccccttcaaacggttccgccgtgggcaccgcctttgccttttgcggcgctgcgccccaagaagccggagcgctcaaaagcaacagcgtcatcgcgcctgccatgactcgggaatggtgcatcctgtacctcctgatgtttctctgtgtatcggaacgcgaggcccgcctccgcgcggcttccggtattgtcaaaaacgggaagccctgcggattcccgttcggcaaaggagggggaaaaacgcctcccccgaaacgggttcctttcaggctggcgctgcctttcaaggctgaagcgcccccatcccgcaggatcgcgtgaggagggctttgggcgaggcgcgggcagctgctggaacggacgcccgcacctttcaacggcggaacagccgcagaattttacccatgacggatgaacgtcccctcttccagttccataaacgcgttgcgcagctcctcatcggtattcatgacgatggggcctccccatgccacgggctcgcggaggggcttgccggaaacgatgaccatacgggcgccttcgggaccggcatggaggtggatcttgtccccttccgagaagaggacggcacggcgggcgggctggatcacgccttccggctcataggcgcacgaaccttccatgagatacgagaacacggtattgccggggatggtatccatttcccacgcaccgccgggccccatctctacatcaaggaactgcacgtccacgtattcgccttgtgtcgcgccgccgatattgccgtattttccggtgacgacgcggatcgtcacgcccttctcctcgatgacggggatgtcgtcgggggtgatgtcgcggtatttgggatggaccatttttttgtcgcgcggcaggttgatccagagctggagcccgagcatccggggggatgccttgggcatttcctgatgcaggatgcccccgcccgccgtcatccactggcagcagccgtctttaatccgcccgctgttgccaaggctgtccttgtggtcgatttcgcctttcaccagatatgtaaacgtctcaatcccgcgatgcgggtgcagcggaaagccgcgcacgtaatccgcaggattcagcgagtcgaacgcatccagcatgaggaacgggtcaaagtcccggatcgtccctgagccgagcacgcggaccagatgtaccccggccccgtctatcgcctgacggcccgtcacgatctttttgactatgcggtatgacatgactgtctccttttttccccatactatccttcacacggtatggtgcgtcaataaaataaacattatttttagtatgatagagttataaagagactccacccgctacggaacgaaccgatttcacacccaaaaacacgcattgcccggtaacggcataccgatcccgtgcgcagcaaaagagcgttcccactttgaaaaagtgaaaacgctccttcacattgcggaacaaaaaaaccgcgctttcaggccagcctaaaaaaccagtatccggacaaaaacttccagcccatgatggggggaatgcggcggaagcaccgtctccccgaggcgcttctttctaagggaagaggcgctccggaagcatgaaccggaggcaaaaagaaagggcgtccccgagggctcgcaaacgcggggacgccctgcccagcgtccggggggtcggacgccgaacgcttatgcctgcccggacgaacccagcacggcgcggatcttatgccggaccatctcgcgcacggcttcgcggcccgcgctcagataggcgcgaggatcgaaggtttcggggcgctccgcaagcagggtccggatggcggcggtgacggccaaccgcagatccgtatcaatattgatcttgcaaatggcggaagcggcggcgcggcggagcaggtcttcgggcacgccggaggctcccgctacattcccgccgtgcgcgttgacggcagccacggcctcctgcggcacgctcgacgcgccgtgcagcaccagcggaacgcccggcagacgggcggcaatggcgtcaaggcgctcgaaatcaagccgcgcctcccccgaaaacttgcaggggccgtgactcgtcccgatggcaatggcaagcgaatcgcatccggtacgggctacaaatgtttcggcctcttcgggatcggtataaacggattcgcgggacgaaacggtttcctcgaccccggcgagccgtccgagttcggcttcgacccagacccccctgtcatgggcgtactccacgacgcgtcgggtgacggccacattctcctcaaaaggcaagtgtgagccgtcgatcatgaccgaagtgaacccgtcgtcgatgcaggccttgcagatgtcgaaaccggacccgtgatccagatgcagcacaaaaggcacatcggtttcttccgaagcggcttcggccattttacggagatagccccgcccggcgtactggcgcgccccgttggagacttgcaggatcacgggggaacgctcgtccccggcggcctgcaaaatgccctgtacggtttccatattgttgatattgaacgcgcctacggcgaaaccgcccgcaagggctttggcaaacatgtcccgaggtccggtaagaggcatctgacctatcctttgttcaaagggttccgtgtcgcttcaaaaaacatgcgccgttccgcggtaaacgggattcagccccgcccaggggcgccgtaatcccgcaagggcaataggccatactgcgaaaccgtggcccggcgggtacgtttccctcaacggcgttgcgctcaaaaaaacgcttaggaaagaagccgcatgtttccgaaacgccgcgatacgttacagccaaaactgacaacagccgttacagaaaagcctgacggacatactcggcgtcgcgcctgagcgcatacagggcatccgggccgaaaaccggctccgtataacggttttcgaggaacagcggcccatcgtacccttcccgcttcagcgccgcgagcaactcacccgcgcggcatgacccctcaccgagaggccggacgccgggttcgccgtacatgccgtccttgagatgcacgccgcaacacacggcgaggtgttccggcaaggcctcaaacacgtcttcccgcccacgcaggacaaaatgagacaggtcgaggcaggaacagagattgtcgtaggcgacgatattcaaaagggatttcatcatcgtaacatcaagaagattttccgtggctacagcaatgccccggtgtttcgccagcgcgcaggccagccgcaaacagcgggccgtctcacgcagatcatccttgttacggatagccgacgccttgaagctcggcagcacaatccggggaatgcccatgtcggcggcacagtccacggcggcggcaatggccttttccgccgtattgcgccgttcgcttccgggctcggcggtcatgccgtgcttcaggacagccagcacggctacagcgtcaagccggatgccgtatagctccgcctcttctttccattgccgctgtatgcccggcgacgacagcggaaaatcttcctccgcagaacccaaatcgagctggatcgcatcgatccccgcttccttcagctccttgcagcatgacggagattgcagcagggggtgcacccaattacagacaccaagcaatacggccatacagattcctttcaaaagccttgggaaggaaagaggttgaagccggggaaagcctcttcttcaaaaggccttccccgccacgacggtagagcatcccaatcgctaatctcttcccatgaccacgcggatatagtcctttacggagtcctcgatggaccagtcgggcgcgtaacccagttccttccggatagcggaatcgtcgaacgagcacgcatacggcgaggtgttcgcgctgtgttccgcataggtgactttggtttccgggcaaaggcggttggtcagttccgcgacttcccgaagcgtgtggacgctgccgcagacggtatagaagcgctgcgcgggcttttcggcgttccagaccagcagcatggccttgatcgtgtcatggatgtagatccagtcgccccgctcgtccgggttgtcgacgtgcacctcgccgcctctggcgatggaatccacaagccccgtcgtatattgcgtggtcaggccgttggtacggttgggcccccagacccatgtgggacggatgccccggctgtcgatgccgtggttgtcggcataccagcgcagcagatgctccccggccagcttggtctgcccatagatggtggcgggatccttgggcgcgtcttccggcacgggttcgacagaggtcgggctgtacagggagatggagctcatgaagaaaaaacgcttcaccccgcaggccaccgccgcatcaagcagcacctgcgtggaacggaaattgacctgaaacgccagcggcggattctgttcgcacacgcccgccataagcgcgccgagatggaagatcccctcgatgccgttggtcgccaccgcccggtacagatcgagatccgaagagctgtcgccctgcacgtaggtgatcgaatccataatgtcctgcaacagatgaggaaccggaacacggtcgaaaacgacgacttcgtcgccctgccgcagcagagcacggacaagatgggaaccgatgaagcccgctccgcccgttacgagaatacgcatgaaacctccccggggatgccccacggctaaaagaagcgagagtgctaacacctgaatggtttttgctttataccctatgcaaatgacatgtgctttttgggaagaaccattcggaagccactactcccaatacgtccgggcacagccgcctgaaacacgccatttacccgaaaaacagggataaaccccgtttcgcggcgtacccaccctgcgccgccctcaggctctacgccttccagtttttcgccacggccttccatgacacggcgtggtcctttgcgccgtagccctgcaccgaaaccatccggtgcacatagtccaccgccgcgcccagaatgagcggcgcgccgtattccctggccatatcgaggcacaacctgttgtccttgatgagcatatccacggtaaacgtgggctcgtcgtaacggccctcggcgatgcgggtaccgatttccttataggcgctgctgagcacgcgggcgttggcggcgaccgccacgtcgatgagcgttttctgggacagacccatgtgttcggcgagcgccatggtctcggcggcgcaggcgtcgatcgcgccgagcatcatgttgttgagcagtttcagcttattgccgtgcccgagcggcccgatgtggaacagtttttcttccgatccgctgagcacgaggagcacatccttgatcttggcgagggcctcatccgagccgccgagcgcaaaagcccagctccccaccccggacgggctgcccatgaccggggcgtccacaaaatcaatgcctttgggggcaagcgcctcgcccatacggatgttcacgcccggatcgaccgtgctcatgttgacgaccacggtgccctcgggcgccccggacgcgatcccgccctcgccgagcacaaccttttccgtgtctgcggggccggggacgaacatcaggatgacccgggccttgcccgccagttccgccggagagccgcacacggccacaccagcctcggaagcgcgtttgacggcaggcggatacggatcgtacccggccacgggaaccccgctttccatcaattttttcgcgcaattgcttcccataacccccagtcctacaatgcctacggtatccatatccaatccttgcttgagtccgaaaaaaggtatgacttcagcccccctggccgagcgggcagggaaacggtgaaaccagtgaaacgggatggttccggcggaacgccgggggcggctactttctggcgatggccttgcgggccgccttggcgatgtccgcggcggtgatgccgaacacgcccatcagatagggggccttgcccacctgaccgaaatgatccttgacgccgacacgttccagcggcgtgggccgctgctccgccagcacttccgcaacggcgctgccgagcccgccgatgacgttgtggttttccgccgtaaccagcgcgccggtttcggaggcggccttgatgacggcgtcggcgtcgatgggcttgatggtgtggatgttgagcacgcgggcggatacgccttcctgagccagcgtttcggcggcctgcaaagcgttggcgacgcagacgccggaagcgatcagggtcacgtcggaaccgtcgcgcaggagatcggccttgccgagatcaaactcgtagtcatcgtcaaagacgttttcggcctgacggcggaacagccggatgtacaccgggccctcatgctcgacgatggcgggcagggccttgcggagctgcaccgagtccgtgggctcgaacacggtcatgcccggcagggtacgcatgatgcccatatcttcaagcgccatgtgcgtaccgccgttgagttccgcgccgacgcccggatcggagccgacgattttgacgttcagcccggcgtagcataccgagatggcgatctggtcgaagcagcggcgggaagcgaacgtggcgaaagaatgcacgaaggggatcttgccgcaggcggacagtccggcggccacgccgaccatattggcctcggcgatgcccacgttgaaggagcggtcgggataggccgccttgaacggcttcatgccgtgcgcgccggtcagatccgcctcgacgtccacgatgcggggatcctccttggcaagcgcgatcatcgtatcgcaatagaccttacgcatttcctgagattcaagcatgacggcattcctcgttccttattggagttcctgcaaagcggcggcgacgtcttcgggcgacaggggcatgttgtgcgaactgagcttgccttccgcgaccgaaagccctttgcccttgaccgtagccatgatgatggcggtggggcgcttcttgatggtgcgggcatgggtcagcgcggcttcgagatccgagaagttgtgcccgtcgatgcacagggtcgcccagccgaacgcttcccaacgcttgtcgagcggacgcacggcgttgatcgcgtcggtgtagtcgtcgatctgcatcccgttgtcgtccaccagcacgacgagattgtcgagctcctggctcccggcatacatggccgcttcccagatctgcccttcctgctgctcgccgtcgccgacgatgcagtagacgcggtagtccttgcgttccatgcgcgccgccagcgccatgcccaccgccgccgaaagcccctgcccaagcgagcccgcggtcatgtcgatgcccgtggtcagcttcatgtcgcaatggctcggcagcctggtgccgggctggttcagggtgaggaggatttccttatcaaagtagcccttcatagccagcagggtatacagcgcgggtccggcatggcccttggagagcacgatgcggtcacggtcgggccagcccggctcttcggggcgcacgcgcatttcctcgtaataaaggtagaccagcgcttcgatgagggacagggaaccgcccacatgcccgacaccgatctggccgatcattttggtgagcaactgcctcgcttccttgctcagctcggtgagctgccgcaatttccgctcgttcatggttcagcctcgacttccttacagatgttgttccggttcgggggacgtgcccatcacatccccctgccccgtcgtttccagaaccgactgccacaggtcggagcgcacgctcatggtgcggcgcttgcgcgttaccagctccagcggcagatggacgaacttgtccatgatgttggctacgaccatgcccgtcttcccgctcatggccgcgtgcacggcatgttggcccaaaaagccgcagtacagcctgtcgttggcgttggcggggacggaacggatcatgtagctcggatcgatgtatttgagatagtaaggtatctttttggctgaaaagtattcggcgatcttcgcgcgcaggaacccggtgatgtcgccgagcgccttgttgcccgaggcgtcgcagcgggtttcgtgctcggaaagcagatcctgccccgccccctccgccacggcgagcacggcgtgggagtgcgcggcaaggcatttttccagagccgggaacaggccccgctcgccgtagaggctgaaagggacctcggggacgagcacgaaattgacttcgcgcatggagagggaggcgttggcggcgatgaagcccgattcgcgccccatcagcttgacgatgccgatgccgttgaagacgctggcggcctcgatatgggcgcagcggatggcgtcggcggccttgtccaccgccgtttcgaagccgaaggaatgggggatgaaattgatgtcgttgtcaatggttttcggaatcccgacaatggagatgtgcttgccgcgccgggcgacttcctgctggatagacgccgcagccttcatcgtcccgtcgccgccgatgatgaacagcgcactgatattcaggcgctcaagggcggtggcgatttcggatgaagactgcggccctctggacgtcccgaggatcgtccccccgaactcgtggatgccttccacatcgcgcggggccagctcgcgcacgtcgtagcggtaggacggaataaacccctgcaggccgtagcggatgccaaggaccgaagggacgcgataggcgttgtacgccgtcattacgatggccctgatgacgtcgttgatgcccgggcacagcccgccgcaggtcacgatggcgcatttcgtcttgctcggatcgaagtagatccggtcgcggggccccgccagctcaaaggacatggggcgcggcgcggcgccttcgtccaccagctcctcgtccacggtgaagaccacgcgcctctcgccccccgtcgccagattgcgcgatagcggagaatcgatttccggcgttccgagactctgaatgcgtatctcttgggccgcggagggcgtagcttcacaagtattcatgcggattccttccttttatttttctttgaccctgccgcaggtcctgcgcacgataagctccgtgtcgagcaggtactgcaccttcagcggggtttgcgattcaatggccgagatcatgatgttcgccgccatctggcccatttcgtagcagggcgtcttgatgctcgtcagcggcgggttgaagtaggcggcgatgtcgatgtcgtcgaagccgcagaccgaaatgtcctccgggacgctgagccccgcctcggtgatggcgcgtatggccccgatggccagatagtcgttcacgcacagcaccgccgtcggggggtcctgcaatttcaaaaacgcccgcatggattccttgccgagcaggtaggagggcggctgcgagcggatgagctccggatcgaaggggatgccgttgtcggcaagcaccttcttgtagccttccatgcggtcgatggtacggcgcgcgcaggtcatggggccgaccagaaaaccgatgcgcttatgaccgagatcaatgaggtatttgacgctcgtatagatggaccgcgcgttgtcgatgccgatatagttcacgctttcgtccggcacttcccacaggatgatgcaggggatgcccgccgcctccagcgttttcatgtactccacattgctcatgtccagcccgacgaggatgagcccgccgatgcgctgctcgtggaaacgccgcatggcgaggcgctcctcctccggagagaactgcgacagggccaccttgcacgaatagttccgctccgagcacgttttctggatcgccatcaggttcacgccgaacgccgcatacgtcggggaaggcaggaggatgccgatggtgtccgagcgccttttggagagggaacccgccgtcgcattgtagacgtaattgagcgcttccgcggcggccctgaccttgctgaccgtttccgcgggcgttttgtccggctcgcggagggcgcgggatacggtcgaaagcgagacgttcgctttgacggcaacgtcttttatggtcgcccgagtgttattgaaaccgttttcattcattttattatttcttttcaatgtattatccatttattttgtacttcaatgagtacgttttcaatctagccgcccataaaaccgctgtcaagcctctttgcaacgtttttttgctttcacccccttcagctccggcaaaggccgggttttgtacctcactccactccatttactgggaaagagcgtgccgaaaaagaaaaaatatattgtatttacatatgttatatggacacatgcatttctggcatctcccacagcggcagaccccgtgagggcggaaacctcttcacagtgctgtggggagtgcttgaaagggcaaaaaatatcttttttaatagactgtattctataaaaaatatgtcttttacggttttgaggacacaaaaaaagacatcccatctcttgacaagatatttttttgacgcatagaatgaaaacgtattcattctaatataaactataacatacaatatattgaatattcatatttttttataaaagaacggattcaaaaatcgctcacaggcatcatagttataaggaaatccaccctttaggcctcatgtctgcgaccccggcgccacacggcaccccggaaggccgcaggcctaaccagataaccccaaggagaagggcgttatgcaactgtccaacacatggaaggcgacggtaggattgatgatcggggcgatcctgtgcctgcccgcgcaagcggcggccgaaaagaaaatcatcatgcgctacagccacagttcggcggccatggtggaggagccccaccacacggcggctctggacttcaagaaatacgttgaagagaaaaccaagggcagagtggaagtacagatctaccccgccagccagctcggcggcgaggaacgcgcctttcaggacgtgcagcagggcgtcatccagatagcctccctggcttccaacaacgccgccgtgttcgccccctccctctacgtcatcgatcttccctacctgttcaggaccaatcaagaaggctgggccatcctcgacaagtactgggacgaactcaacgctaaaaccatcaaggaaagcggcaaccgcatcatcggctggctcgacctcggctaccgccacgtctgcaacagcaaacggcccatccgtaccatcgaagacctcaagggcctgaaaatccgcgtgcccaacaacccggtcatgatcaacacgttccgggcctggggctgtgaaccgacccccctcgcgtgggacgaaaccttcaacgcccttcagcagaaggtcgtcgacggccaagaaaactcgtacgtggtttttgcgtccaacaagtttgaagaagtgcagaagtacatgaccgaactgcgctacaagctccaaatcatcgtcatggtcgtcaacgagacatggctcaagaagcagcccgccgacatccagcaggccatcctcgaaggcggacgcctcgccaccaagcacaaccgcgaaatgatcatggctatggaagcccgcctgaagcccgccatgaagaaggccggcgtcgaaatcctcgacaagcccgaagacgaaaacgtttgggaagaaaaggcgatggctctctggcctgatctctaccccaaaatcggcaatctcgatctcctcgacaagatgatggcggacatgcatcgcaagcgcccgtaaacgcaagagcatgaaaacgttttttactattgattaaggtccattatctttatttctacgttcttttgaagcgacatgcaagtgaaaaagtacgctctttcatgaatgtgcagtgcgcattcttagaaaaaagcgtgactatggcaatggattttagactgttcacccataatgaggaggtcttcatgaacatccggcaaagcttcaaccgggcccttttaggggcggtttgcggagcgctgcttctggtttcccctgccagtgcggccgagaaaaaaatcgtcatgcgctacagccacagctccagcgcgatggtcaaggaaccgcatcacgcggcggccctcgacttcaagaactatgtggaaaaggccaccaacgggaaggtggacgtccagatttaccccggcagccagcttggcggcgaggagcggagttttcaggacatccagcagggggtcattcagatcgcgtctctcgcggtcaacaacgtgacggtgttcagcccctcaatgggcgtgttcgacctgccgtacatgttcaccaactatgaagattgctacaagctcatcgaccagaactgggacgagatcaacaagcgcatgatcgccgagagcggcaacatggccgtgggctggctcgtgcagggcttccgcgtgctcagcaacagcaagcgtcctatcaataccattgaagacctcaagggcctcaagatccgcgtgcccaacaacccgatcatgatcgccaccttccgcgcgtggggcggcgaacccgcgcccatggcgtgggacgagacgttcaacgccctccagcagaaggtcgtcgacggacaggaaaacccctaccccgtgttcgcttccaacaagttcgaggaagtgcagaagtacatcaccgaaatccattataaggtgtggatcggccccatcgtcgtgaacgccgcgtggttcaagaagcagcccgcggacgtgcagaaggccatcctcgaaggcggacgtctcgccaccgaaaacaaccgcaagatgattgccgaaatggaaaccgacctcgtcaaggtgctcaaggacaagggtgtagagatcctcgccaagcccgaagacgaacccgtctggcaggaaaaggccatgggcgtatggccgcagttctacgacaagatcggcgatatttccttgcttgacaccatgatgaagtccctcggacgtacgcgtccgcaataacgcctgccgagcccggaggtggcttcctcctccgggccgctaaacctcaacgggtgaggagagagtcatgcgcgagcagctggcgtccatttggaagaaccttgaagagtacatttgctgtgcgcttctcggcgtcatcatgacgcttttgatgatgcaggtgtgctacagatacttcggcggcaagtccatcgcatggtctgaagaggtcagccgtttcctgttcctgtaccttgtctatttcgcggcaagcctcgccgcctcaaagaatctgcatatccgcgtgaccgcgcagctcaagctcctgccgaagctcggccagatgcttctgctccttacgacggacatcatctggctggtcttctgcattatcgtggtgaacgtcgggacggacttcatcatcagcatgagcgaccgcccgatggtttccggggcgctgatgcttgatatgcgctatgtctacgcggcggtgcccatcgcctttaccttgcaggccgtccgcctcgtcgagcgctggtggcgcatcttcaccaagcgcgatcccttagtcgttcccagcgaggaggtattctgatgtcgcttgaagtcctcatctggattgcgctggctgtcctgctcgtcatgggcacgcccatcttcgtctccctcggcatggcgtccatcaccgtgctgcttctgagcgacatcccgctttcgctcgtcatgattgaccttatcaaggtctcggacatgttccccctgctggcggtggtgggcttcgtcttcgccggggcgctcatggaacgcggcggcatggcggcccagatcgttgaggtcgcctccatgctcgtcgggcacatacgcggcgggctcggcatcgtgaccatcctcggctgcatgttcttcgcctccatgatcggctccggccccggcaccgtggccgccatgggcagcatcatgatcccctccatgatcaagcgcggctactcgcccgaatacgccgccggcgtttcggctaccggcggcacgctcggcatcctcatcccgccgagcaaccccatgctggtctacggcatcatcgccaacgtctcgatttccgcgctgttcaccgccggtttcgtacccggcgcgctggtcggcacctgcctcatgttcacggcctataccatcgcccgccgccacggctacaagggcacgatgcattcctacacgatggccgaattcgggcgggcgctcctgaagaacatctggtccctcatggctcccgtggtcatcctcggcggcatctacgcgggcatatgcacgcccgtggaagcctcggtcgtcgcggtgtggtacgcccttttcgtcggcttcttcatcaccaagaagctttccctgaaggaagtgttcaacgccatgaagctggcgaacatctccaccgggaccatcctcatcgtcgtgggcgtgtccaccattttcgggcggttcctgaccatgtaccagatcccgcagcagctcgccgcccagatgatgctgtacaccaccaatcccatcctgatcctgctgctcattgcggcactgctgttcttcctcggcatgttcatggagacgctagccaccatcgtcgtgctcgcgccggtcttcctgcccatcatcaagtccgtgggcatcgaccccgtgttcttcggcgtcttttgggtgataaccaacgagatcgccctgctgaccccgccgctcggcgtcaacctgttcatcgccatgaacctgtccaacctcccgctggagcgggtcgccaagggagcctgtccgtatattttcctgcttattctcg

SEQ ID NO: 7475 - DNA, 7921 bp, Unknown
  gut microbiota DNA sequence
ggccggagagcgaagcgaccggcctttgccggatcaagagcgccctgagggggtccggggggaatcattccccccgggcgggtcaagggcggcagcccttgccgccggaggcatctacccgcgcaacgcggcagcgtcccaaacaacggcgatgatggtccccctgccaagctccgatccgatggtcaaaacgccggaactgagctgtgcacgctcgcggaggctcttgaggccaaggccggacttcacgctcacgtcggcgagcttttccgcgaccgaaaagccctttccgtcatcgctgatgacgagccggagggcgtcgccgtccatgccgagggaaacggaggcgcgggtcgccccgctgtgcttgacgatgttgctgagggcttcctgaatgatgcggaagatcacgatgggcagattcggcggcagtttctcctcgtcgagcgcaatggaaagctcaatcggcatatgcgcgaaaacgcgctcatactcttcgcagaaatccgcgatggtggcctcaagcccaagctcaagctgaggcggacgaagctcgttctggatgcggcggagatgggtcgccagtttcttgaccaatgaaaccgaggtcgaaagcgtgtcgcagatgtccggctggagttcgtgctcgggcagggaacggatggaacgaagggaacgctccatgccgaacttgatcgcgccgagcgtggccccgatgttgtcgtgcagctcggaggcgagcttgaaccgttcgctctcctgcgccatgagcaacttttcggaaagcgccttgagttcgcacgtgcgttcggcaacctgtttttccaggttttcgtgggagtggagcagttcctgttcgtgcttctcgatctccgatgtgaagtaccgtaccgatgaggtcatttccgccagctcgtagcgcacggattcggggaatggcgtcgggatacggttcacccggtcaagcatgcaattgttcagccgcttgatggggtccaccacgttgcggacgatggagcggtagataaacagcgcgaggaacacggcaaggaagaaggtcacccccacagtggccacgatgacagcgtagcgctccgcgagcgtctttttggatgcctgaatgctcgtccatgactgctgggaaacggcgttggccgactcgatgaggctgtttgaggtatattgatgggtgatcttgagggcatccagtgtgctttccagcgccgtgtattcctcatacagagcaagaaggccgtcttccgcgagggccattgtggccgcatcgctggagagttttttcaggcgcccggaaaaggggctggcctccgccgagcgcagcagccgtttgacgtcggtgcggatttcgcttttgaggcgcagggaatagggccggtcatggtgcatggacagcaggagcatggcggtgagcacgtcggaataggcggtcttccagacgttgaagcccggatcgcccggcttcatgcccgaggcgtacagctcccgctcaagctgcggcaagtccgcgttgagggtacggatacgctttacgagccgttccgtgttgcgcaggttgtcgatgcgttgggcgacggcctggttcgtgcccgcaaggattccgttcaattcatgcaagttgttctttatcttttccttgaccccaggatcgacggcaagcgcttcgaggctttccagcacgttttcgggaaaacgccgggcctcgatttcctgcacgactccgaggtggacgaaacggtcgcggcacaagatgctgtcgtggaggatgcccttcgcccactcgctctccttgctgatgtaggaagcgatggccatgttgggcaaagcgacgttgacggtttcgtccgcctcttcggacagcatcttgaggagctggagcagcgaaatgaggaacgcgcacagcacgaggcagaacagcccgagcagcagggcgatgcgggaggcgatgctcttgtccatgatgctcatgggcgtttccaacaggcttcgtccagcggtgaaaggacgccgaaaggctgatccgcgacgtgcaggacgttgcggttgcggatcgtggcgtaggggatggtgcagagccagagggcgacgtgctcgcgggaaaggcgctcctgaagcgcggcgtacagcgccttgcgcccttccgggtccttttcggctgaggcggagcggaagagggcatccacttcggggttgctgtaatggctcatgttggaccacaggatcgccgccgtgttggtcgcgtagatgcgctcaatgccgatggcggggtcgtgccagccgtacagctcgtccatcgtcacgtcgaacgcgccgcttgtgacgcggtccgcccatgaacccgggtcttccgccgtgcgtatccggaaatagacgccgatggtccggatgaactggctttgcaagtatttgaggatggacagcgaaaactgggcggaaggctcataatcgatttccacggtaaagcggatgccgttttcgttacgcggataccccgcgcggtcgaggatacggttggcctcatcgggatcgtagggcgtggatacgggcgaatgccactccgagccgggcgggatggggccgtacatgggccggaccccgccgggcacggcttgagccagcgccttattgtcgatgctcatggcgagggccttgcggacttcgggcgagcggaaaatcgggttgcgcacgttgaaggtcagcagggcgaagggatggagcagggagaactcgtcccgggtgacttcaatggccggattggagcggaagatgcgctcttcatccgacagggaagagaaggcgtagagatcggcctcgccctgcatgatcgcaagcgggatttcgttttggtcccaatagacgcggaaggtgatccggtcgaggcgcggcttgccggggaggaaaaagcctttgtaacgttcgaggacgatggttttccctttttccagcgaggcaaggcggaacgggccggagcctacggcccgcaggttggcggggtgggtgtcgatgggcgtgccgtccccatagatgtgggcgggcaggacagggaccagcgcggggatgaagcacttgagcagggcgggctgcgggatggacgtctccagatcgagcgtcaggtcgtctaccggggcgaccttgtccacggcttcgagcatggagcggaaaggatggtgccgttgcgccgcccggatggaaaaggccacgtcattggccgtgatcggggtgccgtcatgaaaggtcgcgcctttgcggagatgaaaccggaaccgtttggcttgggaatcgatttcccatgactccgcgagatagggtatggggccgtcctttccggtacggaccagcccggcgaacagctgcgccccgatttggctggtcaggctgccgctggctacggcggggttgaaaccgggcggaaaacgttccagcgccacaatgaggctgttgtcttccggagaggcggaggccggagccgcgtacagggcgagaagcagcagggccgcggacaagaaggccgtcaggtatgcatgccccgtgcggacggggcgtcccgttccgggcgggaacggagaggccgccgaaaggtgcggggcggggcggcggagtcgcttagtcaatgccgtcccctacaagcccgttctgcatggcgaagcgcgtaacttcgcgtacattatgcagatcaagctttttcataaagctggtgcggtgggtgtcgatggtcttgaccgacaggttcagcttggcggcgatgtctttgttgctgttgccctcggcaatgagtttcagcaccattttttcctttggcgtcagggagtcggctttcgaggcggcttcggcgttgccgtccacgtatgaaataatcatggacccggtgagctcagtgctgatgtacttccttcccttgagcagggcccggatggcgacgaggaactcgtcctcgtccgccgttttgagcaggtagccgtcggctccggctttcagggccgcgcgtacatgcccggctgtggcgtgcatggaaacgataaggatgcgcgctcccggcgcaacctccctgatacggggtatggcctccacgccgctgagttcgggcatggaaatatccagcaggatgagatcgggccggagcgactgcgcgagccggatgcctgcgagcccgtcccccgcctcgcccgcgaccgtcaggccgggctcgatgccgatgagctgtttcaggccgctgcggaacagggcgtgatcttcgactatcaatacagatggcacgtcgtttctccgtgtgcggacgctttacgtccgggatgcgccggtgccgaaatgccacggcttttttgagtataatgcagtgccgcaaaaaggaaaaggaggcgcagcctctataggctgagggatacgggcattcctgcggcaggcttccctccgcgtggtatcggcaaggccgcccccatttttttcgctgatcatgatgaagtttatccggtggacagatctggcgatccgttgtccagggagacggccgccccacgcctttcgcctcgggaccggtatatccgagcggctctcgcttgccgggaggggggcattgtgacatcctaatactcatgaagatgaggaagcataccgcctggttccctttcttttccggcaacgaaccgaatccgtacgcatccctctgccatcttcgatcccgctccggctgaggagcgcgtacgggaggaagcatgacatctcagttacgaaaaataaacaacgtcattgaacaatttttgctgccgttggcggaagccgtttccggctggtccacgctggcggcgatccgatccgcgctcatcgtcaccctgccgctcatgttcctcggctctcttgccgagctgctgatcagtttcccgttggatgcctacaaggaattcatgttccggcagttcggccccgagtggcggatgtttgggcaaatcctgaaagacgccaccttttccgtgatgtccctcatcatggttttctccatcggccaccatctggcggaccagttcaaccatgacaatccggtcctgcgtgccaatccggtcatcgcgggtcttgtggcctttacggcgttcttctgcctgctccagcaggacggggacgcgctcaaccggcgttggctcggcgtcgccgggctgtttgtggcgatcctcgtcggcgtgttcgccacccggctgttcctgtatttcttttccatcaaacggctgcacctgcatttgccgggggggactcccgatatcgccatcccgcaggccttcaacgccttcatccccggcatgttgaccgtgctcgtgttcgcggcccttggcgcggccatgcagacatttgtgggcatgtctctgcatgaggcgctgtatcagatcatccggatgccttttgacgccatcggggaagggctcgggcggggcatgttgtatatcctttcgctccatgtcctttggttcgcgggcatccacggggccaacgtccttgatccgatcacccacgacatctacggcgcggcgatgctcgccaacgaagtggcggcggcggccggggagcccctgccgcacattatgaccaagacgttcatggataccttcgtattcatgggcggggccgggacaggcatcagccttgccggagcgctgatcctgttcggcaagacgcaggccagccgtaaaatcgggattttttcgcttgtgccgggcctgttcaatatcaacgaagtactgctgttcggcctgcctatcgtgctcaatccgcttatgctgatcccttttctgctcacgccggtcctgctggcggcgatcagctacgtcgcggtcgctacggggctggtcccggggaccaacgtggcgacggagtggaccacccccatcctgctcaacggctacctgtccacgggttctctgagcggttcggcgttgcagctggcgaatctcgtggtgggcgtgctcatctatgcgccgtttgtccttatagccaataaaatcaaggtaaaacaaatcaacgatgcctttaggagcctgctccgccgctcctgcgccacagcggactcttcccggcgctgccttgaccacaacgacgatgcggggtcccttgcccggagcttgattacggatcttgagtacgactaccggcatggcgaagggctgttcctcgaatttcagccgcagatctgttcccgaaccggcagggttgtgggcgtggaatcgcttatccgctggaagcacccgtcctatgggctgatcccggctcccattaccgtggcgctggccgaggattccgggctcatccggcccatcgggctgtgggtcttcgagacggcctgtcaggtgcgcaagagctggctcgacgcaggaatcacggatctcacgatggcggtcaacgtttcggccctccagctggagcgttccttcccgaagcagcttcttgacatcgcggcccgttacgatttgccgccctctttgatggaagtggaagttacggagtcgagcgcgctggattccgataagccggaaagccatatcctctcccgtgtctacgacacggggttccccgtggccatcgacgatttcggcatggggcacagttccctcaagtatttgaagcaattccccgtcagcgtggtcaagatcgacggcgcgatcagccgggaagtggtcacgaactcgatctgttcggatatcgtggcttcgatcacccgcctctgccgggcgcggaacatgctcagtgtggcggagttcgtcgagaatgaggaacaggccgcactcctccgcgaactcggctgcgacgtgttccaaggttacctgtacagcaagtcgctcctgccttccgattgcctccagttcatccaaaagaggaacggcggcaacggtgcgtaaggtcggcctgaagcaacgtgtttctcgaggggacatcctgcgggcggacccaacgtggggggggcaatccggctctcccctcgcaaccccctttgggcggggggcgcaatctctcaagtttttcttgaagtttttgtttcggctgaccgggcgcgccccatcatgcctttccgtccgggtgccccgtccgcctgctttttcggctggccgggaaatcggaacgcttgttgccggagtcatgacgcgtctgcgcctcttctttgtggcggttgcgtacacactgctggctgtcctgaccggtgttcccgctgcggcgaacgaagatctcgcgcctgaaacgcaagggctggactcgcgggaagccttccgcaccgggacgcgctttttcgatgaagcggaggtttcgggcggcctgtatttcttccggcgcgaccgcaggcgttacgacgtagacaaaggccggtacgggacgaacctcaatcacgcctcggtgcaagcgaacgcggattttgtctccggattcgcgggcggctggctcggattcgatttcggcgtgttcggctcgcacgatctcatgaacaagggagcggtggatcacgaaatgggcttcgagccgtggggcgatccgtggcaccccgactggagcaagcgccgcaccgacgacggcgtatccgtgtacaaggccgcgctcaaggccaaggccggtcccgcatgggccaaggcgggatggttccagcccacggggccgggcgtgcttggggtcaactggtccatcatgccgggcacctacaggggcgtgaacgccggggccgactttgggcggctgtcgctggcggcggcgtgggccgacgaatacaaatccccgtggttcgtcaacatgaaccgtttccgcaagaacgacggcgaaacgtccgtaccgtggctgtggagcgccggggtacggtacgccttcgaaagcggactgacgcttgaacttggatacggcgcatccaaagatcacctgcaaaacgcgcatttcaaaagcagctatc

SEQ ID NO: 7476 - DNA, 4540 bp, Unknown
  gut microbiota DNA sequence
ctatttcatgaacgacagcgacgattcaggaaaaagcgagaacgacaatttcgacggcctcgcctcgctgcattatctgttcggaaaatacgaggttccgccgtggactttccggctggagggcacctacgtccgcgctcccatgtccgggcctcagagccaggggcaattcgcgtaccgcctgaccgaccgcagcggaagctccagcggcgcgttcgacgtgtggtgggatgcccgttccgactggaatgccgacaacgaaaaggccgcctattgcggcgcaatgcgaaccctcgacgatctgcttcccatagccggcttttcggcgggcgcgggcgcggctttcggtttcgacggcagaggctacggtacggcggagcacctcaaggaatgggctttcaccttcgatctcaattatgtgaaacccgacggcccgcttgaaggggctttcgtcaagctgcattacaccgaataccgcaacggtacggcccagccgagctggggcacataccggaacgccttccagtccgaacgcgatctcaagctgcttatagggatccctttttcgctgtgagccttgtaatcccgaaaaaagcagcggctctgccggaaccgcccgcttccgggaacgcggcgaacagggattcaataaaagtgaaagccgttgaagggggagaggggaaacgtttttgagcgtttcccctctcccccttcccaaatgttttctccgctcagtccgtgcgtctgttgagcgagacaagcaggaaggcggccactgtgccgatgacggctacaatggtcatgctctggatggcgcggggcaggccgtagccgtcggcgatccagccgaggagcggggcgacgatgccgcccatgctggtggcgagcccgagggtgacgccggaagcgaaaccaatgttcttcgccagatatttctgcccgagcacgaccattgagctgaagggcgcgtacaaggaaaagccgaggggcagcaggagcgcgaaagcggcatagagattgtccaccaggccgaagaggacgatggaggggatcaggaccacgtaggagagccggatgatccgcaggtagccgaaacggtccgagagcatcccgccgatgaagttgctgatgacgccgaacgtgcagaagcaggtcagagccgcggccccggcagctttggactggccgaagttatggatccagtagagcgggatgaaggtgttacagcccacaaacaggacggaccgggaaatgatcgccagcgtcagcttggagaattccttccaattgtttttcacctcttcggtttccccggcagctttcgcgctttcggtttcggtcttcttcatgcccgagaggtgcgagatctggtagagcaggatgaccgacatgacgagggctatgaggccgaaaacggacgtgccgggcataccgaacgcgccgatggccgctaccgcgagcatggggccgaatacgaaaccgctgttgccgcctatggaaaagaggctcaagcctgtgcccttggaagcgccggaaaccttattggcgaaacgcgcgccctcgggatggaacagggccgcgcccacgccgctgagggcaatggccgcgaaaatggcccagtagctgtgcaggaagccgatggaagccagtccgcccccggccagcaggacgcccacgggaatgaaccacggcttggaaagcttgtcggacagatagccgaaagccggttgaataatcgaggagaggcaggagaaggcgaacatcaacccggcggcggcttgatagtcgaaaccgtacgcagtgatcaaaaagggcaggatggcgggcaacgcgccgccgtttatgtcgcacgacagatgcccgagcgacacaaggaaaattttctttttgtccatgacgatgacctttgtccgcaggcggggacggatgaggggaagcgggcgttcccggcggcgcgaagggccgacgcggcagccacggcacagtggatagtgggaaatctcagacgaaaaagcaaggctctttctggtaaaaaacaaaggtgcgccgggggattatggaagggcgaaaggggtgatagcgtctattgtgccggggtgacgccttgttgcgtgttcttctggacgttctggccccacgaaaagagtaggggatagggaaggcgcgggggcgtgagaaggctagtcagggtgcgaagctcaccgctccagcgcgttgtggggcggctatggagggggcgtcctttccctcttcatcagtgaaaaccgcctcccggataaatcctggaggcggttttcgtgccgggccgcgtggaggcccgtttatggaaggaagattacggcctgctcatgtcgagccgttcaaaggtatgggaaccatccgtaccaacgcggatctgcatgtcgaggatgagcggcaacgccggatcggacgtgatgtccacgaggacggagccgtcctgctgttccttggcggaaacggagaaattgccgtgctcgctgaactccacgccggggaagcatgtactgaggacgcggggcatgatcagcggcgcttgcgagaaacactgcatgacccgggcaagctgcccttcggagtgggtcatgccgcgcacccggccgatgatctccgtgaaatgcgggttttccgatgtattttcctcatcggagatgctgaacgggctggttgcgaagccgttcccgttgcgatcctcgaattgcatgactgtattcttgccccggcgacggaagtccgtcacgaggccatacgccgtttcctcatcaatgccgctcagggatcccatacccgtagccacggagatgtctttcagagagatatgcgcatgggggcgggtcaaggcgatgagctttttggggctcaggccgaaactgctgctgttcataagtgcggcgtccattaccggctgaggcatatccggtgccgcggcctggagcaggcccacatacatttgggaaacggacttgatgagatccgcgccgaagtgttcggcgctgatgcccctgggcatggggccgccgaccatggcatcccagatctgccggttggaaagcggcttgccgcggttggcctccagagcggcgagcaggtcggaaaccgaggattccacccagtacggaagcaggaaatcctgcgcgccctgagctgtctgggcaagctgcgtatggatgtcgcgaagctgttcccactgctgcggcgtgagccgttcggcatggcgattcatctggacgtcgaaatcggtgatgacgccgggggcaaaccggccgagacggctgagaggggattccgcgtcgccgggcatctcgcacagatgattgatttcgtcgttaaaatacatgggatcgacctgcggattgtgcccgagccggtattcggcgttctggcgcaggttgttcatgatctgcgtggcgcccatcagcggggcggtatcacgcggggctctcgggtgccccacaatatggaggcaggccccggcgagcttgtgcgccatgtcggactgcatgttggcggagacattggcgagttcgtccggcgtcatgccttcgaggatgaagtcgcacatcatggggagcagatcttcggatccgggcagttgcgcatagcgctcatgaaacgcgcagaaccgttcggatacgtccatgacggcctgcgtgaagcgccccggagtttgatcgagccgcgccagattgacgagcccggtcggcacgggcagttccttcgccgcagtgaaggcctcggctatggctccggcatcgcgcacgccgtagcgctgggcgatctccttcatgacatccttgtccgcatcgctgaaccgttcggcgggcagcgcgccgatgtcgtccaacgtgtccttgaggcccaagagttcggctccgatgacgtctccggcgagctggcgcagttgtgccgcgtcgacggcgttcccttcctcattggccgcgttgagcaggggtgtaagggcctggctgacgccctgatagaacggcctcggattgatggcgtcgggcctcaggcccgcgagcgcgccatcttcgttgatcgaatcgaaaacggcccggaaggcgtctgtgttggcctcgacgacgtgtccctgctcggggatgagctcgtccaggacggcgttgaaggtttcccggttggcaccggacagggcgctgtgctgcgtagtgctgagccgggggatgtcaaggccgtgcgagcgggcgaactcccgcagcataacggggatttgttccgtatctccaaatacctcgaactttgattcgaggaattcgctcaagagctccccatcctgccgttggatttcttcggactgcggatcgacgtcaccgggcgttgcgatccccatgtcgactttctgttcgcgggacatgaggctgatgagcgctctggcgtgtccttcgaggctgcggaactgggtcatgccttccttgaggaattccaagccccgcatcccgccgaggccgcgttggatggccccgttgagcgtggcgaactggttggcgagaggtccgaacttgtc

SEQ ID NO: 7477 - DNA, 10173 bp, Unknown
  gut microbiota DNA sequence
cggagcacggcggcgatgtcgtccgcgccgtaatcgcccttgaagctgtgagccgccgagttaagcgcgtcggcatggtcggcgatgcgttcgaggaaggcggcatccataggcacgctgtcgttgaggagctgctccaccatcacgtcgcccgcgagcatggcgttgatgtaacggggcatggtttccgcagtgaccggcggattcaggtcgcccggcgggtcctgcgccatgagcgcgaactcgcggagcaggggcaggttgtcttccacaaagacttgtacggcgatgtccatcgcctcggccacacgctcttgagacggatagacgccgggtccgggattgtcgttgagcagcgccgtgcaatgtttgatcacggcagggttgttggcgagggcggagctgaagttctggggcaatccggcgagggtcatggcttggcgtatgccctccgccttcccggctgtccgcatcatgaagccgcgcacggcatcctgccgttcggcgggcgtcgcaagcgtgggcatgtttgtggcgaagctcatggccagcccctgcatgttgtcccgcccgagcgtgggaagagcctctttgagcgtggcgatcatgtccttgccgttgggaagctgcggcaacaagccgagcatatcgtctttcagcgatgacaggatatcgatgtccgccgcattggcgtcgcggaaggccgtctggagccgggtaaaggcgccttcggtcccgtgggcttccatatcggcccgcaactggtgggcaaagaagccgttggcgcccgcgaggggctggttgaggcgagtgagggccgtggtcatggccgcgccgcgcgttccaaggccgggaagctgcgtgaggacaccgacattttgtgggatgaccttctcgcaaagatacgtccgtacggcgtcacgttggccctgcggactgccgagatccagattgcggaccagcgcgaactgggcgaaggaggtggcgtgcccggcaggaagcgcgttgccgtcggcgagctggcggcctgcggcaagagcttcgtcatacaggactgaatcgcgcacgagtttgacgtcttccgcagtgaggggcttgcccccttcaagcttcgcgttgagcattccccgtatatcggcgttgatgttgtggaactgcggggattgatcaagggcgttcaagaatgccgtgaccgtggcacggttttcttcggccttggcgctgcgggaaagcttatggattccgtgcagcgaggaagtatcgccgacggattcaccaccgttttgaagaaaaagagacgcggaatcgccaaccgtgttggcactattgaagaactgctgaagggaaacaggcatacggcctcctatagctgaaacaagatgcggtgtccggtacgaagccgagagcggttacctttgaactgcgcgccgttttatggctttcctgcatcaatatcgttttcggctggatgcacgccatattgcggcgcaccggagattccggcgttggggcacttctgaaacgctctagacgcggaggaattgcccggcggtgaaagacggctccggggcttcccctccttcgaggacggcttgctgcgcctgttccgtaagggcttcctgttctttgttcatggcgtcgaggcgggctttccatgtttccgagaacaggacgatgttgttgacggttttgaggaaatccccggtgtcgagcccataggccgggatcgggaagttcagccccaccatgccggtggcgtcgttatagctgagcgcgccgccttgcgtgtccgcgaggaggaagttcgaggccagcagcagacggcagatttcgccgttgcgccagccgccgagagcgccgacttcaacatatacgatgaaggagtgcgtcgcttcgatccattggatcagtaggttccgccctccgagcgaaagggcggcggccccggatgcggacaaggtgatgtccatgcctgtttctttgcccagtgcctcaatgtacggcgtcgcgttcatggtttctcctaaacggtgagagtacggcattctgggatgccaataatgttgatgaacgtatccttatgaaagggaattagcaaaaagcgatccaaaaaaccggaggaagccgctgcagcgcagaaattttgtttgaggggataccggttccgggctgcggagaagtgttcacggatcgccacgtgattatgcctgtttttgggatggacgtgaagggccggggagtggcggcggctttatcggaggagagggcctccgccgcaccgggacaggcttctggcctcttgccgcggctgccggccctgtgaggcccgtcgcgggagcattacggaaacggcccgccaccacggaacgggccgatgcaggttgggctccggatcaggagccgatgacataccttgagcggcggccgagcagttttttgatgcccatgatcaggaggaggcagagggccacttcgcagaaaaacgtgaacagggacacgaagaacaggctttccggcagaaggatgccgaaaaaggagaacaacaggttctggaacgtaaacaggatgaagtcgtgcaggaagtacagggcgaaactgtacgtggcgatgagatcgaggagcgtgatccggatgtgtttgatcttttcgaggaagtggaccacgcacgcgccgatggctattttctgcatgtaataggcggcctcgatgttcggcaggatttcctcataggcattgatgccgaggagtgcggtgaagacgagcgagaaggcgacaaggattttgatatgcttggcgatgaacgcgaggatcaggtcccggttcatggagtagaacatgccgagcaggtatgcgggaaagaagaatgcgtagttgtggaagaaacttgtcaattccgtccgggggatgagcagggggatccagacggtgaacagcgtgagcagggcgaaccgttcctcactgaggcgcaacagaagcgggctcacgaggaatatcgtggcgatgaacgggatgtaccaataggtcaggaccacgtcgccgtacagcagcgcttggaaaaattcccggcatcccgtcgccagcttggtgaaacggggcacctctcccgtataggaataccaaaagaaggcgtatcctgtgaaaaaaacggacaggatcacatacggaacaatgacgttgagcagtttttttctgtagtatgtccgtaagtcgaatttcctttgagccaaaaaatgaaacaaataacctgaaatgaagacaaaatacaacgtgctcgaatgaaacaggacgccacggagcatatccagaaaacggctcatggattcgtggccttcaagaggcggcacgatccacatatgaacgcttataacggaaaagatggcgaacgccctgaaatagtgcatcgccagatcgaagccttgtttttccataaagagctctcctgtataccgtgaagccctttgttgcacagggctttgattggtacaccatatactggagagggtccccgtgtaaacaagggaaacggtcgggtttcacggcggattttcggggaaaaaagcgcatcggccagaggctgaatgcccgccggtacgtgtgttcagagagggggaaaggttcgagccgtggagagccccgttccatcctttttgatgcgtatcggaacgccccggagtcagtttcccaccattcggaaccagttggaaaagaaggaggccgggggaaaggataatctgggcgggtgttccccgctctcagagtttcccttcccccggcccgccgcatcttcaatactgtgcggagcaggaaggatcagccggaaatcccgagcagctcggcggcgttgtcgtacagggagcgctggagggattcaggttcgagcccggcgtttttccagtcttcaatggcctgcgcgaatccccggatgggatagctggtggagaagaggaagcggtatttgaggaacgaattcgcagcattggcgtattcgtggcgcatgggcatgttgcgcaggaagaaatagcagtccggggcaaggtagaggttcggacagagcagggccgcgcccacggcctcctgcaccttgggccagcagccgtgcgggatgaccacgttcaccttggggaacttgcggagcatgggcacaagcggcgtgggatcgcaatagctgagatccgggccgccgtaggcgctcatggtaatgctgacgaacacgccgagctgctggcagaggtcaaggatgggctcgatcttgggatcggtggcgtacatggcgggactgcaccagccgggatcaagggccacgcccttaaagccccagtcgcggacgcaatgctcgatctcctcaagggcgtccggcgcgttgggggagatgcctgcgagggctacgaacaggcccggatagcggagcagcagctcgttgacctcggcgttgctcacgtcgccgtaacgggcgttgccggtgtgccgcccgtgcagtacgcctttggtgatcccggcggccttcatttcgtcgaccagcatgtccacggaggcgtgctccatcgaagggacggggaggcgttcaaacccggtggggcgcatcttgcggggatcgtcgggcacggactgccagttcctgacgatgccgaggttcatgaagcctttgtacggagggcggatacggaaatcgatgaccatgatgtcgtccttttgcggtggtaggcccggcggaaagccgctggacacgggagcgttgccggatgctttcgggagcgtttcccgatcaagcgggttcggatgcgcgccgggttttcgttgattcgggaagggattcccgacccgtgggaacaacgggccgggaaaggggatcgggcgagggggctacttgatgatgccggcctcacggtaatacttctccgcgccgggatgcagggggagggcgaggttatccgccatgtgttcagggaccagcgtcttccacgtgggctggacggcgtgcagttcctcaaaaccttccacgatggccttggtgatcttgtagacatcggcgtccggcatatttttgcggacgagcatgaccgtggagtcggtaatgcaggggatgtccctgcccaccgcgccgccgtagaagtcggcggggatgacgccgatggactgcccggtcttggcggtgacgctcttgagcaccttgtcggatacggggagccacttcaccttggcgttgagcacgagttcctgaatgtgggactgctggccggggccgagggtcaggtaggcgttcagggtgccgtcctggaacatacccacgcggtcgttggcggaaacggcggtgtgtgcgccgccccatttcgtgatgtcgtcgtaggtgtacccgtattcggccagcagcatggcgccgaccacgttgtgcagggtgcccttggccccgcgatcgaggcggacgggcagtttcttttccatgagttcgtcgaacgtgttcaccggaagatcggcggagacgatgatggacaggcgcgaagtgtcgttcatgttggcgagcgaggccacatttttgaggggcttcttgtacggggccttgccgtcgcgggccgccacggtgttgaaggtctgggtcagggtgacgtcggcggcgttctgttcaaggcggagggggttgctgaccgaagcgccctgcagcacgttgatggcgctgccgggatagcggtcgttgaccagcttgccgaccccggtgaggccgacattccatgtgccgccgagcaccgcgccgcccacggcccggaagttgatgggtttggcgtcttcagccgcggctggggcggcgaaggcgagcgtgaggccgatggcgcaagcgccggaaagcgttatggccttgtgcaggagggacatgatggactcctctgggtatgtgggccgtggcccggtggaaggtttgcgggtaagagcccggaagctggggcggatcaggcggcgcagagccgcttcttgcgtgcgatctggatgaaaaagacgaggctggccgtgccgaagccgatgaggtcggtgaggaggccggggtacacgagcacgatcccggccacgaacatcatgacccgctcggcgggcgaggattcggtgaacagccatccctgcatactggaggcgaggcagacgacgccgagcacggcggtgaacacggcctgcaggatggtggcccagtcgcccatgagcaggagcgcgggctcgaagatgaagatgaaggggacgatgaaggcggcgatgccgagcttgaaggcggtgaagcccgtcttcatgggcggcgcgtcggcaatggcggccccggcgtaagccacgaggcatacgggcggggtgatgccggacgagatggcgaagtacatgacgaacagatgggcggcgagcaccgggaccccggcctgcaccagcgcgggcgcgccgaaggtggcgacgaggatgtaagcgggcagggagggcaggcccatgccgaagatcacgcacgtcccggcgagcaccagcaggaagatcccgatatgcacctgcgcgagcgagcccatgaggttgacgaaactgaagccgaacccggtcatggtcacgacgccgatgacgatgcccacgcaggcgcagcacgccgcgatcatgagcaggttcgccgccgcgttttccatggcggcgaggaaacgggccggggtgaggcgtgtttcagggctcaggaaagacagggcaaccacggcggcgcaggcgagcagggccgagaagatgatgctccttccggcgatcatgaggacgatgagcagggccaggggcgcgaggtagtagagcttgcgcttgatggagcgcagttcggggatgagatcgggcggcgtgccgccgagcccgtgccggagcgcctcaaagtggatcatggtgaacagggataggtaatagagcacggcgggcaggagcgcggccttgcagatgctcaggtagctgatgccggtgtattcggccatgacgaaggcgatgctgcccatgaccgggggcatgatcaggccgccggaggaggcgaccgcctcaaccgcgcccgagaattcgggccggtagcccacgcgcttcatgagcgggatggtgaaggtgccggtggcgtagacgttggccgccgcgctgccggaaacgctgccgaagagggcgctgccgaagatggccgccttggccgggccgcccttggcgttgcgggtgacgaggcaggcgagttcgaggaacacgctggccatattggtcttttcgagcagtgcgccgaacaggatgaacacgtagatgatcgtggccgaagcgccgatggaggacccccagatgccgtcgttgagcaggtacagcgattcgatgatctggttgggggcgaggtagaggtgccccatgttgccgggcaggaggtgcccgaagaaggcgtacagcagcgcgatgccggacacgatcacaagggcgaggcccgccacgcgccgggtggcctcaaggatggcgatgatgagcccggcaccccagaacagatcccatgccgtcagctcgtcgatgtgcggcatcctgtcctgaatgtaggagaagtttgtgatgatgtacgtcgcagccccggcgctcatggcgatcatgaggatgtcgaacaggaacgaccatgccggttcgggccgggggttcttgcgcaaggcccggttggacgagcgccacaggaacagcatggagagcacaagccccacatgcgttgcccggacgatcagcggatcgagcagccacatgcccgtgcaggtcgtgagctggaacgcgcagagggctatggcgagggcgaggatgagcgggcgcagtttcctgcggtcgaaaacgggaaccatgatgacctcctccggtccgcggagcggctacaggttataggctgcggtgtaggcctcgtgcatggcgtcgagcaccttgcccacgcggcggcagtcgccgatggcggtgaaaggcacgcccgccagcgaaagctccgcgcacagggcgttcgacgggcggtagccgagggcgaggacgagggtgtcgaaaggcgggagttcccgctgggagccgtaggcgtccttcacggcgacgcgcccatccggcccggcggaaaccagctccgtggatgtgagcgccttgaccttatgctccctgaggctttcgaggaggaagctccgggcacgggcctgcatgtccgccgcaagatcgggccgcagttcaaggatggtgacgtccccgcccttgagcgcgaggtattcggcggtttcgctgcccaccatgcccccgcccacgacgagcacacgctgtccggccttggccttgccggtgaggatgtcttcggcggtaacggcgttggcgatgccttcgcagaaacgggggatgacgggtacgcttcccgtggcgacgatgagcgtgtcgggcttgagttcggcgagatccgccacggagggcgcggtcccgaggaagaccttgaccccggaagcgatcagccgttcgctaaagcggttcacgagcacggcatacagatccttatgcggcggcagggcggcgatattggccagcccgccgaggcgggtccgtttttcaaaaagggttacccgatgcccccgttcggcggcgacaagcgcggcctgcatcccggcgggcccgccgcccacgatgaccacatgcttggaaacggcggcgggggtgcggggatacatgccttcgcagccggtgcggggattcacggcgcaggcgacggccttgcgctcgcgcagccgggccacgcaaccctcattgcagcccacgcatgggatgacagcatcgtcacggttcgcggcgagcttattgggcaggtccgggtcggcgatgagcgcccgccccatgaccacaaggtcggccttgccggaattgaggacggcatcggcggattcccggtcgataatgcgcccggccacgcccacaagggcgcgatctccgagggcttccttgatcgcggcggagcggtcggcgttccagcccttgggcaggcagggcggcgggccggtgaaacggttggtctcgccaagccccacgctgacgttgaacagatcgatgccgttgtccgccactgtgcgggcgatgtcgcgggccagctccaacgtgatgccgccgggcaggtactcctcgacgctgcaccggaagaacaggggaaaatccggtccaagacgcttcctgatgccccggatgacttccactggcacgcgcatccgtttttcgaagttgcctccataggcgtcctcgcggcggttgaagagcggggacatgaactgcgagaggaggtagccgtgcgcaccgtggatttcgatgacgtcgaacccggcctcggcggcgcgttcggctgcggaacagaagctgccgatgacgcgttcgatgtcgtcctcgtccatgacgtggatgtcgtcgtaggtggtgagtccggggatgtaggaaacgagctggcgggggtgcccggaaacggcgggctgggccagacgcccggcgtggttgagctggatgcccgccttgccgccgtgggcgtggatggcgtccgtgagccggcgaaggcctttgatgaagtgatcggaagcgatgctcacgccgggccagtagcttttgcccgtgtcgtccacgctggtggattcgagcatgttgagccccacgccgccgtaggcgcgctcggcgtggtaggcgatgaggcgctcgctgacttcgccgttgaccgcgcagtagtgcgtgaccattgagggcagcatgatgcggtttctaagggttgtctttctgatggtcagaggtgagagcaggacggaagaggacatagacgctccgggggtgaaagtacggatctggcctttttgttcttttttatgcaagagataaggcaatgattgtgccaaatcatacaaaaaaagccttgttttacatttattcatttatttaaaatgattaattgaaaaatccctttccatgtcttttcctatatgttcaaaaaaatgacatgcgctcatgacatgtcattgatttataccacaccggaaaggacggcaaagctttttttgattacgggatattacagatgaatagatatctgataaggtgtccataaagggaaacagccctgttccggctatccggagcagggctgtttcatggggttttaaaccgattgactgtctttttatgtcttatttttcacca

SEQ ID NO: 7478 - DNA, 175 bp, Unknown
  gut microbiota DNA sequence
agggctgcgtggccgacgtctcgtgctgcgagcccatgccggggatgttgccttcatccgtagtcaccgcgctcgagccgcccgaaggggcgtcgttgaacagcggaccggccacggtgttcaccgtcaccgactgttccgccgtgtcgccgtcgccgtccgtcaccgtcacctt

SEQ ID NO: 7479 - DNA, 345 bp, Unknown
  gut microbiota DNA sequence
gttcccctcctcctccgccaccaccgtgacctattatgtggatggcaaggcggtgtactccagcagcaaggccccctattactacaccctggactgcgacgccctgtccgccggcagccacaagctgtatgtcaccgctaccaacggcaagttcaccgtcaacggcagcgctgtcggcaagacctataccctccagacccaggagagcgagggctatcaccccggctccgccgacagctgggcccgggccctgctggacaccgcctatgagaagggcctgctcaccgagcgcaccgacagcggcttccagaaccagatcacccgcctgcagtttgccgacctggc

SEQ ID NO: 7480 - DNA, 536 bp, Unknown
  gut microbiota DNA sequence
aaatgtttcggagaacacggtaggctctccctgtaccgcacgcttttccatatagagcgtgctatgccggcactcttgcggagaaaggacatagcccggctcactggcagagatgaacttcacatcccgctgccgggactggtcgatacggggataaggcaaccagcagcgaaccagctttccggcaggaacggcattggtgtctaccgtcagcgtataagtgacacgcatccgcttgggagcgactatcgccttgttttctttcttcacggcggcaatcacttcaggcagattctctttgttcaccttctcacttccgcttagagcagtgccctctttggctatctttatatcatagcaggcagaatccacacgaaacagattaggaccggcattacggaaatagcgtttttcaccatccagaaccatgcactccaaagcattggatgcttcccactgccgcatctgttcgtccgttacatcaggaatatactttctgatatagtccttgacctgagattccgtcaaacaaaaat

SEQ ID NO: 7481 - DNA, 1944 bp, Unknown
  gut microbiota DNA sequence
aaagtgagattaccggtgtgttaaaaggacttggatttacggaaaatgatttcaccaaaccggtcgacactctctccggaggacagaaaacccgtgtatctcttggcaagcttctgttaacgaaaccagacattttgcttcttgatgagccaaccaaccatctagatctgaattccattgcatggcttgaaacctatcttctaaactaccagggagcagtgctgatcgtgtctcacgaccgttattttttgaacaaagttgtcacgaaagttcttgaaatcgagcttggagaacttcgtacttatatgggaaactacagtgactatgcagcaaagaagcagcagcttcgcgacatacgcctgaaggagtatcttaaccagcagcaggaaatcaagcatcaggaggcagttatcgaaaagcttcgttctttcaaccgtgaaaaatccatcaaacgtgccgaaagccgtgaaaagatgttggaaaagatgcagaccatcgaaaaaccgatagaagttaatacagatatacatctgaaactggaaccatcctgtgtaagcggcaatgatgttctgactattgaacatttaagcaaatctttccccggacaggagctttttacagacgttaatctcgagatcaaacgtggtgaacatgttgcagtaatcggtgataacggaactggaaagactacgcttcttaagattttaaaccgtgtggtatctgccgattccggtacttatacacttggctccaatgttaagatcggctactacgatcaggaacatcatgtccttcatatggagaaaacaatttttgacgagatttccgatgattatccgactcttacgaatacggaaatccggaatgtgcttgcagcatttctttttaccggtgatgatgtcttcaaacagatcagttctttgagcggtggggaacgcggacgtgtatctcttgcgaaactgatgctctctgaagcaaatttcctgatcctcgacgagccgaccaaccatttggacatcgcatccaaagaaatccttgagaatgctttgaatgattataccggcaccgtactttatgtctctcatgaccgttatttcatcaatcagaccgcttcacggattctagatcttgtcaatcatacatttgtaaattatatcggaaattatgactattatctggagaaaaaagaagaactcactaccgcatatgccggagcagcttctacatcttcatccgtttcagataacagtacagacaagaatgtatccgagtcaaaactcagctggcaggagcaaaaggaagcccaggcaagacttcgcaaacgtcagaatgagctaaaaaagactgaagaacgtatcggcgagctggaagaccgcgacggtgagattgatgctctgatggttcaggaagaaatcttcaccaactctgtaaaatgccaggaattggcaaaagaaaaagccgccatagcggaagaattagaagaattatatatgaaatgggaggaattagcggaagacgcttaatttatacgctgttcattcatacataaaaacaccatacactgtgatccgtcaaattcattcgggaattttcacattgtatggtgtttttgtcatatattatctactttaatttctcggcaattgccttaataaatccctcgctgttcaatacagttggattttccagtgtcgtgatcaatgccagatctttcgtcatcttaccttcttcaatggtatcaatggttgctttttcaagcttatctgcgaatgctgccaattcggcatttccatccatctcaccacgttttctgagagcacctgtccatgcaaaaattgtagctacagagtttgtagaagtctcttcccctttcagatgcttgtaataatgacgttgtacagttccatgagctgcctcatattcataatttccatccggtgatac

SEQ ID NO: 7482 - DNA, 9843 bp, Unknown
  gut microbiota DNA sequence
gggaaggggaaactttctctagaaagtttccccttccctcccccaatggcgttgctatcccaacgcctacttcttccttctcctcaacggcttcgaatacgcgtgctcggcgctgtggccgaactcctgcaaacggcgatcgacgagatcgtaaagggaaccacgggtgaacccgccgttcttgaggggcttcccggcgggaatgccggtcagaagctcaagcgcctcggtgatgtgctccaccgggtagatgccgaacttgcccgtgtccacggcttcgcggatgcgcggggaaagcatcagatgatccacgttgtcacgggggacgatgaccccctgctcgcccgtgagcccgcggcgggagcagatgccgaaaaagccctcgatcttgcgggacacgccgcccacggccatgatctggccggactggctcaccgcgccggtgatggcgagggacaatttgagcggcacgccggaaagcgccgacagcaacgccgccagctccgcgcccgaggcggaatcgccttcgatgccgccgtaattctgctcgaaacacaggcttccggtcatcacaagcggcttgttgcgggcgaactggtccacaagatagctcttgaggataagcatggccttggtgtggatggggccgccaagctcggcctcgcgctcaaggtcgatgatgccgccgtgcccgacgcccactgtgcaggaaatctgatgcggcaggccgaactcgaaatccccataccacgacaccgacaggccattgacccgcccgacggcggaacccgacgtccgtaccttgatgagctcgcggtcgtactcttccatgtagagctcttccacaaggttcgcacggtacatgcgggcttcgagcgcctcttccagatgctcggcctccaccagcgcggactgcttcatggcggccatcgcggaggcttcgatcatcacgtcgcgcatgagcgggaacttgagcgacagcttgcgctggtcctcggccacgcgggaactgaaatccacaagcccggccagcgcggtgcggctgaacggcaggagatgcgtctcgtcgatgatcccggcgacacggatgagccacgaccggatgtcggcggcggtacgctccaccgtctcggtcatgtgcgccttgatcttgaacagcttggcgaagcggtcgtcattggtcagcagggcttcgtacagctcctcgtttccgatgagcacgaccttgaggttcagggggaccggctgcggctcgatgcccttggtgcggaccgcgccgtccggcacgtcgcccgcctcctcaaggcgcgcggaaccggcgcgcagggcgcggagaagcccttcccatgcgccgggatgctggagaatgtcctcaagatgcaggacaaggaaaccgccgttggcccgatgcagggatccggccttgatcagcgtgaaatccgtgaccagcgcgcccatttccgactcgcgctccacgcagccaagcaggttggcggtggtggggtggtcttcgatgatcaggggggcgcccttgttcccgctgttgtccacaaacacgttcacgtcatagaggtacgtgtccgtctcgggatgctgcgcatcgccggacagcgcggcgctcagggcctgcgcgggctgcgtttcacggggcaggaaaccttccgggtgatccagaatatcctgacgcagggcttcaaaatactttttcagagtggaatccggctcaccgtccggcccggcgcagttcttcaggatgcgctccacggcagggctcagcacggcggacagcaccgagccgatcacttcctgctccagcgtcctctcgtccgagcggaaggactgctcggcggaattcagcttgcgcaccatgccggacatggcccgcaggagggtatcgcccttctgcttgagcccctgacgcaaggtgggatcgagatgttcgtactcgtcctcgctcaggcgcttgccttccaccaggggatacagggtcaggctgccctgctcatccatatcgaggttgaagccctctttcccggcggtcttgtccatctgcttgatgagcccggaacgcacggcctgaaaacgatcctgcaattcggaacgcttcttgacgtacttctcgttgtccagacggacgggcagttccttgcggatatccgccagcgcctgcgaaaggaccgaacgcagctttttgccctgccccgccgggacggacaacagcatgggacgatccggatcatcgaaattgttgacgtaaagcaggtccggcggcgtctgggccttgcggatgcggggctcgagaaactcccggagcatgtaggtccgcccaaggttcgactcgccggaaagataaatattgtaccctgccgtgtggatgtgcaacgccagctccagcgccttgagggcgcggggctgcggggccaccttacggtgtccgttgcgcgggatggcgtcgctcgtttcccaagggacgcgatccgggggcagactcgaacagaggcgctgaccaggcagagactttattttactcatgatattcctaaatatggattaaaaagaccgcggggaggggagagaaaacctttctgaagaaagactgtcccttccctccccatgcccgccccttccaaaagttttcgccttgaaaagaacgcggcccgtctcaaaaggtatcggctttccttgcggcgcaagccgggaagtcaaagcgagagagcggcagccggaacaacccggcggcggaaaacttaccgcgcgtacacccgggcgaggatctcggccccgccgtcctcggcgagggaccgggccaaagcgaagcccacggcgcgggcttcatcggcgcggcccgtcaccttgcggcggatgatcaccgagccgtccacttcaccgaccaggccttccagttcgaaggtgccgtcgtcaagcatttccgcatgtccggcgatgggaacctgacagccgccgtcgagcccggcgagcaggccgcgttcggcttccacgcagatgcgggtcggacggtgttccatgaaagacagcatttcggcgagatccttgcggtcctcgcggaattcgatgccgagcgcgccctgccccacggcggggatgaacgcgggcggggcgagcgggcactccttgggcacggacaggccgaggcgcttcatgcccgccgtcgccatgatgatggcggcgaactgcccctcggtcagcttgcggagccgcgtgtccacgttcccgcgcagggagacgacttcaagatccggccgctgggccaatacctgcgcctgacggcggaggctgctcgtgccgaccacggccccggcgggcaggttttccagcgaatcgtagtccaccgaaaggaacaggtccgtggggtcctcgcgttccggcacgatgccgaggatgaggccctcgggaagctccatgggaacgtccttcatgctgtgcacggcgatgtccgccgcgccggaaaggagcgcttcctcaatttccttcacgaacagccccttgccgccgaccttggccagcggcacgtcaaggatgatgtcgcccttggtcttgatgatgttcagttccaccgcaaggccgggatgtacggcttcgaggctgtccttcacatggttcgcctgccagagggccagacggctgccacgggtggcgataacgagtttttccataacgatccttggctggtgaacacggtgcttttttgagggacgccgccgtaccggagccgcccccccaaaatgttcgggaaagaggaatccggggaaggggcgccttttggagcgcgcctccccggttttaggaaatttagtggcagctcgcgcagttgccgccggaacaaccggcgcatccgcctccggaagacggcgcggagggcgcgccgaaatcgccgaggcttccgccttcgcaatggcggcacggcttggagatgagcttttccgtggcttcggcgcggcaggccgggcataccggattttcgtcgccgaaaacaagttcttcaaattcatgaccgcagcgcgtgcaacggtattcaaacatgggcatgacgcttctcctgtaaacgtattcagtcaagcatgggcttgatggccatcacattttcgaaaagatagtagtccgtcagcgcgcagagcatatgcccgatggcggcgtgcgtctcctgcacgagcggcgtggacggatgccccaccgcaagcaggatgtcgcacagcggagccatgcgccctcccccgtccccggtcaggccgatggtgaacaggctttgcttgcgggccgcctgcaacgcgccgatgacgttggcgctgttgcccgaggtggaaatgccgacgaacacgtcgccgggacgcccgagcgcctgcacctgcttggtgaagacgagatcgtaaccgaaatcgttgccgatggacgtcagcacggaagaatcggtcgtcagcgcgatggccggaagcggcggccggtccatcaggaaccggttgacgaactccgcggcccagtgctgggcatccgccgcgctcccgccgttgcccgccagcaaaatcttgcctccgcgcgccacggcgacggccatgcgccgggcggcctcggccaccttgcccccgtggacggcaaaaaaatcgcggcgcagtttcgcgccgtcttccgcatgttgggaaatcatttgcagggctttgtccataagacgctccttcgaaccgcatggctacaagcacagataatccctgattcccgttctgcaacccgcttgcggcgaactttgagatataagcgaaacagcccccgctgacaactccatgcgggccgtgcggcattccccaacccgccgaaacgatacggcggcggtaccgggctcccaagtttgctattgaagaatcacagggattctactactgaaagcagatgcactccgtcacctccatacttctcgtcaccaaggcccggcacgccgccgccgaagccaccgcagcagccgtcagccagtggctcgaagcccacggtgtggcttgttccgcccttcccgccgactgcccttccgaaaaactcgtcggcagggcccgcacctccgacgcaatcctgatcctcggcggcgacggaaccttcgtcggcgtgggccgcaagcttgccgggctggacattccgcttctcggcatcaatttcggtcaggtcggctttctgaccgaactctccgccgtcggctgggaacccgcgctggaacgcctcctcgccggaaagatgatcacgcgcacctgcctcctgctcgcgtgggagctcctgcgtggcgggacgcccatcgccagcgggcacgccgccaacgacgtggtggtcgggcgcggcgccatcgcccgcgtgctgcccgtccatgtgttcgtggacggcgaagacatgggcgtcgtgcgctccgacggggtgatcgtctccacgcccctcggctcctcggcgtatgccctgtccgcccacgggccgctggtgcatcccaaggtgcaggccctcaccctgacgcccatttcgcccttcttcaagagcttcccgcccatcgtcctgcccgcggactcccgcatccgcctcgaaaccgacgccgccgcgcccgacgcgttcctgaccgtggacgggcaggagggcatccccctgtgcggcggcgacgtcatacgggtgcaaagcctcgatgccgggctgcgggtcctttcatgctcatccggcacctatttccagcggctgcgtgaacgcggctttatccagacggacgggacgtccgccccggagcacgtatgaacaggcttcccgacatcgggcaggtcagcgatctccggctcggcgaccatcccggcttcgatgcgtggttctacagcttttgcgcggaaaacaacatcgaacacggcatcaaccccagcggcgtcgccagcccggagcagctccgcttcatggtcgccatggacgaacggcaggtgtacgcgccgtgttccgacgccaccttccgggagttggcggcctccttccacctccgcagttttccgccccgcgtgcgcagccagtatatcgcggcatggcgctccatcatccgggtcgtccgctacgaaaaggaccgccagaagcgccgcgacatgatcaactattgccgccaccgtttccggggttgcctcgcgctcggcaatatcctgccctcccgcctcgtcaagcggctggtcaccacgctcatcagccatttcgacgcgggcgatccgtggctgaacgagcgcctgttctacaacgaaacgctcgcctccttcctccgttcgcagaccctgcagaaggccctcggacgcctgcccgacggcctgagcgccgagggcatccccgatctgcgccgcgcgctggatctggctgagctggcccgcctcttccaccttgccgggcgctcgcaccataccctcacccagctcatccacaactgcgcggcggcggaaagcggcaaatgcgaactcccggacatctttaccggttccgaagccttcatcccgcaggtggaggagcttttccccggcccgccgcgcacgttcctctacatctgcgcgatggagggcggccttgcccttgatctgcggatcatccagacgctgctgcggctcgggcacaaggtcatcctgacgctcaaggaagcgccggtctactacgccccgaccgtgtgggacgtggaccgcgatcccctgctggtggacaatctgcccgaatcccatatattcaaggctccggccgcatccaagaacgaactgctccgccgtctgcgggaaaaccgcctgctcatcatttcggacggcacgggcgagcggctcaacctgtaccgcacctcggtcaccttcgcccgcgcctggaaagagagcgacgccatcatcgcccgcggacgctgcaaccgcgacgtgctcctcggcacgagccacctcttcacccgcgacgtcttctgcttctgggaagatcgcggcgaagtgcgtatgcagctcaagccccatgcgcccggcatccgcaagttcagcgaacaggcgctcacggccaaggcccggaccatcatcaagagtatgcgtgcctccaaggacagcggcaaggccgtgatgttctacagctgcatcatcggcagcatccccggccagaccgccacggcgatcaaggtggcggacacgttcgtccggtcgctgcgggagcggcttgatcaggtcttcatcatcaacccggcggaatatttcgagcccggcatggacggggacgatctcatgttcatgtgggagcaggtgcagcgcagcggcctcatcaacatctggcgcttccagagcatggaggacatcgaggccagcttcgggctcatggggctcaaggtcccgcccgtctggtccggcaaggacgccaccttctccaccgggtgcaccaaggaaatgcgcatcgcgctggacatgcagcgctcccatcccgaactccagatcgtcggccccggcccggaaaaatttttccgccgcggcgactacggcgtcggcaaattctttgacgccaccatctccaacgccaatcaggaataaccatgaccacacccacgcaactgttcacgcttctggatgcctgtttcgacgcccaaaacgaagccacggccctctggcacagccaggaacccgaggccgccgacgtcgcccccgacgcctccgcctcccccgagacgctccttgccctcgtccgcgcgcagcacctgcggaatttccggctctggcacattgaggacacggcccgccgccgcgacgtgacgcccgatgtcatcgccgactgcaagtaccgcatcgacaggctcaaccaggagcgcaacgaccgcatagagcgcgtggacgcctgcctcgtggccctgctctcccccctgctcccggcctcgcccgcgccgcacatcaatacggaatccctcggcatggccatcgaccgtctttccatcctcagcctcaagatctggcacatggacgagcaggtccggcgcaccgacgtgacgcccgagcacatcgcctcctgcgaaaagaagctcgcggtcctcaaggagcaacgcgccgacctcagccttgccgtcaagcatctcgtcaccgagttcgtcgaggggaccaagacccccaagctgtatttccagttcaagatgtacaacgaccccacgttgaaccctgagctgtatggaaaatagaggaagcgtgaggaatcggggaaggggaaaggaacccttctggagaagggcttcctttccccttccccaaaccccatcccctatcctcctaagacttttacgttttgaattccgggcgtctccagcgtctggaattgaaaaacaaaagtgtttgatgcctgaatagaataatcgttcggcctttcggagtcgccctatgtccgcttatgaaaccgtcatcggccttgaagtgcatgttcacctctgcaccaaatccaagctgttctgctcctgccccacgacgttcggggtggagcccaacaccaacgtctgcgaggtgtgcgccgggatgccgggcgtgctgcccgtcctgaaccagaccgccgtggagtacgccacccgcgcgggcctcgcccttgactgcaccatcaacaacgattcggtgttcgcccgtaagaactacttctaccccgacatgccgtacaactaccagatttcgcagttcgagcgcccgctgtgcgaattcgggcatctggacatcaacgtcggcggcgagaccaagcgcatcggcattacccgcatccacatggaaaccgacgcgggcaaaaacatccacgaaggcgaccacagctatctcgacctcaaccgcgccgccgtgccgctcatcgaaatcgtgagcgagcccgacatgcgcagcgccgaggaagcggtggcctatctcaaggccctgcacgccatcgtggtctacctcggcatcacggacggcaacatggaggaaggcagcttccgttgcgacgccaacgtgtccatccgtcccaaaggcgcggccgaattcggcacccgcgccgagctcaagaacctgaactcgttccgccacgtccagaaggccatcgaatacgaagtctcccgccagcaggacgtgctggaggacggggacaaggtgattcaggaaacccgcctgttcgacagcgtgaagggcgtcaccatgtccatgcgcgacaaggaagaggcccacgactaccgctatttccccgacccggatctcgtgcccgtgcacatcacggacgagcagctcgaaagctggaaggccagccttcccgagctgcccgcgcagcgccgccggcggttcatggatgaatggaagcttcccgagcaggatgcggacatcatcacatccgaccgcgcgcaggccgacctctttgaggcggcggtggccctgtacaacgagccgcgcaagatagccaattatatgaccggccccatgctccgcgagatcaaccagaccggcgtggagctcaaagactccgccctcaagcccgaagccctcgccgaactcgccaagatcgtcgacgacggcctcatcagcgccaagatcgcgcaggatattttcagtgaactgtacgccaacggcgtcatgcccgaagcctacgtccgtgaaaaaggccttgtgcaggtgtccgacacttccgccatcgatgccgccgtcgccgaagtgattgcggagaaccccgccgaagccgaagcctacaagggcggcaagaccaagctcatcagcttcttcgtcgggcaggtcatgcgcaagatgaagggcaaggccaaccccgccctcgtcaacgaggcgctgggaagattgttgaaataggagcagaagattggagggggagagggaacccttctccagaagggttccc

SEQ ID NO: 7483 - DNA, 8195 bp, Unknown
  gut microbiota DNA sequence
gggagactgcttgcccgtttcttttgggagagcttcctgatgcggcttcgtcctgcctttccgccttgcgccggacactcttgcggcgcccgtgcccggtccgcagcatttcctcatgaatcatcctgagaagtgagagcccgtccaggttcagcgccatcgctataagaagcaagacgttgagggtggcgttttgtcggcggccctcaagctgggcaatgtgaatacgagagagaccagcgaaatcagcaagtttttgttgcgatagcctggcctcccttcggacgcgccggagcacggtagcgatagcgcttttcaatcccggtagatcttccatgccgggagatctagcccagacttgacaaaaagatgtattctaaaacatacaaaaatgagactccaaccaggttatcagggcgttggtccgctcctgcgcactaagaggcatcccaaatggactccagttcctttgacgaaattttccgcaggtttcagagcgtaaccggtacgagcacgcaacaggaattggcggacgtgcttggtatcaagcaatcgaccatttccgaatccaaaaagcgcggcacagtgcctccaggctggtttttggttctgtttgaaatgcgcggggtgaacccggactggctcaagcagggcaagggccccatctatctccgcactgaagacgggcgctatatggagccggaacccgccgccacgccgcttggacggggcgtttccctgccttattacgattccgatcgcgtgcaggacggcgtatgggagccttccgggacgatcatgctccccgagccgtatgccgggaaggaactccgcatcctccgaataacgggcgacagtttttcgcccaccgtgcgccagggggctttcgtgggcgtcgacacgtcctgcgtccggccttccagcggcagcatcttcgcggtgtccgtgccttttgaaggcgtcgtcatcaagcgggtgttttgtgacagtgacacgctcttgctccgtacggacaatccgctccacccttcgatgtccattccgcttgctgaagcaggacggctcatcggcagggtcgcttgggtttttcaagcgatctgagccggcagaggccggccctcatcccttgctcctcacggaacggggcggatttttgggtgcgcggctcggactgtccgcgcattccggcgtaacgtgcgccgcacgcacggccaagatacacggcaagcctctagagaggcggtttcccgtcacgggccagcctcttattgcccagaaggatacacgccgcactccccttggtggggggcggaagcctgtagggcccggaaggccccctcatattttgatggcaacgcaagagcctcatcggctcccggagacactcctttcgcctccggttttatgggtaaggcgcagggaaaaggcgttttcccaaaaacggaaggctgttttcgaggatgggacggaatctggttctattgttgtgaaatacgggctgatcatatggtgtttccgttaaaagggcgagaggctggttatgcatcatattgcatgtttttgtggttgattcgggacatctctcagtgacagccccttgcgaatcccctatactctcggattacggaaccgtttcggagcatgtctcacaggagagcgttgtcgttatgaacatcggatcatacacttttcaggaatttaagcggcttgcggaaaactttcacggctatgcggcgccgggcctgcttatcggcggctacatggtggaaatggcgaaggcccgtatccccgaggggacgttgttcgaggccgtggtggagacgcgcaagtgcctgcctgatgccgtacagttgctgacgctgtgcagcgcggggaacaactggatgaaggtgcacaaccttggccggtatgcggtgtcgttgttcgacaagcacacgggcgagggcgtgcgtgtgagcgtggaccccgccaagctggacgctttcccggaaatccggggctggttcctcaaggaaaagcccaaaaaggatcaggatgaggtccggctgctcagtgaaatcgaagaagccggggacggcatctgcaaggcggagcccgtgaccatgaagcgccgcttcctcgggcacacgcatatgagcgccatcgggctgtgccccatgtgcggcgaagcgtaccccaaagaggacgggccggtctgccgcggctgtcagggggaggctccctatgtcacggccagccgggtactgaagacgccgccgacgcgggttgtgcctgttgaggaggcggtgggcaaaacagcggcccatgacatgacccgcattgagccgggcgcgttcaaggggccggaattcaaggccgggcagcgtatttccgtaggcgacatctgccgtctccagcagatggggcgtttccatgtcgctgtggtcgaggatgcgcccgacgccggggatctcgtgcacgagaacgacgtcgcggaagccttcgcccgccgtatggccggtcccggcgtgacctacaagctgcccccgcatgaaggcaagatcgattttatcgcggagcgcgaaggtttgttcagcgtggatgcggagcggatgttccgtttcaacatgctgccggagatcatggtggcctcgcggcaggacgccacggtggtgggcgagggtgcgcgccttgccgggacacgcgccattccgctgtatatttcccgcagccgtctcggagaggcgctttccgcgcttggggaaaagccgcttttcgaagtcttgcccctgcgcaaggccaaagtgggcatccttgttaccgggacggaagtttttcagggcatcattgaggacaaattcatcccggtcatcacggccaaggcgcatcagttccactgtgacgtggtgcgctcggtcattgccccggacgatgtgacgcgcatcgccgaagcggtccgggaaatccaggaggccggggccgatctgctcgtgaccacgggcggcctgtcggtcgatcccgatgacatgacccgccgcgccctgctcgaagccgggttgaccgacgtgctgcacggagtcccggtattgccggggaccatgagcctcatgggccgcattcccggcgatcttgcccacccggaagggatgcaggtgctcggcgttcccgcgtgtgccctgtactacaagacgacattccttgatctggtgcttccccgcctgcttgccgggcgtgaactcacccgcgccgaactcgcccgcatcggtgaaggcgggtattgcctcggctgcaagatctgcacataccccaagtgttcttttggcaaatagcgtaaccagaaggcatggtgaggacataatccgaatgctccgtcaaagaaggtggggagacctctttggcggagaatggactgtcatgtgacgtttcaatgagaaggtagcgctacacccctctgacggaaaccagggcttttctctggaatccgcacggcgttgaggaacgctgaaccggcgtccggtgcgcatgggcatttttcaacgttgcatttctcgaaggcaaaaaaagaagtccggtgatgcttttcaccggacttctttttttgccgctgtcggtatttttcatgttgatggttggtataagagtaaaacggaagcaggggagggcatcaagaaaacgctagtccgcttctttattccatccctctatcatcatactaaatttttttgctttttcgtacaaatgagggtttatgaccgtggttttgccgtctttcgcttccatcatgacggaccagatgcattgatcctggctgaaagaaagcgtgaaggttccggcagccttttccgaagcctctttcaacgcatggatggaagagtcaagcagcgcgtccgcgcaaagaaacttgccggaaggggcgcagatcgaaaaataaaggctcatagtgcaagtcctttttcaaaaatgtgtcaaacggaagagatacaaccaatcaagacaccgtatcgacagtacctaaaaagagcccggaacactactgtagattgcctgtccgtcgccagtgccgcaatgttggcccaacaggatggaaccccgtccgagatttggccaaagggcttcccgcccgtaatgctttttgaggatggctttttcctggcagccggatgcccaaggaaacgctttggatgtaaggaaacggtctcccggcttgaaccggaactgcccccaagcgtccgttttccgcctttatatgaagtcggaaggaatgatcccgtattttttcagcttgagatagatggtcgagcgtttgaggcggagcagggattccgcgccgtccgggccgcagaccttgccgcccgtccgctcaaggacatagcgcagatagcgctcctcaagttccgggatcgtgggaaaatccgggatgatgaaggcccccgcctccgatccggatgcggctgatcggctgggtgacaccagttcgagcaagggcgcgttcaggatgaccgcccgctcgatgatgttcttgagttcccttacattgccgggccaggagtagttcaggaggcaggcccgttccgcatccgtaagccggagggatggcctgccgtagcgttggcagtaagattccgcgaacgcctccgcaagcccgatgatgtcctcccggcgctcgcgcagcggggggacccgcagagggaccacggaaagccggtagaagagatcttcacggaagcgccctttggcgacctcatcgcgcagatctcggttggtggcggcgacgaggcggaaccgggatatgatttcggcggtgccgcccacacgcatgaaccgttggttctggagcacgcgcaagagcttgacctgcatactcaggggcatttcccccacttcgtcgatgaagagggtccccccgttggccatttcgaagtacccgattttttggctcgtagcgcctgtaaaggagcctttttcgtgcccgaagaactcactttcgaaaagctgttccggggtgctggccggatggaccgccacaaagggcccctttcgctggctgaaaagatggatctgccgcgcgatgacgtcttttcccgctccggtttccccataaagcaggacggcggcgtccgtcatgcccacctgccgcacctgcgagacgaacggtttcagcccttcgccgatgatgggggcttcgcccgtgtttttttggagcgtcacggcgttgaatttggcgctttgccaatggatttcctgttgcagcatgtcgtcgaggcgcagtgcggtccgcacttccgccgcgaacagccgcgccagttccccgagttcgctttttttgagctgcgtcagaaagcccggcccgaaccgtgtgtcgagatacagcagccacggctgccgcccgccgacattcaaggacaggcagatcgcctgccgatcccggtcccccttcccattgctcaggcaatccgcgatccacgcaatccggtcgcgcatggccgggctttgcatctccgtccgggtaaggttcaccgaggcggcgcactccacggagttgccgcccgccgagggcctgaacagcgcggcccgctcggccttgagttcgagctgggcgacgttgacgatgcgctggaggttgtcctcaagcgtctgccggatggggacgtcgttgaaggcgtcatggcagcggtccatgagttcttctttcaggaagagggtgccgatattcgggacgcccggcgaaaagacgtcgctgtccctgtcccgcgtggcgaggatcgagatttcgagggggtccatgtccgcgtgggatgcccggcctatggactccgaaaccagcatacggaaggggcgggcctcatcgtggcgtccgagcctttccagcgtgttcgccagctcatggcgggacagggccaattcccgtacgtcctgggaagaggcgaggcagcccacgctttggcggaggaggcttacgggatcggtttcctccgcatcccacaggtccgccctgccgtcccgcaggcacagggccttgacgcggagtgccgcaccacgcagctgccggttggggctgcggaggagtgcttcgagcgtgtcccggaatgcgtagcgggggatctcgggataccccgcccttgtgaagccatacagcatatccagaatatagggatcgacaaagggggagtggggcgaacccgcggcaatggcgttttctgtttcgcggcggaggatgcggtaggcggcgtcgagccgtccgttgagatagtgatagagcgccagcccgcgcaccgtgctggagaaaattttgggattctctaccggatgggtgcaggaaaacaggaagtccagatggttgagcgcttcgtcccaatcgcctttgcgcagcagcaggaaacagaaatgggtcagccagagcagggagaaggttttctctccggcaagttcggctgagtggcgggcggattccacggtcccgatagcgagggtgtaacgtccgaggtacatggccgactggctgatgctcatggcatggaacagcgcgatccggttgagccagtcgccgggttccccctgatggacatggctgcgcagcgaatccggatagttgccgctgatggcatagagcaggcccgcgaagcaggcgatgtggtttttcatctcctgttcgcaggcgtccttcaggcgcaggaattcggtctcgatttcgctgatgttccagggctcttcggggagctccaagcagagcagccgcatatagcttttgaggatgccgatgagggggcggaagcgttcgttgccgccgtagcccgccagctcgtaggcgatggacgagagcctgaaagccagaggaatgtggcggttggcaaggatgcacatgctctgaaaggtcagggcgagtctgccgtacaggcagctttccgagcctccggcggtgtacaggtggcgttcgccccaggcgatcaggaaacgcagcgcgcattccatgcagatgatgctgcccggccgctgcttgccgagatcgtcgccgatggcctcggcgatggcggtgcagtcgtcgagggccatgtccggagccccgagccgcgcgagggcatgggtgaggctgcccggaggggcgttccggacgagaaggcgcacgaattcgtcccgcacggcatccggcaggccggggcaaacccacgcgtccggggcttcggtatgggcaacgaaccccgcgccgaggagcggttcaagaagggaggcgatggcctcttgcggttttcccgccagcacggcgagttcctgcgtcaggagtgggcgtccggcggcgtgcagggcgatggcgaggatggcttggggaagattcagagagcggggcatggatacctccaaaggccggggagggcggcgcgtccgtatgcggtatatggcgcatggtgagcggcagaaccgtatctggtcttatagggatatccgatgggaatgaaaaggacttcatatgaaaatcagctatgtcggaaaccaaacgtcgacactatgtatggcgcctgaaggataaaaggcaccggctgaaggaatatgccggacgtggccagccctatccgtctctggaataaggtatgccaacggcccgaggcattgattggtgtggcagcaaaggaaatatgcttattacggctggggggatctggataggaagtcggttatccttccgatttccaagaggggatatagctttttatccctctatcagccaccccacaaaatcgccaagccggaaagcctccacggcatcgggccccaactcgctgcggtagagagccgaatatatctctaacgtatagtgtcctctccacttccttgcttcatgggcctccctttccactttgcagccgaatgtcagccgggatgctgtggcggacagggaacctctggggggcttttctttatttatgatgatgattgccccgcccggcctcatcttgctccgcaatgtcgacaataaaagttgccgcgtcgaggagggcaggtccatgagcgtcaggaaggccatcgccacgtcgaaaggcttgtacggataactggccacgtccgccataatggcccttcccggcccgcagtagtcaaccacgacgtcccggcagccgtccagggccacaaactgcgcctcccgctcatgcagcgtcggcgccagcacgcgtccgacgttcccggcagcgcatcccagatcatacactttgccgccctgcggg

SEQ ID NO: 7484 - DNA, 5007 bp, Unknown
  gut microbiota DNA sequence
cgcctgcccgcttggcaggggagcacgttaaaggtccagtttcccactccctgcgtcatgagcactctccccggatggatgttgaaactataatcattacattgtgttatttatgccatatgggtatgcagtagtccctttggccctgcattttttggtgctcggctgtttcctgggcgtcagaggggccctttgtggcagccgcttgagaggccgtggccatgttcgtttataataaaaagttacttcaatgaaacttctaagtcaacgaaaaccgaactaccgatgtaacatcgtttcacttatgtaactaaaatgaacgcagaaaaagtttttgaacaggtctggagggagttcatccggaggcttgaggccttgcgcaaccaaaagcccaaaatgacctatgaacagcttggagagatgtgcggtgtcagcaaagtgaccacaaaacggtggcttgaaggtgccggtggggaaaagacgtccttcccggacatgctccggtacatgcaggcggtggggatgaatatccgggccgttatcccacagagccaatctgaaaaggaggccgtcttggagagccggctttccgagattcagaaggagcttgccatatgcaaggatgcgctcaagcaagccgagaaagagcgcgacgcatacaaatcaagatgggaaggtcacttggaaacagtccgcgcccaaagcggcaaccatccgtccggcccttttgcgcatgggcaaaatccgttgggggaaaaggcggattgatggggtgtgggatcggaggagtatgccacgccgtatcttcgccagtttccgccagatgatgtttcggaaggctgacgctgtcgccggaggaactttttatttttaaagttatgtcaaggtaacttcttttgccggaaaagtcctgttcctcagtttggcatagaggaacagagcagctgcggcaaaacaaaagagggggagttgcagacaggttcgtgtctataagggaggaaagcctcacgcagtgcggagcgggggcccacaggtgttctagtggctttcctcggattatcatctctgccggatgaacctgtcgggggagcttgtcccttcgaaaaaggcaaagtggaaagagccgcgtctttatttttggatgattccagttttctggaaacatggtgaggcagcgacgcaagaaagactctttttgaaaaggatgaatgatttttaatgattcagggaaaagggatttccctcctgtcctttttctacgccgcttcagcgttttcttttttctcttttctcatttttattcaacatattatgttcacgctaactccgttttgtccaaaaagctggactccggggcctctggtgcttgctctccgcgggggatgcgggtgtctttttttaagataatgtaatagaaacatagggatcgctgctaataggctccgggttttccgattggcatgtcgattgctctaaaaagatcaatcgcgtgaacaatctcaacaaaggagccagcaccatgggcaaggcaacgcagatctaccggaacggtacgatattgacgatggattcacggggaagcgtggtcagcgcgttggccgttgaaggcaacgtcgtcctcgctgtgggaacggatgatgacgttatggcccatgccgggccggataccgtggtcactgatttacggggccggaccatgctgcccggtttcgtcgatgggcacagtcattttgtatgggccgggctcatgttcgccacgcagcttgatctttcctccccgccggtaggcaaggtgaaggacattgccgaaatccgcgatctgctcaaggaaaaggccgcctccacgcctaagggcgagtggattcttgggtatggctacgatgacaccgcccttgcggatcgccgccacccgctcgcgtccgacatggacgacgtgacgcccgatcatccggtgctcctgcgccatgtttccggccatttgtgctcctgcaacagccgcgccctggccttggtcggttatgaccggaatacgcccgatccccttggcgggatcatccgccgcgacgggcacggcaaccccaacggcgttctggaggaacccccggcgatgaatcccgttgccgcgttgctgcccgaagcttccgaggaagactggatgcgcagcatcgtaaccgcctgcgacgcctacaccgcgaagggcgtcacgtccgcgcaggacggcttcacgcaggaaaagcagtgggcacagctccgcaaggcccatgaaaagggactgctccgtaaccgagtgcagatcctgcccggcctcggctgttgcgatctcaaccagttcacttctcacgcttccggtacgccgctgaccgccgaccgcaagatcagcctcggcgctgtcaagcacctcgtcgacggcagcctgcaatgctataccggctgcctgagcaatccctaccataaaatcatctatgatctgccggacggccccatgtggcgcggctatatccaggaaaacccggaagggttcatcgatcgcatcgtggctttgcatcggcagggctggcagatcgccatccacggcaacggcgatgaagccatccagctcattctggatgcctatgaagaggcgcagaagcgctatccccgcgccgacgcccggcacatcgtcatccactgccagaccgtgcgcgaggatcagctcgaccgtatcaagcgcctcggcgtggtgccttcgttcttcgtggtccacacctacttctggggcgaccgccaccgcgacatcttcctcggcccggatcgcgccaagcgcatcagcccgctccgcagcgccctgaaacgcggcatcctgttcagcaaccacaacgacacgttcgtaacccccattgatcccctgctctccgtgtggtctgcggtcaaccgcatcaccagcagcgggcaagtccttggcgaggaatataccatttccgtcatggacgcgctgcgcagcgtgacctcgtgggccgcctatcaggcctgtgaggaaacgagcaagggcagtctcgaacccggcaagctggccgacatggtcgtgcttggggacaaccccctcgccgtggacaaaaaggctatccgcgacattccggtgctggcgaccatcgtcggcaacgaactcgtatacgggtcgctggaatagccttgccggaaacccggcggcatgggggcgctccttcccgccttctccgtcgggtttccccggctcctgtggttgcggatactcacaactttgacggttgccttaccaagagagggattcatggaagcgtcattttatccgtatctgggtgcattgtgttggatcggtatgctgctcatgctcgggacgttaatccgtgccaaggtgccgttgttccagaagctgctgtttccttcctcccttataggtggcctcatcgggttcgtgctgatcaaccttgatttggtcgggatgcccacctccaccggctggaaggacattacgccgaacattttcagtatgatcaccttccacttgttcgcgttcggcttcgtgggcatcggtttgctccagaccaagaagcccgccagcggcaaggttgtgatgcgtggcgccctgtggatcgcgctcgtgtttggtatgaccttctctgtgcaggcgctcatcggcaagggcgttttcgtgctgtggcaggacctgttcgggggcacgtttgaaaccgtcaacggctacctcctcggcgcgggcttcacgcagggcccaggccagacgcaggcctacgccaccatctggcagacctcctatcagaccgccaacgccctgagcgtcgggctggccttcgccgccgtcggtttcctcgtggcgggcatcgtgggcgtgccgctggccttctacggcatcaagcgcggctggtgcaccggagggcgttccggcgagctgccccagaacttcctgcgcggccttatggatcgcggcgacaatcccccctgttcccacagcaccacccaccccgccaacatcgacaacctcggcttccatgtgggcctcatggcggcgatctatggcgtggcctatcttttcgggctgttgttctccaagtacatgcccgccggcatcgcggggctcggtttcggcctgactttctgctggggcatgttcctcgccatgctgctgcgcaagttcatgggcaagatcgacatcctgcacctcatagacggcgaaacgacccggcgtctggtcggcggttccgtggacttcatgatctgcgccgtgttcctcggcattgaaatgagggcccttcaggaggtgctgctgcccttcatcgtcgccatcgccgccgccacattcattaccctgatcatttgcgtgtggttcggccgccgttcccccgagtacggcttcgagcgctgcctgatcatgttcggttacgccacgggcacggcggcttcgggcctgctgctgctccgcatcgccgatccggattacgaaacccccgtcgcggtggaaggcggcctcatgaacgtcttttcctgcctgaccttcctgccggtcacgctgtccatgccgttcgcgccgctgccgggatatcccatcgtctgggtgttcgcagcggtcatcattgcgacgcccatcgccatgtatctcttgaagttcatccgcaagcccgcgttctgatcccccatcggaaacggattgcgcatgagggatgcgggggttagcccccggaggaaagggaatgctgggtttccctcacccggagtacgttcaacccaaaggagagaggaagatgaagagactgatgacgcttttgttggccgccggtttggttcttggcgcaacttccgccgcgaaggcggtcgacttcaagatgacgggcttgtggcagaaccgtgtatcgttcgccgaccgcaattttgaaaagcataacggcgacgataagatgcgtgccgctacccgtctgcgtacccagatcgacgtgatcgcttcggaatccctgaagggcgtgatgttcttcgaaatcg

SEQ ID NO: 7485 - DNA, 10146 bp, Unknown
  gut microbiota DNA sequence
gccgccgaaggcgccgccctcggcaccgacggcaaggaaatcaaggtccgctacagctacgtggactggatcattccccggaccgacgccaaggtccgcatgggcctccagccctacgtccagccgaccttcaccggcatcggctccccgatcctcgacgccgacggcgcgggcatcaccatcagcaaccagttcaccgaaaacgtgagcgcgagcctgttctggctgcgcgccgaaaatgacaacgaccccgaaatgacgaagcacgatgcccacgacgcgatggacttcatcggcgtgaccgtgccgatgacctttgacggcgtgaaagtgactccgtggggcatgggcggcatcatcgggcatgacagcttcaagggcgggaacttcgacctgaactatcctatggcacagggtatgcttccccttatgggcacgtcgaccatcgtggccaacagcgataaggatcacggcagcgcgtggttcggcggcgtctccgcggacctgagctatttcgatcccttccgctttgccctcgacgccgcctacggcagcgtggatctgggcaccagcaagctgaacggcaagaacttcgacgtgaagcgctccggctggtacgccgcgctcctcgccgaatacaagctggaatcctgcacccccggcctgctgttctggtattcctcgggcgacgacgccaatgcgtataacggttccgagcgtctgccctccatcgaccccgatgtgtatgtgacctcctacggcttcgacggcacgaactacggcggcgcggcccagacgatgggctacggcatttccggcacgtgggctgtcatggctcgtgtgaaggacatctcgtttatggaagacctctcccacgtcctgcgcgtcgtgtactatcagggcacgaacaacaaggaaatggtgcgtcaggggatgatttcgaatccccaggattcgcagtacagcatgatgtacctgactacgggcgacaaggccgtggaagtgaacttcgacacggaatacaagctgtacaagaacctctccctgttcgtggaactcggctacatccgcctcgatctggataaggatctgtggaagggcgtgggctacgaagcgaaggaaaacaacttcaagggcaccttcagcgtcggctataagttctagacgattgcgacgcgggtctttgcctctcctccggcggaggctccgcgtttcaaggcttgggcggagacggtgccctttgatccgggcgtttcccgccgtgggaatacatgacgggaaacgcgcctgggcgtgcaggggaatcatccttctgccgagggcttctggggcgggcggccttcgaaaggccagcccgtcactccgtatcgggaatcagccggaccccttccttgcctccccgcttgggtgaaacaaggcgccgggtatggaaaaagccctgcggaatcccggctgccgatgcaatgtcgaaaacggacgctctgcgcaatggcggggggccgtttttgtatgggggaacggcgtcggtcccgtatggggttgaaatgaataggccgtccgcacggtacagggcggaagagagatatttctctttatcctgtaccgtgcggacggcttttttccggcaatgaggcgaggcggcgtttcgggatcggccttcgctggctaggaggcggcattgccgccttaccgggacatctgtgcgagagcccgcaatccacgcgggctcttgccgttccggtcactgaaggtctgccggaatctgttttcccggtgcggcggacgatgctttggcttccgccggaggcgccgtctctgccggaaaggttttcgtgctgtccgccgccttcccggagcggagtgcgtcaaggatggcggggaacgcctcgtcgaccttggcgcggaccttttcgtcgcggatgatggcgacggggtggggcacggcgacgcaatgcagggggcctatgcggagattttggcggacgttgtgaaaagtcttgaggaacggctgggtcagaatggtcagggtcgggacgcccgcgcgttcgagctggatctgatcgatggcgagccatgcggaacaggcccggcagtccccggtcgccgcgatgaccagatcggggcgcagttcgaggagcgcccgcgccgtggcctcggattcgggcagatccttggagatgccgctgagggcggggtccgtttcatacgctttgatgaattcggtgtccggaaaggcgcgggacagcagcgagtgcaggtaatcgagcagaagatcgccgttgtgtttgccgttccagcgcaggatcacgcgcttgcccgcgagatcggaaggccacggggccggatcgtagagcggcggcagatcgttccatacggtcaggctttcccacgtcacggcctgctctccacgggccggaaaggccagcaggaatacggtgcacaacgcgatcagaacctttcccatgtcaatctcctgcgctttttcgggaaaaaggccgcccgatccgtgtgccgaagggacggatcgggcgggcggtgagagggttacttgaaggaatccatgccgttcaaggtttcgtcatacatggcgggatagaaacggctgatgaagtgggccgtggagcggcaggccttgccgaccacgaggtcgatgtgcttgccgccggagcgggtggcaaggttggggctcttttcgcccttgctgttttcgatgtgccacgccttcacgatcttgccgtcaaattcgtcgataacaatggagaaatgcttgttcggaccaacaaacacgttgttggctcccccgtcgagaacgatttccttgtcgttttcaaggacgatctcatgggggaaagtgcaggtcgctcaggtttcgggacgggcgaggaaccgggtatcggccggccacacgctaccgtcgttgacttcaacaacatcattatacgcgacgagggacaccttgccgtcggcaatgggcttgtcgctctggcggatattcaggtgcacggcgaccttgccgtccttggagagcgtccagaggcggtcgcggtctaccacggacatgagcagcatccgggtattctcgggggtcagggggccgaggaccttggtcacggtgccggacttgtcggtcagcttcacggtggcggcgttggcggccacgtcggtgacttcaaccttggcgtcgccgatggtgaaggtgtcgcccttgccgtagctggcgaccacgggctcgttgggggacacgaagatggcggaacagctgtcggtagcgagttcgcgcaccttcacggagtcgccttcaatggcgtctatgatgacatgcgtacggcctacggtagcgatgttgctgccgtaaatcatttcgctcaggccgttttcagccgtggggacggtatgcccttcgggatccttggaacccttgacgagcgagccgtcggcggcggcgttgctgatctgtgcgcccgtgtagaccgggaactgggaaccgtagtagttgcccgtggtcttcacgatcttgaatacggcggaattgccgccttcaatgccgtaggtgtcgttctccacggagctgagttcccagccgcggctcttgttggcgttgctcggaaggacctgtcccttcttcatggtgacgttacggatgacgtcacggacatagcgatccgtgatggcatggtacgtcttgcccgcgagcgtcaggggctcgttatcgaagggatgccagttggtggagcggaccgtgatgtacaggcccgacggcggaatgatgatcttgccgtctttgatggtgctcttgcggatgaccacgccgtcgttgatggtacggctgaggccgctgagcgtcttggccttcctgttgttgacgagcccttgcatcttggcaaggaccgccgcgtccttggcgggcgattgcatgaccacgcggtcgggcgcgtcgcctgccatcgccacgccgctcatcgccacggcgagacagatcgctgctgcggccttgccgatggcccggagtgagatatgcgacatacatcctcctcttgcggctcgctccgagcttgggcgcggttccggcaactgccgaaaacgatccgcgcgtcagccgccttcactatgaaggcgtgaagcgatccggttgctgtttttgtcggcctctgcggccgtccgatgcgggaaccccttgccggggccgcccgcgatcagcgttagcacgagcattccgcgccttcgatggcttcgacggtcacggcctgcttgagcttttcgagcacttcgggcgtaacgcccttgacttccagcagttcgtccatgctcttgatgtcgcccacgttttcgcggaattccacgatgcccttggccagctcggggcccacggcgggattggcggaaagttcctgttcggtggcggtgttgaggttcatcttgccgtcggcgaaggcgggggcggcgcacagcaccacggcggcgaggacggcggaagcgatggttttgatgttcatggcgggctccttaggaaagggtattggtggtttctggacggataacccctttgcgcacgagctgttcgtaccagagcgggttatggtgccggataaacgttacggggatgaatcccgagaacatggaccgtagcgcggggccttcgccgggcgcgaatgcggccatgtaaatatggatgggcaggacaacggccatcacgcccgcgcagagcagatggatgaacagggcccactgggcggcgtcctcggagcccggcgcgacgagatggagcgtcagcgcggcgaggaacagcccggagagcgcaagccccacgctgcacagcacggcggccacggcggcgagcttctgcccggcgttgtagaagccttgcggcggcagggtggggtcaagccccatgctgcgcatggccttttccccaaggacgaggcgcatccccttgcggacgcaccagatcatgtcggaggccggggagaggctgaatacttccttgaggaaggggactacgtcgtggcgcaacccgaaaatgatgtagaggaagtagacggcgagccacgccgaaccgatcagcaggtggaagacgagcagcccgtacgcgccgaacacgccggtccagagatcggcccaccacatgcccacgggctgcatggccgggttggaaagcagggcgaaccccgtgaacagcaacgcgatccagcagaaggcgttgaaccagtgcatacagacggcgctgagggaatgacggcggatcatgagcccttcctcttttcttcatgggatgcttcgcctgtggggcggatcagctggcgcaggcccacgcccacgaccccgaacagggacagcgcgccgagccagcgcaccccggtagccacggttcccatgaagcccacgggaccggcgctttcggccttgggccagtgtttgtcggccacatcgttcagataggcgagggtcggcttggtgggcgcgtcctcggcctcaacgaacgtgactttgtgcgagccgagcaccttgctgaccggggactgtgggtcgtccacatccccaaacacgcgggcgcgggtggtgcatacgctgacgcaggcgggttccatgccttcggcgcgggaggacgcgcaataatcgcacttgtccacgacgcggcgcgcggggtcgatgtggcgggcctgataggggcaggcgcgcatacagcttccgcaggcgatgcagcgggtttcgtccaccatgaccacgccgtcttcggccttgtaggtggcgtgcgtggggcaggcgtcaacgcaggacggctcgtcgcagtgcatacaggctccgggctggtagcgccagccggagggcgaagccgtgtcgggcgtttcccgcacccagttgcgggagaggccgtagggcacggcgttccgctgctggcaggcaatcaggcacgccttgcagttcaggcatttggaggcgtctatggccatcacgtaacggggcatgttcttctccgaaattcatttgcggcgtcgccgccgggccgccgggaagggttccggcgcagggggcggggaaaatccccgctcctcctccccttacgccttttccagcgtgcatcccacgccgttgaactgggccgacacgcggtcccagtagttgggcaggatggcattgatcggcttgctccgcgtcgcggcatgggggcttgtgcccgtgaaatgcgatggcgtgaagatgatgccgggccggatggaagcggtcagttccgccacggcttctacggagccggtggcggtcttgatgcgcactgtatcgccgtgggcgatgccaagaggcttggccgtgtccgggtggaccagcacatagcgcccacgggagaattgggccagcgaggcggcgaaattggtcatggtctgctgccactgggtcaccaccttgccctgcgtgaggacgagggggtattccttgtcggcgccggccccgtggggattgcccttgggcagcgtccagccgaacgcgcccatcagcttgagatccagcgggattttgccgttttccgtggcgtaggttccggacgtgaagaccgttccgatccgttcctgcgcgccttcctcgggctggggccagatcaggccgtccggggactggcgcattctggaaacgctcatggccttccagctcgggaccgtattgcggaagcgttcgctcagttcttcgggtccggtgaaatcgggatagatctccggggccagcttgcgcccgatgtcgcggtaaaactgccagtcggggacacagcttccgggcgcgtccacgcacttgtcgcgccagaccacctgcttctcggctccgtaatgcgaacccgcgctttccgggccgaaggcggcgggcacgaacaggtcggccacatccatctcctcggtcttgaagaagccgcgatggaccacgaaccccacctttttgatcgcctcggcgacgccggtgcagtcggggtagcggcggtagctggaattgaggaagagcacgtcgaggttgcccttcttcatggtgttgagcaggcggcggaagttgacgccggaatccttggccgggccgcacacggcgtcgacgaattccttttcgccttcgggcttgccgccctccatcgtaaggagccccctgcccgagccgatgaggttgtcgcgcagggcctgaagcgcgatgatcgcccggatgctctgcaacccgttggtgtagcgggagaggcagccgcccatccagatgatggtgcgggggctctcggcaagcgtccggtagaaggcggtgacggcgtcttcggacagcccggtggcttgcgccaccttgtcgacgctccacggctgcgcgcccttttccatgagctcgaagccggtgatgctctcgtccacccgcgcgcggtcgaaggctccgttttcaagaacgaagcggatcgcgccgagggcgagcgcgccgtccgtgccgggcaggggcatgagctggtcggcggcccaagcgctggtgggcgtcttgcggcagtccacgctcacgatgcgcacccccgcgtcgcgggccttgtcaagccagcgggtgtagggcgggtaggtttcgctgatgttcgcgccccagagcacgagggtcttcgcgttgacgatctcgttgaccgtggtggtggaggtgttcgcgccgagcaacatgccgagcacgttggacgccgtgctgatgcagacttcaccggcgggcatgacgttgaccccgcccgccgtacgcatggtcatgagcgcggcgagttcgctttcgcggcaatcccacaggggggaggtgagggcaaggcgctcggcgatcttgtcgccgtgcttggcgcggctctggcgcagcttgtccacgacgatgtccacggcctcggcgtaggagatggttttccattccgagccctgcttgagcatgggctgcacgaggcggtaggggctgttgagcagctcgacgatggacaggcccttggggcacatggccccgtcggtccagcggttgccgcgatctccgatgagttcgaggattttgccgttgcgcacgcgcgcgtggtaggtgcagcggacctggcagaaagggcagtagcccttcaccaaatcgttttggggagcggccgttccggcgggagcctgagccgcatggaccggcagacccccgagggccgtgcccccggcaatcgccgccatgccgtattgaaggaaatgtctgcgggagaatgtgttggacatgggtgctccgtccttggaacgccgcgcgccacgcgaggccgttcgtatacagatccgtgctgcgggagaaaatcaccggatggagcgactatgcggaaagtttgtaaaaaaaagttcaacgttttgtaaaagttttgtaaaagtccatcatagtgttattacaggataaaacttgttgaatccgatctcgtcaaagacgtttccttacaaacgccgcaggaaactactctcaacggagagtgagcttttcatgaaaaaaggaggagcgtatggatgattccgatgaaaaaagaaagtaaaacaatctgtttcaacgattttacacaagctgttccctattcgaatgatacagcggtagggttatttgtcacaagccttgagcgtaatggagacggtgaatcccttggggtattgattgtaataatgcagctcgcccccgcaggcttccacgcaatgcttgacgatagacatgccgagcccggaaccgccgggatatttctttgcttgttcgccccggaagaacggttcggtgatgtgctccatttcctcggcggggacgccggggccgctgtcgcggatttccacgcacacacggtccccctgcggccttgcggcaatggcgatggggccgtcttccccggcataacgcacggcgttgcgcaccacgttggcgagcgcccggccgaggcagcttgcgtccgcccagaccttgagcccctcgtcgacgctcaggcgcacgtcgcggtcccgggcttcgcggcgtgtcacatactggagcagcggcgcgagggatacggcctcacgggcgggtgactccggaatggcctcggaacgcatgaagctcagcacatcctcgaccagcagggaaagctgctccacttcgtcgctgatttcctgtacgcgctgctggtttttctcgtccacacggctgtccagcacggcgagcccgagcttgatccgggccagcggcgaatccagctcatgggcgatgtgccggatgaaacggcgctgcccgtggacctgctgtttgaccttttccgccatgatgcccgtggccttggcgaggcagccgatctggtccccgcgcccttcgcccacggccttgaggctgatgggcgaatcgtcggagagcgaactgtaatcgcccgccgcaatccgctcggtcactttggtcatgaggatgatgggcttggtgagatggcgcacgaagggccaccaccacaggaacgacagcccgagcccggacaggagcagggccacggcgaggcgcagttcgaagaaatgcccgtttccggtgatggacggcgaagacgccgcgagcagtacgtagcggacaacgccttcgtcgttggagacaaggatggtgcgggcgtaccagtattgggcgggatcgccgtcgcgcatgaaaatgacgtattgttgcgggaggatgcccgcttcaagttccacggcgggcgtgatcgtgctgaacgcgcccgaatcgggttcggcgcacagggaatagggcgggcggggaatggtgcgggccgcctccacaactcttggaggcaggccgcccgcagcaagcggagggtccatatcgtcgaggatcaggatgccgaaatggaggccgcactccctgccgcactcctcaaggaccgaagcccattggctttcgggtttgtattgcagctccacggaggtcatgcggaatgtggaggcgatactgccgttgaacagcatgggcgagtacagattgttgttgaacagcagcaccccgccgataaacagggctgtgatgacgccgagcaggacgaggttgagcatcgcccaggtgaagaatttctggtacagtcccacgcgcatggttttttctcctgaatggaggcttgttcgccggattttctcgacttccaccgaggggcgctgccccttcggaatcccgcaaaggggcagc

SEQ ID NO: 7486 - DNA, 1065 bp, Unknown
  gut microbiota DNA sequence
gtctttttatgtcttatttttcaccaagaagcctggcggcgttgtcgtagagcgtattctgaagggcttcgtcggtgaagccgcgcgacttccaaccccggaggcactggctgaggctgcgcaccgggtaggagctggcgtagaggatgcggtatttcaggtaggtgttcgcggccttgatgtactcgtcggacagcgcgaacccatcgatataaatgtaacagtcaggcataagatacacgttggggcaacggatcgccacggcaagggcggtgtggacatgcggccagcagccgtgcggcacgactatcttcatgtttgggtatttcatggcgacgcgctggatggcgcagggctcggagtagctcagatccgggccgagcatgaaactggaggtcagggagacgatcatgccgagttcctgacatttcgcataaatgggatcaaaaaccggatcgtcatggtagagcgggcggcgcagccatccggcgtcgatgcccacgccccggaaacccatcgcggcgacgcgttcgatttcctctacctgtccgggaaggttcgggttgacgcccgcgaaggggatgaagcggcccggataggcgcgggcgagttcgtcgatttcgtcattgtccacggaaccatactcgtcggccttgcggcccatgatcacggcgcgttcggtttcggtctcgtccatttcctgcatgaacagttcgatggagcgcgcttccgccgaggggacgcgttccttgccgatcaggaaaatcgactgcttggtgggatcgggggacggcgcgggcttgttgtagagcgatgtggtcagattggtcttgtacggggggcgtacgcggaaatcgatgagcatggcggattctccttggtgatgacgcgggcggtgcgtggggacggcggctccgcgagtgtatacggctgcgcccggtgcgcgggcaacagtctgcggacagcaagaagcgatccagcacgcgccatttgagcgcgatccgcatactacttatgaaaaaaggaacaataatttcctgattcgccggaaaaggcttgctttcg

SEQ ID NO: 7487 - DNA, 20736 bp, Unknown
  gut microbiota DNA sequence
acatatacacaaatgtcacatgcgcggcgtccgcgtctcacggggacgacgcaggagccttcccatgacggacacccatgattcgtatctccagtccgacgcccggcaggaggccatttcggcccagaaggagcttttcctccgtggcctgcccgtggataccaccgtggtcagcgatttcgtcctgcgctcgtggcagcgtagccgccttgccggggtcgatcccgaaaccacggtgcgcaagaaggtggacgagaccattttccggcatatccttgccgccaatgccgatcttctcgagtcctcccgcgtgattatgaaggaattgttctcgtctctggtttccggagcggggtccatgatcctttccaccgccgaatgcatcagcctgcatatggaaaccagcggaagggacggcgacacctaccccagttccaagcccggcatgatcaccaccgaacagctccggggaaccaacggcatcgggacgtgcgtggcggagcgcaggcccatcgagatcatcggcgcggagcattacctgaccgtggggcaccgttggagctgttcggcggcgccgattttcgacagcaagaaccagctcatcgccgtgctcaacgtgagccagctccgcgagaagtaccactcccacaccctcggcatggtgcgggcggcggcctacgccatttcggaacagctccgcctccgcgccctgctccagcagcaacaggccatcatcgaactgctcgacgagggggtcatcgtggtgtcccgttccggcgaggtgaagctcatgaacagcaaagccgcctccatgctcgggcttccggccccgcagcagggcgaaaacatctacaagttcatgcggccttcgcagatgctcgacaacatcctcacgggcgatccccatatcatggatcaggaagcgcagttccccttggaatccggttcgctgtcctgtttcttttcggccatgtccctgaccagagaggcctgcgtggtgctcacgttccgggaggcccggcgtatgcggggattcgcggcacgcgtcgccgggtcgaaggccgtgtacacgtttgaccgcatccttggggattcgcccccgctcatggaggtcatcgatcaggccaaaaccatcgcgcggggcaacaccacggtgctcatcctcggcgaaagcggcacgggcaaggaactcttcgcgcagtcgatccataacgcgagctctcgggcatcgcgcccttttgtggcggtgaactgtggagcgttgccgcggaatctcgtggagagcgagcttttcggctatgaggacggggcgttcaccggggcgagccggaccgggaagccggggaaattcgagcttgcggacggcgggaccatttttctcgacgagctcggcgagatgccgatggacgcgcaagtttcgctcctgcgcctgctccagaacggcgaggtgacccgcatcggcggcaagtcgagccgtacggtgtcggtgcgcgtcatcgccgcgacgaacaagaaccttgaggaagccgtgcgccagcacaccttccgcgaggatctctactatcggctcaacgtcttcactctcgtattgccgccgttgcgcagccggatgtcggacattgagcttttggccgagcattttctgctgaaattcgcgggcagcctcggcaaggatgtgcggggtttcacgcccggcgcgctggcgctgctccggcgctaccagtggcccggcaacatccgtgagcttgaaaacgtgatggaacggctcgccaatatcgtacggcatcctctcgtttccgaggaggatctgccgcctcagatggtgacggttcgccagcccgccagcccgcaaggcctcttgcacagcaaagaggccgagaccatccttgagacgctccggcagaccggaggcaacatccgggcggcggccgcactgctcggggtgtcgaggggcggcctgtacgtcaagctgaggcggctggggatcgatgtggaaagctgccgcggcggtgaaggatgaatggagagaggggctggcatccgggggagaaacttttctagagaaaagtttctcccccgaacccccttttccaaaggctttcgactggtggggaggccgcgcggagggagtgcgttccgatatgagaggagcctttatgggtggcccttcaaataggcttcatttatgggacgttgcggacagggatgcgataagcgtaaaagcctttgaagagaaagggaggggagtgccaaccgtgctggcacttttggagaaaggagaaatatggggtgcccccttttccccaagatttttctccctcggcaaaaggtgcccatgcctgcggctgaacgccgcattcccgcatgactccttttgcgggcagagcgggtgcatttccacctgattgaccatgggagggatgcttgcattacgcacagatccatcagcgggccagggaggaagttgcatacgccgatggctcggatcttgccgttttcgtagagttcccccatcgctctccatgaaccgtaatagtccccaaaaggcatgtggatcaggtataaatccagagtgtcaagccccagacggctcaaggacgcttcaaaggctttcttcgttttctcatagccagcctcttgaatccatactttggtggtgatggacaattccttgcgtgggattccgctctcgcggacggcggctcccacggcttcctcattccgatagaccgaagccgtatcgataagccgataacctgccgccagagccttcgagacggcttgttctcacagggtggcatccggcacctgaaagacgccgaaaccttccagcggcatttcgattccattacgcaatatcgtggtctgcatgggtattccttttgaggtgtagggagggcggcaaactcctatgttatctccgtgtgtgttttgagcagccatgtgaggttttttattctgcccgctcgaaggcaatcgaaaagtcgccgggcatggcagccagtttttctatgcccgaagtgatgcgcccaaaacggaccagtcctctggacaggcgaaactcccggtaaaagatggcgatgttgccccacggggcatagaacgtcagatctcccgccgaaggctcaatgctgtccggcatatcttccgtggaaatcacgcgtggcgggttgccgattttttccgtcccgttgtagtccttcaccgtcagggtgagcgggagcatactcaagaaatcacggcctgcgggattgtcttccagtacggcgggaagggtttccccgtcaacgatcaagcgtatgcgcatgggttcacctgccggagcggaatgggggagaagtgccgccagtgccgtcaggaggagggccgccataggcaacaggcagtgcttcaggggcagccggcggccttgccgcatggtttgtttcgcgttcatgggcttacgccttgttgcccagctcaaaggcggacttcagggcggcgggaacctgcaggatcgtcccggctccgtcggcacccgtaccccgcacaacgcccctcagcgcggccttttcaaaacaggcgatccagccctccaagcctttgacggccccgtccattgaactctccgcgctgtccgccgccgttgccagcagataaatgtccctgaacgcatagtcagacgggaacagaggattggagcgatcgagcagggtcttcatctggccgcacatctcataaaaatagatgggggtggcgaatgcgattacctcggcgtccttcatttttcggacgatggcgtcggcatcgtcatggatgacgcatcgctgcgttttctggcaggccagacagcctttgcaaaagccgatggttttgtcgtgcaggctgagcagttccacgttatgtccggcttcctccgcacctctggcaaattcacgggccagcatttcggagttgccgttcttgcgggggctggtcgaaaggatcaggatgtttttcttcatggaaatcgttctccttctatattcattgtggacggttggggcgttccgccctccatatggaggtgacacggattgcggccatcgaaaagggctcaggccttgtgccccgtgtctctggcgaagagggaaaaactgaccgcgatcagcagggccgccatgacgctgatgcccgccgccgccagaaagatgccattgatgccgaggttgtcataggtgaacccgcccacggcggcggcaaggccaatggcgaattgcgtcgccgcgacggtgagccctccggcaagctccgccttgtcggagagggtgcgggcgatccatgtggaccagcctaccggggtaaagccgaacgcgaatccccagaaaacagccagcgcgatgccgatgtccgcgtgcccttgggagagaagcaaggcgagcgcggcggctgtgaaggccagatggaccagaatcatggttgaccggaagtgattcccgaggagcgcgcccgcaatgaaggtgccgaggacgttcgccactccgaagaccagcaggatcacggaaagcgtattggctcccaaggcgagatccagctccagaaagggccgcaggtatgtgaagaaaatatggtatccgccgaaactcaggatgttcccgccgatacccgccagaatccatgtgcgccggagcagggcggacatgtcccggaaaccgctgcccgcgcgggccgggagggagggcagggcgcggtattgccagacgaacccgaaagcggccatgagcgcgccgaggaaaaagacatttcgccagccgatcagatggccgatccagctcgccacgggcagggcgatgatcgtcgctacggaaaccccggcgtagacgatgctcagggcgcgggggacgtccttcgtggggacgagctgcagggtgacggcggaggccagcgaccagaagccgcccacgcagatgccgagtatcgcacgcccgatgagcatgatcgaataggtcggagccatgccgatcagcatgtaggacgcgacaagcatggcggaaaaagccagcaggatgcgccgcctgtcggtgtttcccgtcagcggggccagcaggaggctggtcagcacggcgagcacgcctacggcggtgaccgtctgcccggccatgccctcggagacggcaagatctcgggcaatgggcgtcagcaggcttacggggatgaattcggctgcaatcaggaccatgacgcccataaataaggaaaagaccgccgaccagcggggattgccggtctgaaagacaccgttccgcatactatgccctttgggatgagggcggtgccctcaactgaggccccgcccttcccggaatgttacttcagatttttcgtaaagaagtcggtgagcttgccgaaggggataaggcttgccctgtcatacagatccacatgcccggctccggggacgatatacagttccttcggttccgccgcgagcctgtacgcgtcttcgctgaactcgatggagtgcgccttttcgcccgcgatgaacagcatggggcgcggggaaatcgtctcgatgtccgagaacgggtagaagttcatgaacttgacgttgctggtgaacgtcgggtgcgtggtgagctgtggggaggagccttccggagtgaattcccctctcggcgtccggtagaatgcgtagaattcccgctcgatgggcgtggacgtttccgtcagttcatggacggtgccgctggtgtaccgggtttcgccgcccgtgaattccgcatagcgctgttccgccgcttccctgaggatctgctttcgctgctccaaggtcatgccatgccggagtccgttccggttggccgcgcccatgtcgtacatgctgattgtcgctatggccttcaggcggggatcgatcttggcggcgctgatggcgaaactgccgctgccgcagatgccgatgaccccgatccgttcacggtccacaagagggttcgtgccgaggaagtccgcggcggcgctgaaggtttcggcatacaggtccggtgaaacggcattgcgcggctggccttcgcttccgccccagaacgccagatccacggaaagggtgacgaatccctgttccgccattttgacggcgtacaggtttgcgctctgttccttcaccgcgcccatgggatgcccgacgatgatcgcggcgtgtttcgtcttctgatccagattcttgggcaggaagaggttcccggcgatgttcatgttgtactggttcggaaatgtgacctgccgcacggttacgctttcgctcttgtagaaattgctggcgtcggcggggatttcctgagccagaaccggggcggcggacattgtgccgataatggcggcggtcataccgagctgtttcattgcgcgcatcatgttgtctcctttgaggtttgagtattcttgatcggactggggattgaaaggaacgcggcaggactgtttcagcatccttttttcagttgaaaaagaaggtaatcaaggcaatccagcttgttctgatccttatggaggtcttcaagaagcagattccgctgttttacaagaatatgcatttggcaaaatatgttcccttcctttctgctctgcatgaattgctcgatgatctgttgtgagcatccggcatcatgcaggttttggatcagcggatcgtcttgtttggggttacctttcatagttgctttctcctgtgacatgcatataagagcggggcattgaatagcaaatacttatattgaatcctttaccatgcctaataagcatggtatgaatcgccatatcaaagagttttctcaggctggcaaggacgtcatcacgtgtcacccggattcggggaagacatgcgggcgaacggcgcgtggcggtctgtaataagcggagatgagctatggaactgagggtgcttcgctatttccttgccgtggcaagggaggaaagcatatccggggcggcggaagccctgcacgtcacccagcccacgctgtcgcggcagatgatggagcttgaggaggaactggggaaaacgttgttcctgcgcgggaaaaggaagatttctctgacggaggaaggcatgttcctccgcaagagggcgcaggagatcgtcacgttggtggaaaagacggaatccgagttcagcgcggcggaagaaaccatcagcggggatgtccatatcggaggcggcgagaccgacgccatgcggctgattgcccgcgccgcgcacaggctccagtcggcgtacccccacattgcgtaccacctgttcagcggcaatgcggatgacgtcacggaacggctggacagggggcttgtggatttcggcgtcttcatcgaaccggcggatctgtcgaagtacgacttcatcaagctgccggtgacggacatttggggcgtgctgatgcgaaaagactgccctctcgcggcaagggcaacgataaggccgcaggatctgctggcccttccgctcctcgcttccaaccagcatctggtgaaaaacgaattttcaggatggttcggagaaggttatgagaagctgaacatcatcacgacatacaatctgctgtacaacgcctcgatcatggtggaggaaggcatgggatacgccctgtgtctggacaagatcgtcaggacatccggcggcagcccgctgtgcttcaggccgctggagccgaagctggaagtggggttgcatatcgcttggaaaaagtaccagtttttctcgaaggccgctgaaaaatttctggaatgcctacaacgcgagatcgcggatcggcgggaggcggatagcccagcgtaccaatagagccacaggcaagcggacgcaaaaggggaagaggggcttttctggaaaagcacctcttcccctctggtctattcttcttttgcctacagattacatccgatccggcgtccgtcttcaatggcgttcacgatgaggctgccgacctgcgcgccgttgaccgagcccgcgcagagcacctctttgaccgagcccttgagcgcttcgagcagactggtgtcgggttcctgcgaaaggagcaccatcaccgtgtcggcttcgatgagtttgcgctgattgtcctttgtggtgatcaccacgccctgatctgtgatctgatcgcaggtcacgccgccgagcaattggacgtccttcttggcgagccacggcttgagccgatcaagatagcggggcgggatgcctttgccgaacgtctcggaaggttccagtaccgtcacctcacggccgcgcttgcggaggaagaccgcgccttgcagcccttcgatctgcccgccgatgatcgccacgcgcttgccgatgggcaggaacagtttggtcagcttgttcaaaagctcgggcccgaaaacaagcaacggcagcttgacctgtttcgacaggctgttgacgcccgcgacattgcggttttcgacgcccttgagcgagggcagtctgtacaggccccccgtggcgatgaccacggcgtccggcttttcggcaaggatcttggatacggtggcttcctcgccaagcctgaccttgatgttcaacttgccgacctgcgtggtcagatagctgatgacggggcgcacgtcctcgacttccacgcccttgatcattgccgcgaggggcaacttcccgccgagccgcgagcttttttcaaacagcgtcacgtcatgcccgcgcagggcggcgacgcgggccgtctccattccggcggggccgccgccgatgaccacaaccttctttttcttttcggcgggccggatggcgaaaaggctttcccggcccatggcggggttgacccggcagcggcgcgggcggcccaccgacggatcttcgcaggttccgcagcgcgtgcagcgcacgatatcctcaatgcggccttccgcgaccttgcgggggaattccgggtcggcccagagaacacgcccgaaggccacgagatccgccttgccttcttcaaggatcttttcggccttggcctcgtcaagacggcctacggcgatgaccggaatgttcacagcctgcttgatggcggcagcggcggggatgagcaggccgtcgcccatgaaatccttcaagtagggcttcatgtgttcttccggctcgggatagggccagtagtcgggcagatagcggaacggcagcggcccgaagccgtagccggacacgctgatgtaccgcacgcccgcgccctcgaaaatcttggcgatggccacggtttccgcgatggtcagccccttgtcggcaccccactcctgaccgttcatgcgcaggccgaggggatagtccgcgccgagacgctcgcgcagcccggcgatgatttcgagaggcaggcgggtacggttttcgaggctctgggggccatactggtcgtcgcggcggttccagacccggctcacgaagctttccagatagtagccgtgcgcgcagtggacttcgatgccgtcaaacccggcggctttggcgcgttcggcggccttgaaatagagttccttgtcctccgcgatttcttcggcggtgaggcctcgcgtgggcttgcccaccggcgggggacaggggatttcatccggcccgagatcggaggggccgatgggcaggccgccgccgtgtccggtcatggccgaggccccggagtggtggagctggcagaacacggggcagccgtgcgcgtggcagcgttccacgaggcgcttcatgccggggaggaaccggtcgtcgtggagcgcgccgtaagccccggcgggatggtcggaacgccatgtgatggcggatacgatcacaagcccgaccccgccggcggcgatggcttcgtaaaagtcaatgaccctgtccccggccgagccgtcgtcctcaaaaaaccagcttgactggggggccttgatcatcctgtttttcagggtgaggccgcttccgagcgaaagcggtgacaggagcttatggaattgtccggtgctcatgccgtctccttgcgtgtgtagaatgtatggttgacccgcgttgggcgggatttcgggcaaagtgagggctccggcggaggaagggccgccggagccgtggggatgacgggaatccgctagaaagagtagagaacgcagaccgcgcccttgaagttgttcttcttggattcgtagtctttccagacgttggaatcgagatccatacggatgtagccgagttcgaggaacaggctgaggttcttgtaaatcttgtattccgaatcgacgttcacttcccacgccttgtcggcggtggtcatgtagtacatggaggaaaccgtttcggagggcttcgtgatcatcttctggcggacattttcggtattgttggtaccgcgatagaaggccacgcggagggtgtggctgaggtcttcaaagaaagaaatgtccttcaagtgggccacgatgccgaacgtgccgtcgacgctggtgccgaggacctgctgggcgcggcagaagttcgtgccgtcgaagccgtaggaagtcaccttcacgtcggggttgatggtgggcaggcgctcggaaccgttgttgacgttggcgtcgtcgccggaggaataccatgccgtgaggccgggcgtgacggattccatcttgtattcggcaagggcggacacgatccagccttcgcgtttgacgtcgatcttcttgcctttggtgctgaggccttcgccgagatcgacacggccataggtggcgtcgagggcgaagcggaagggatcaagcaccttcagttctgtcgtgaacccggcccaccacgcgtcgccgtggcgatcggtcaggctgttgcccgtcagggtcttgttgctcacgccgagaggcagcaggccctgcaacagtttcttctggtcaccggaggccccggcgttttcaaagctgtctcggcccacaaaaccatacatggcccacggggtcaccttcacgccgtcgaacttgaggggcagggtgatgcccgtgaagtccatggcgtcgctgtagtggtattgcttgccgtagtcggtggcgctgtcggtgttgtcgttttcggcgcgcagccagaagagggtggctccgatgttcttggtgaactgggtggacagggtgatgcccgcgccgtccgcgccgccgccgccgaggatgacgttcggaagggcgaatccgggcaggctgaagttctggaggcccatacggaccttggcgtccgtctgggggatgacccagtcaacatagttgtagcggaccttgaccaccttgccgtcagtgccgagggacgcgccgtccgcgcccttgccccagttctggggcccgatttcaaaatagacgacacccttgaggctttccgacgcgatgacgtcgatctgcgtacggatacgggtggcattctgcattttgtcggagccgttgtgtttttcaaaattacggtccgcgaaggacatggcattgtgccataggtccttggctttgatgtccacggcgttggcggcggatgcggcgccgatgaccagaccggcggcaagcagcagggtaatcactttcttcatgggattctcctcagtttctcctcaagcgttttggattggtgcaaccgtttgtgtcttttcgctcaatcggaggggctgctgcccgccacgcggactgtcccacgacgcaaccacagcgaaagattgaaaagaatctgatcccccacggaaagccgtttctctccaggatggggaccggattgcccctgtaacggtatcctgcctatgagaacagcaaagagtgggccaatatcagcatgttacacggatgtacggaaaagaagaatcattttgcaacattagaaaggcatatcgtgaaaagtgtcttcaatgctgttcatattgaaaccatgtgtatatgaacatgtcttttttatggacacagcttgaggaggccatttatgggagaaatggccgcaagggacgacctggaaggtcagggggaagggattatggatgaagaacgcgataccggcatggccgccatgagccggaaggatcgcagagagcatacttccggtcacatccggaggcgtcaggcgttatggctagcggtattcgtcggggttgaggccgagttttttgagcttcacgtagaagccgccgcgtgagatgccgaggagtttggcggcttcgcggacattgcccgccgtccgttcgagcgcggcgagcaggcgtttcgcttcgtggccgggcagcggttttcctgtgggtgcggaaacctcggctgcggagatccgggcgtgaagatcggaaagcccgatgacgtcgccttcggcaagggccacggcccgctccagaacggtttccagctcccggacattgccgggccacgaatacctgagcagagcctccatagcttcgggggcgatgggcttcggctgtttgccgagggcctgcgcgaaccgggaagcgcaacgggcggcaagagcctcaatgtccgaacgcctttcacgcagcggtggaaccgttatggtgtattcccgtaaaagttcatgcagttctttaagaaaaagcccttcgcgcacggcttcggaaagccccgggcctgccccggcgataaggcggacgttcactgtgcggccttgccctccgccgacgcgggcggtttctccgccgcgcagcaggcgcacgatccccatctgtgccgtcagggggagggcttccacgccgtcgaggaacagcgtgccgccatccgccagctcgcatttgccgggcctgccgccttccccatcgaatccaaacagttcgctgcgcataaggctgcgcgggatgcctccgcagtgcacggcgacgaagggggcctcccggcggcgtcccgcgttgtggatggcctgagcgaagccgtgccgctccgtcccttcctcacccgtgagcaggaccggagcgtcatgccgcgcggcgcggcggagcgcctcccgtgcctgggcaatggcgggggaatcgcccggaatatcgtcaagcgcgtagaccgccccggccccgatggtgcgggccgcgaacccgcacaggcggcgcgattcgcgcagggccaacacgccgcccttgcccataccgagcggcgcgaaggagagcacgcacgggagcgtgccgttcgcggtatgcagcagggcttcccgatcctgaaaggcattgtgttcgtcaaggatgtcgcggcgcactgcctcggaaagcaccgtgtcccgcaagtggagatggggcggcaacgcctccagcccgagcatggatagcccgcgcccattggcggaatggatttcacccgaggcgccgacttcaaggatgccctcgtccagcacttccatgatcgcacgctgcctgccgagagcggcccgcaggtggagctgttccgcgatggcgtgggccgaagcctccaccatgccccgcgtatgcagatgataggattcccgggcgatggaaacattgaggacgcctgcaagcgtgccgtcttcgtagcggatgggggatgcggtgcagctccagacatgatgccgggcgcaatagtgctgtgcgccgatgatggtcacggtcttccgttcgacaaggcaagtcccgatgccgttggtgccggatacggcttccgtggcgatctggccgggaagcacgtcgggcccgtcgccctcactccgcagggtgtgcagtacgagccctgagccgtctgtcagcgaaatgctgcaccgcgtggcgcgcaccacggaaaacagtttgtccatgatggaacgggcgctgcacagcagatcgctgttgaggcgctgggcctgctcaaggagcagcgcgtccacgcgtacaatgctgttggcttccgtggtaatgccggattcccggcagcgctcccaggaggcgaggatgaacggggggatatattcgggatccacgggggcggtcccgtcgcggaatttttgccattccgcatacaaggctgcgtgcagggctggggacgcctgatccggcgcctgaatcatgagtgcgggcatggagtgaccatccggagaaaaacctactagcctgaacactgcgaaaaaaacagattatcgccttttacatactagaaagtgataccggaaaagcctccgccgggcaaacggaaaatgcgcgagtcccgctggggctccgcttcgtgctttactgggaggctttgcccccctgaccctgcaagaggttcccccgtcagtgcgggtgcgccggagtcggcacaagtgggagcgggtgaattcccgctggcacgcgggttgtgctttgagcttatgcgtatttccctcggcggcattgccgctcaatggaaaatgtggtgggggtaaatgaaaggcatcgtgggcggcatttcgcctatgggaaaaagcatggggaaaggcattccgcgcaaacctgaatgaattccccgagcgccgttttcccatcagcgaagcctagtagggaagtggaggggccggaggaggcataccccgtgtgggctctcacattaaaggggttcctccctccggtgccgtccaaggtggctgaaactcaggcgctcttggtttcgccttcgcctattggggaaaagacatccgtcgcattgccccggctcttgccgaggccgagcagggttgcggaaaaggcggtcacgaacatggccatgaacaggatgaacatggaggcgtattgtccgatgccgtaggcggcctgaccgggggcctgcgcttccatgatccacccgctggcgagctgaagcagggccgtcccgatataggagtagatgttgatcatcccggtggccgtgcccacgatttcgggggggaaatcctcttgtaccttggtgagggcgatgccgccgaacccgccgcagaagatgccgaaggcgaggctccagaccgggagcagggaggcggggagcacgggatgatccgcaagcagcggcgcggcgagcaggatggtgacgccgctggcggcgaggagcaagacacccttggaccaccggacccacgtcacgacgacccccaccagcgacgggccgaccaccgcgccgagggccatgcagaaaaggatgccgcccgccgtgcccttgtcgaggccgtagccttgaatgaaatacggcccggcccagagcccggtcatggcgtagaacgacccgtacatgcagaagaaccacgtggatacgctccaataggtgcggctgcggacgatgcggagcatggtttcacgcaagggcggggcggggtgtttgcggggagcgatggaaacccatgccggggcgtacccggcctcttcggggcggttgcgtacccacagccatgtggcgccggccacaagcacggtcgccgccgtagccgcgaacatactgccgcgccagcccacggcctgcgagagcagcatgagcggataggtggcgaggagcataccgcccgtgccgagggaaaggatcaagcccgtgccgagggcgtgccgtgccggagggaaccagtacaggatcacccgcaaggcgggcacgaagaccatgcccatgccgacgccgatgagcacgcggccggccgtcgccgccgttaccgagccggaaagggcgaacaggagcgaccccgccgccccgatgaggaggaacgaggcgatggtgttgcgcgaaccccagcggtccgaaaggatgcccgccgggatctgcatgaacccgtacgggtaaaaataggcggagctcatgaccgacatgagcccgccgccgacggcgaattcgcgcatgatgtccacggcgagggtgctcgtggatgtccgaaagaaactgacgagcgcatagcagatggtcaaaatggaaaaaataaaccatgcatgtcgggtcatggctttggatgaatggggggacatagggcctccgtgaaagccgcgcccgccagacgggagggcgcagcaaagccttccggcgtaaatgctttccgtcgtcggctttttcgggaataaggggggacgtgcgtccggcgggacgccctcaacaggggctgaaagcgtcccgccgggggattattccccgcacgggatatcgagcttgagcgccttgatcgcgttgcggtacagcaggttgggcaagacttcaggcttgaagggcagcgccttgaactgctccacgccttcgcggaagccgatgaacggataggccgtgccgaacaggaaacgctcggagaggaaggtattggcggccatgacgtaatcgctcacgccgggcatattgtacatgtacatgtcagggcagaggtacaggttggggcgcttgaaggccacgaacaggatttccgtaacccacggatagccgccgtgcgtgttgatcacggtcatttcggggaagtcgccgcacacccggtcgatgatgatcgggttgctgtggctgagatccgggccgttgcccccgccgcccatgagcagcaccgggatgccgtgctcggcgcagtattcgtatatggggtagatgcggcggtcatcggcatacatggggctggccagcacgccgggctccatgcccacggccttgagcggcccgttcaccacgaaacgctcgatctcctccagcgccttggcgcggttcgtcggatggatcccggcgacgccgatgaatttttccgggtaatccgcgacgatggcggcgatgtcctcgttgggcacgttacccatgaaggcgttggcctgacggcccggcacgacacccagcgtcacgccgccttcctccatttccttgagcatcagctccatgtcgccctgtttggcggacggcgggggaaccatgccgagcttgccgctccagctggcgatgcgttcctgattgcggaagatgtgcatattcagaaaaccgcgcgtggcgggacggagcctgaaatcaatgatcatgatatttctcccggcccttgcgggcctgttggggcggtgcgtccgcagcgggcgcttacttgatggaacacccggcctgaaaaccggactcgatggcggtcaggattttgccgacggaggcgcaatcccccacgcggacgcaggggcagcccatctcttcaagctcggcggcaagggcgttttcggcccggtagcccacggcgatcacgagcgtgtcgaagtcgtcaagccagcgttccgagccggaagggaatttggctttcaccttgccttcttcggtgacttcaagcacctgcgtaccggtaaggatgcgcgtgccgtactccctgaggcgctgcatcagataacggcgggtacgtgattccatatccttcgccaattcgggctgaagttcgaggatggtcacatccgaaccctgcgcggcgaggaactcggcggtttcacagccgataagcccgccgccgatgacgagcgcctttttcccggctttggcttcaccggagaggatgctctgggctaccaccgcgttccgggccttgcggcaaaagccggggaataccggggcgctgcccgtggcggcgatcacggcgtccgcgccgagatcccgtaccgcttcgggcgtgagggcggccccgaggtgcagcccgacgcccgcccgcttcaactgtcgctcgaaccagcccgtgacatggcccaaatcttctttgtgcgggggcttgcaagccacgttgagcagaccgccgaggcgatccgacttttcatacagatccaccgtatgcccccggaaccgggcggcaagggcggcctgcatcccggcggggccgccgccgatgactgcgactttcttgggggacaccacgggattgagatcatacttgccttccgcaccggacaacgggttcagggcgcacccgacgcccgttccgcgcgcggatccggctacgcagccctcgttgcagcccacgcaccggatgatgtctccggcctcgcccgccgcgaccttggcgggcaggaacggatcggcaatgagcgcacggcccatcgccaccatgtccgcatccccgcgatcgatgatgccctgagccgtctgctcgtcggctacgcggcccgccacgatgacgggcacggcggcctcaatgccgtcgcgcacggcgcgggaaaggggcgcgttccagcccttctccacgcaggcaggcggggaaaccatgaaattcgtctcgcgcagccccacggaaacgtgcaaagcgtcgatgccgtcggctaccagccgcttggcgagggcgacggaatcctccagcgtggtgccgccgggaagcccttcaacggcgctcatgcggtaggtgaccgggaaatccggccccacggactcgcggactttgcggcagacctcaagggcgaagcgcatacggttttccagcgaaccgccgtatccgtcggtgcgccggttggtatagggggaaaggaactggctgatgagatagccgtgcgccccgtggatttccacggcgtcaaacccggcttcgcgggcacggatggcggcctttccccagcattccacgaggcgggcgatttcctcttcgctgaggatcacgctgttgtcgtagggggtcacgccgggaatggcggatacgagaggcacggcatggcccgaaaattgggggagcgcggcgcgcccgccgtgctggagctggatggatatgcgcgccccgtgccgtttcacgcggcgggccagatcggtgaggccgggcaggcgcgcgtcgtccgcgatgctcaggccacgggagaaggagttgccggtgggatcgacggatgtggcctcaatggtgacaagcccggccccgcccttggcacgctcttcgtagtagcggagcatacgctccgtgacgccgccgtccggcgcggcgtatttcgtacacatggcggggaagacaatccggtttttgatcaacagcgtgttgatgcggattggattggtgcaacaagatgtgttcatggaacctccagatgagaaagacatcttgcctgcggcaatgcaagccatgtgccatccttccggcggatgaggcgtgccgcgccgggccgtttccgcctttttcctgacccccggaattcattccgatacagtgggcggctctgaatatccccggtgttcccgtatcttcgcttccccgtccagagagtgtgcccggtgtgcaaaatgtgggcatgtatttgtagacatgttcatagaatatgatttataatagacatacgtaaacacactttgtgcggagaggaacatggaagagcatatcgagcggaacaaaagggtccttgaacagtgggagcgcttccacaggcaagagcccgtggacgaatccgccgtccggcccctgatcctgcgttcatggaagcgctgccgccttcagggggtcaggccggacaacgcctccaaagtgtcccttagccccgccgcgctggaaaagctgctcgatcggaacgcggatcttgtggcggtggccaaaagcatcatggaaaagctgtataaccccatcagcacttcgcgcagcttcatttccctgtccgacgcgcaggggatcgtcctgcacgcgctctgggacaataccggcagctaccctatcccgcacctcgcgccgggcaacctcgcggcggaaagcgcctcggggaccaatgccatcgggacgtgcctcgtggaacatacgcctgtggagacgctggcttcggaacattactgccgctcgttccacggctggttctgctcggcggcccccatcagggacagccggaacgccatcgtcggcgtgctcaatgtgacgctcccgagcgccctgtaccatcaccatacccggggtatgatggaagcggcggcccacgccatcgcggaacagctccgcctgcggctgctccttcaggaacagaaggccatcattgaaatgttggatgaaggggtggtcgtgctggaaggcgacggcacgatacggacgctgaacaacaaggcgcaagccatgctcgacctgccgccggacgctgtgcacggcaacattcaggacatcatcttttccagcgacatcatccgggcgatcctctcggaaagcggccaattcagcgatcaggaagcgttcctccagctcaagggcggttcgctcaactgcatgctttcgctcacccgcttggaatcggggaaaggccgggtgctgaccctgcgcgagaccaaaaggatcaaggaatccgccgtgcgcgtcaccggggccaaggccgtctatactttcgatcacattgtcggcaacgcgcccgccacgcaggaggtcgtacgcatggcccgcatggcggcccagagcgatgtgaccaccctcatcctcggggaaagcggcacgggcaaggaacttttcgcgcagtccatccacaacgggggcaggagggccaacgcgcctttcgtcgtggtgaactgcggggcactgccgcgcaacctcgtgcagagcgagcttttcggctatgatgaaggctcttttacgggcgcgagccgccttgggaagcccggcaaattcgagctggcggacaacgggaccatttttcttgatgaaatcggggagatgccccttgaagcgcaggtcagcctgctccgtctgctccagaacggcgaagtgacccgcgtgggagggaaacacacccgcctcgtcaacgtgcgggtgctcgccgctacgaaccgcaatcttgaaaacgccatccgtcagaacgccttccgcgaggatctctactatcgcttgaacgtcttcaccctcaacgtgcctcccctgcgcgaacgcagttcggacatcgcgcttctgatcaaccatttcctcgatcacttcgtcgcctccctcgggcgcggccccttgcgggttacggatcgggctatggatgtgctcctcgg

SEQ ID NO: 7488 - DNA, 316 bp, Unknown
  gut microbiota DNA sequence
ggtaccctccatcgacattgacgtgttgcccgcgaacatcctcaatcacgagggcataccggggggcgcgccgcgtcccgccgtccctcgcgggctcctttcgcatcaggagaaggagaccatcgtccgggcgcttcaggaggccgggggcaacatccgggcgaccgcgaaggccctcggcatttcccggagcggcttgtacgtcaagatgcgccgtttcggcctgtcgccggacgagtgccggtagggtcagggaggaagggcgttgggaaatttggagggggaggggaaactttctagagaaagtttcccctcc

SEQ ID NO: 7489 - DNA, 9711 bp, Unknown
  gut microbiota DNA sequence
atatcataaattataaataaaaatctatcattcggctggacgattcttggaatggtctatcattcaaaagggatccgctccagtccccattcggccccttccgcaaccgcaagcaaggaatcgtttccgttccgtaccaataccgacccaatgccgaccatttaccgcttgcacaaaaccgaccaattccgcactgtagggaaatgtacgggcatacagtggcatccgagacattttttcgcatccaacatgggctccatacagtgcctttcagcatataccgcgcacagtgccatgatccatccgttttcacccaatatgaacttaatgacccgttgtgaaaaaagaatatcagtccatcataaagcgcaacacattttttgcttgcacactcgattccgagaggatacctctcaataagttgaaacaacggcataaatggcttgatgtgacgccatacgccgattctggacgatcttatgcggagagaccttttccatcgcgcgcgcatctgccctcttccggttttatctgtatatcacagtgtattttatactcttttccctattccaattttttggggtaaaagcaacaagaatggtctgagtggtctatttacgattgacagaatctttcaatggtcatattggccttaccaatttagtgaggaatgcatcatgcccaaaacagactcttccgccgggcgtccgcgccggagctatcagaagctcacggaacgcctccggcaattcatggaggaaggccatttccgcgacggggacaaactgcccccggaacgggcccttgccgagtccttcggcgtttcccgcagcagcgtccgcgaagccatccgtgcccttgccgaaaaagggctcctcgaaagcaggcaaggggacgggacgtatgtccgcgtgcccgacatagagccgctcaaggaggccatccttgaagccgtggattccgagggcctgatgttcgacgaggtgacggaataccgccgcatcgtggagccgggcattgcggaaatcgctgccgtgcgccatacatccgaacagcttgaccgcctcaagatcatcgcctgcgatcagcagcgccgcctgctcgtcggcgagaacgacggcgatctcgacgccagattccacctcgccctcgccgaatgcacgggcaacaaactgctcatagacaccgtcgcccggctgaaccgcatctacgccaaggggcgcaccccggagctgcgggacacgccgtggcgccagttctcggtttcctcccacctgcgcatcatcgacgcgcttgagcggcggtccccggaagacagccgcaaggccctcgaagagcatatcgatacggttatccacaaacaccttttcgccaccgtgagggactgacatgctgatttcactggttgtttactgtttgctcggggctattgcgggcgttctggccgggcttctcggcgtgggcgggggcatcgtcatcgtgcccatgctcgtctttgcgttcggctggcaaaacttcccgccggacgtactcatgctcatggccctcgggacttcgatgggcagcatcatgttcacatcgatttccagctcgctggcccacagccgcaacaagggcgtccagtgggatgccgtacggaacatcacccccggcatcctgatcggcacgttctgcgggtcgttcctggcttcccacgttccggcgcggttccttcagctctttttcgtagccttcctcttcttcgtgatcacccagatgctcagcggcaaaaagcccaaaccgtcccgccacctgcccggtctcggaggcatgagcgtcgcgggcgggatcatcggcgtggtttcgagcctcgtgggcatcggcggcggcacgctctccgtgcccttcctgctctggaacaatctggacatgcgcaaagccatcggcacctcggcggccatcggctttcccatcgcccttgccggatgcttcggctacatcgtgaacggctggaacgccgcgaacctgccgccctattccttcggctacatttaccttccgagcctgttcggcatcgtcgtcgtcagcatgttcaccgctccgctgggtgcgcgcctcgcccagacccttccggtccccaaacttaagaaatgcttcgccctcctgctcatcgtcgtcggcatcaggatgctgctcaaggcgctgtaaacaaacggcaccaaaaggcggggagcaaccccgccttttttatgggcaacacccttttccggccccctcagacgcccggcgtcaggggccagaggatgaacacggcgaccgtccagaaagcatgggaaaggatgcaggggacgaggctgtcggttttccagtagagccagccccagaacagccccgccgtcagggcggccatgaccagcatgaggttccctgaaaaaacgtggacccccgcgtaaacgcacaccgcaaggagccatccggcctttccgccgaaacggtgcatgaaccagcgctggacgaagccgcgccagaaaacctcctcggcggggctggtgatgaaaagcagtaccagcgccatagcgagcggcgaaccttcatggcggatatcgtagatggccgatacctgatgcggcgcaaagcggaacagccagccggaaagcgtattgccgagcgcaaagatcgcatagaggagcaccgccgaaacgaggccgataagcacggcccgcccggtccactccgtccgtttcatcggaacgcccgcgaaccaaaacgagagcagggccagcaccgaggccgccgtacccatgccgatccagaaattgacccagtgcaggccgaaattcacccaccagaagaacgcggccagtgccagcgtgccgcacacctgtcccgctgtgggaatgcgcggcgtcatgcgaatatccccctgatcaggccctgcgccagttcaaggccgcgcggcagcagtattccggcaatgagcagcagcccgaacaggaaatggtgcctcgcggatacgccgtccagcgatacgagttcggattcgggcagaggccgggtcccgagcgtccgcagcgtacgccacaatcccggcgcgagcacgaaaggcaacaatccggacagcggcaagacgccgaatgcggcgagaagcagcaggacgccgtacgcgcctacgcacagggccgcgtacaggtacagggctttcctgcggcccagcaacatggcgagagtcgtgatcccggcctcgcggtcgtgcgcgatgtcgcggatgtcgttggcgtgcatgatgctggtgacgaggcacgcaataggcagggaggcgagaaagggccgccagtcaagggagcctccctggatgtagtaggcgggaagcgccatgagcggccccatgagcaggaataccataatcgggccgcaggcatggtatttgtaaggccagaagccgctggtgtagccgtagccgcccgcaatccccacgaggccgaaggcgagtatcggccagccgcaggcgaacccgagcacgatgcccacggcaaaggccacgcacaaggcgatgaggccgccccgccgcatggcttcggggctgataaggcccaggaggatgggcgattcgccgtgggcggaagcttcggtatccacgccgctccggtagtcgccataggtgttcagcatattcgtgcccgtctgaaccgcgacgccgcccaaaagcgtgagcaggaacagcccggcatgagcggcatccgaggcccacgccagcgccgccccgagcgtcagaggaatcacggacgcggtgaacgaccaaggccgcgtcgccaaaagccacttcttcatggaactctcctgatggacaatgagccgccctcaaaaccggggaaagcggcggagcaacgcttaccccttttgggggcgcgcattcgttcttgaacctatcatctttctgttattgtaaaatacggtcacagtatacacggtttgttttgttttaccacatttttttaccgtgcaggaaagactgctggaaccctctgcgcccctctttttgcgcatcccggccttcttgggagagttggcgtttgcatcgctcacgtatctcgacgcagtcgcgtttggccatttgttcgagctgccaatataacgtgatagtatcaaaacgccatatcgcttccatgaacggatgcatcccggaaccactatgcaacggcaatactgtatctctgcaacaaagaaaggctctccccgaatttgaaaggaacggcatatcctctcaaaaacggcatctttttcctcatcaggcgctgaacaaatccgtttttctcctgttccaaaatattttcatagcaaaaaaggtcttgaacggcctttcccacatctttttacggagttgcagatggttcttctgaggatccgtgtttacccggagcccgttcgctcaagaaagctgtgccacaaatggtcgatctttccttgttatagtgccacggcctgggtaccgtttggacaatgcatccattttcttcttgacccctatagccatctttctattctctttatataccaaaacgggttgcacggaaaaatcatgaacaagcgttacggcatccccctccattccattgttttgctcgccctcttgctggcggcggggggatttgcgcgcgtttttcccgtgcacccaacaaacgggtcggcccgtttcgatgcgccggaatacatccagcctctcctcatacaggaggtatgccctccgggttccgacgaggatgttccatccttcaagtcaaaagctccgccgccggacccgggcacacatctggcggcgtccgcctctccccctgtccctcctctgacgcagggccgcctgtgttctctcatccccgagtgcccccgcccttcatggcgcggcctcctgcccttcccccttcccccaccttccctttgatccccttcccttcgtcgtctgtgcaccccgcgtgcgggcctcccgagccttccctttcccagggatagtgtgcgggcaagtgcaaagagccatgccaagcattcctcctgtcgcgtccagcgtatgggccgggaggggcgccttcgcggataaggctgcccttcccttgcacccgttgaacggcacccgaaagggagcagcggagagcccgtctacacgcctgaacagggcgtaccactctcaaccccgtgaggcgacacatgcaatcaagaatccccacctatatcttctccctgttcatcccccttgcgctcgttatcggctgtttcggcttctataaccgtgtggaaccgcgcattttgggatttcctttcatctacgcctggatttttgcctgttttttccttgtatcggccagcatgtgcatcggctggctccttgatccccagtccgacaggaacaagaaacgggcttcctcttctcgcgcaccgaaggagaatgcatcatgaccgctctcgttttcatagcccttatggctttttcagtggtactggcttttatggcgaaacgcggcgtcattgccgattcgatggatgacgtcatggtcgcggggcgctctttcggcgcattcatggtctttttcgtcaccgtaggcgaaacctacggcatcggcaccatgatcggcgtaccgggcgccatctactccaagggcgtcagctattcgctgtggttcctcggctatatcctgctcggcttcgtggtgggctatttcatgaacccggcgatctggcgcatgggcaagatttcgggcgccatgaccatgccggactgcttccgttggcgctacgggagcaaggcgctggaagtgctcgtcgccgtgatctgcatcgtgttcctgctgccgtggatgcagatgcagttcgcagggctggccaccatcctgcgctacatcggctgggacatcagctacaccgtgggcatcgggatctccgcggcgatcgcctacctctatatcgcagtggcgggcatccgcgccccggcatggatcagcatcatgaaggatatccttatgatggcggccatcgtttccggcgggctcgtcgccatccacaacatgccgggcgggatctcgggcatcttcgatatggccatcgcccatttcccggataaagtcgttatcgacgcggagcccatcaccaaaaacgccacattcgtcttctcgaccatcatctttcaggcgctcggcttttgcgtgacgccgctccagtaccagttcatattcactgcaaaatcggaggacaccatccggcgcaaccagatcatcatgccgttgtacatgttcatgtacccgttcctgattgtggcggcgtacttcgtgctggtgacggtgccgaacctgaatgatccggactcgtcgttcatggcgctggccgcagccaacctgcccgaatggacggtaggcatggtggcggcgggcggcgcgctgacctgcatcctcgtcattgcggtgagcgccctcaatctgggcgggattttcagccgcaacatctggggcgtgttccgatcttccgtgtctcagaagcaggccgtcctcgtaacgaatatggctacaggggcgtctctcctgatcagcgtggtattggcggtgatgctgcccaacctgatgctcggagtcatcaacatcgcgtacttctgggcgacccaatgtttcccgatggcgctggcaacgttcttctggcgcggggccacccggacgggcgtattcgccggcctgctgacgggcgtggtcgccgtcgtcgtcctcacggaaacgcacgtgaccttctggggcctgaatcagggatttgtcgccatgactctgaacgcgctggtcatggtagcggtttgcctgtgcaccaacccggatgaagcgacgaacgaaaccagcaacgccctgttcgcctatgccgctcaggaagaacccgaagccgcggatctctagagcccattccttttgaaacggcacggaggcattggggaaggggaatttttctgaggaaagccccttcccctggcttgcggagcggttcgcgcgcccctttccaaaggcttttctgcgtggcgaatcctgtcccgcagcgttcctccccatccctcccaatagccctccccgtccgcttcgggaagaaattgacgcggcaattcgccgcggacaggactctttcttcctcactcggacatggacatgtacgccgtcaagggcgcatcctcggatgagcttcgtctttggcggcaactcccacgcctacagcatacgccgcggaaggtggagtttttcccatccatgccgattgactcgaccgggaaaccgtgctgaacttttcgcaacgccttctggagaatccgctatgccaatgcccgctatgccgtcattgtccgttgcccgtctgagttccgttttcgaggacatggcgggggcggcccttaaaaatgccgtagatgattccagctgtgtcttcaggacacaggggatcatcggagattggaccgccaaaaggacgttttggaatggcgtccattacggcattgaactcgctgacgggggaaaaagcatctgtgtggacctgccgcttgaggtcattcaaagcggcggcatacggccgggggatcgtgttgatgttctcggcattccggtggtgtacttgaagaaatccgtcgtcctcttcaaactccatgtccatgcggcctcggtcattgaggcttccgcgggagggcgcggcccagagcccgtaaagaatattgaagggacgatcagccatctcaaggaactcggctttaaaaggataccctttccgaaacgggcaaccgccatctccgtgatccattccaaatcccatgccgccaacgtcttcgccgacttcaagaacgaacttgatctgaaaagcgtcaacgtggaatccctgccgaccgccatgacggatccgtccgccatagcccgggcgatagatcaggcaagcggcaatgtcgtcgtgctgatacgcggaggcggagacgatgccgagttcaccacgttccagcatgacgacgtcgtcaaggcccttgcgcgcaaagcggcgcacaggatcaccggcctcgggcactacggcaacctgacgtatgcggacatcatagcggatttctgcacgacaacgcccaccagcgccggagcctacgtccgggagcagctgatccgtacctacaatatgcggcaaacggaaagggaagccctcgaagaacaggccgcgctcatcaaagcgctacggatcagcaagctcaaatggatgctcgttgccctcgcgggaatagccttggcggggtatctcgggtttttccgctagataaggataacggctaaaaaatcctgtcggacggttgaacaaacctccccagcgcccctttccggcattgtatcgggaaggggcgctttcgccttccaatacatggaacaacggcaagacgatgagccgtcgtgccttttcccggcggcctaccctcctcatcaggcagaacccaaccctgaccggaatcggcattccacaccatacgcggggcttcaccttgggggcatggcgggttcctctggactccgtggcagtttgtgaagaaaaaccacgacatgccgtcatctgtcgacaaaaggccgcgaaacgccttgtcaaacgctccggtttgacggaataatacatctaacgccaacgttcacaatatagactttatacattaatatactgtgttatttgtataaataaaaaaagaacccgtgtgacaccgagcacggatatccgctcgccgcatttgaaagatgccttgcgagggtatcccccaatacgtccccgcccaacggctgccccatccaaaggaggatgcatgtccaccatcaaacattcgcagatttccgcgctcctcgtcgatgacgacgccaagctgtgcgggctgctgcgggactaccttgaaggatttgggttctcactcgacgttgccgaggacgcttcgtccgggctggaaaaagccgttgcgaacgaatacgacgtgatcctgctggatatgatgctgccggatatggacggccttgacgtgctgcggcgcttgcgggaaatcggctccacgcccattgtcatcttctccgcgcaggatgaggaagccagccggattgtggggcttgagatgggcgcggacgactatgtgcccaaagccttttccccgcgcgagctgctggcgcgggtgcgggccgtgctccggcgggcgcagcccgtgcaggcggagcggaaggagcccgaagaggacggcgtggtccgggtgcgcggattgtggatggaccgcaagtccatgaaggcgcgcatggacggcgtcccgatggatctcaccgcgctggaattccgcatcctgttcggcatggcagcccatccgggacgggtcttcacccgcgagaacctgcttgagcttgccgtgggccgcgaattcagccggtatgaccgttccgtggacatgcacatctccacgctccggcgcaaactcggagacgatccccataacccggcctatttgaagacaatacgcggaatgggctataccctgcttcccgaagaggcctgacccgaattctaaacaacatgcggaaaacattccgctacccgttccgagaattctttttctttgcgtccccaaaggcagggagccattcccacgtcctttgcctctccgccaagcgtccgcttcggcgcggagccgccgggtcaagggggcgctgcccctttgcgggattccgaaggggcagcgcc

SEQ ID NO: 7490 - DNA, 4577 bp, Unknown
  gut microbiota DNA sequence
ccccctccaattccattcccccacccgctcccctaaaacatgccgatcttgcccagcgcttctctggcgatttcgcggcaaacgggatcttcgtcgcgcaaaccggcctgaagcggaccccgggccttggacgcaagctcgggccgagccagagcgaaacgctccacggcacggaagcaggaacggcgcaatacgttgttgtcacagaaattgtcgcccttgcccgtatcaatgacgtaggaattgaggataggataaaactcgtccccaaggcggcggtgctgggcgagtatctcggcaaaggcttcgggaatgccccagccgatgttgccggattcctcgttcatgtgccacatcagacgccggacgacgttgcgggcttcctcaatatgttcatcggccatgcgggaaacggctttcccgagcgcggaggccgcgcgatcggtcgcctcgccgccgaggggcagacaggaaaacaaggggcccaccaactcacgggcggggacttcgtccagctccttggcaaaatcgtcccatcccggctcttgcagccgggtgcggatcgtcgtctttaaggtacggaaacgtggctgcatggaaaacacctcatcgtttttgcggagtatgcccccaaaaagcgggagcggcaacgcgggcggttccggattcccgccgcgttttttcatatcgctgttgcaattcttctcttgaaggaataaatcgttcaagccattcggcaagctcctcacaggtttcggtgtcgtgttctgtctgagcttgactctccgaagctgagaaggtatacgtcactgatctacgtttccaaggagagtttccatgaaaagaacttaccagcccagcaagatcaagagagcgcggactcacggtttccgtgaacgcatgagcaccgccagcggtcgcgccattatccgtcgccgccgcgccaaggggcgtaaacaattagctgtttaacccggcctcgtcggcatcgactgctccggcggcccgatttcacactctgttatgatgagggtcgccgttttttttccaaacacttcgttgtgtttgttcgttttcgtgcatccggtgatccgtggcgcgtcggtatggccgtcaccaagaaaatcggaacggcagtcatgcggaatcgtgtcaaacgggtgctccgggaatgtttccggctgcatcaggccctattgcctccggccgtggatcttgtgatcgtgccaaagcgccacctcaaacctgaacagctcgatctcgctgccgcaacccgcgaattccttcccttgatcaaggaaatcggcgggtatgttgtgttgcgccgcgaacaaaacgcctgccccgacatctcccgcgacggaatcgccgcacccggcgggctcgaaccggaaacggcttccggagtcaaggcgtgaaacgcctctctctgcgtcgtctggcggtcctgcccatccgtctctaccagtggacgttgtctcccgtgcttccaccttcctgccgttaccatcccacctgttcagcctatgccatagaggctgtgctgacccacggcattttcaagggcagctggctcgccctgcggcgcatccttcgttgtcacccctggtcttcgggaggctatgatcccgtacctcccccacattcttcctctttcagccatcaggagcaactggatcatcatggacgataaacgtacttttctggccatcgccctggcaatcgccgttcttttggcgtggaccccgctggccgaacacatgggctggatccagccccagcagcgccccgcagccactcaggaagccacgcccgcgcccgctccggcggcgcagacggctgtcgcgcccgcgtcttccctgcctgtgttcacgccttcggccggtaccgacgtcaaggtggaaaccccgctctattccgccgtcatctactccggcggcggcatcctccgctcctttacgctgaagcattacgacgaaaccatcaaggccgattcccccaaggtgaacctcatttcgccggaagcgtcccagaccgcgcccctcggcctgaccgtcaacggccagccctcgtggagcaccggccagtggtcgttccagggttccgacctgaacctcaaggccggggaacagggcagcctgaccttcaccggcatcgtcgacggcgtgcgcgtcacccgcgtcatcagcttcaacgccgacaattatcttctgagcgaaaacatcctggtaggttccgccgaccaggcgccccgcaccgtccgcctcggctttacggtcgccgccacgccgttcagcaacggcaagtatgaccccacccgcctcgcgtgggacgccaacgaaagcttcaaggaagaaacgagcgccagcacgctcgccgaaaagggcatcatcgaacagggcgtcttcaactgggccggcgtcatgagcaactacttcatgaacgtcaccgcccccgccgatcccaacaacctgaccctcaagggccgcgtgcagggcgacgtgtggcgcctcgcgctcgaacgccccgatctgctcacgccttccaacggcggcgaagtgcccgtggccgtgaactggtggttcggccccaaggaccgcaccatgctggccacggctcccgatcacctgtcgcaggccgtgaacttcggcatgttctcgatcatcgcccgccccctgctgaccattctggccttcttccattcctttgtggggaactggggcatcgccatcctgatgcttaccttctgtatccgcgtcgtcttctggcccctgtcccagaagagcttcaagtccatggagcagatgaagaagctccagcccatgatgaagaagctccgcgaaaagcataaggacgacaaggaagccctcaacaaggaaatgatgcagctgtacaagacctacaaggtcaacccggctggcggctgtctccccatcgtcgtgcagatcccggtgttcatcggcctgtatcaggctctcctgaactccatcgagctgcgccatgcctccttcatcgaatacctgcccttcacgcacatcacgtggctggccgacctttccgcggcggacccgttctatatcacgcctctgctcatgggcgcgtccatgttcctccagcagcgcctcacgcccgccgccggcgatcccacccagcagaaggtcatgatgttcatgcccgtcatctttacggtcatgttcatcaacttccccgctggtctggtcatctactggctgtgcaacaacatcctgtccatcgggcagcagtggtggatgttgcgtaaggcataacggtttgcgcgaggagaggttctcatggatgatttcaaagaatttcaaggcaagagccttgacgaagcgattcgcgccgcctgctcgtacttcgacgcacagcgggaaaagctggaaatcgacatcatacaggacgccaaaaacggcatcttcggcctggtaggggcgcgcaaggccattgtccgcgcccgccgtgcacagctcaagccccgcgtagggtcgctcctggcacgcgacgcgcagcccgcctccgcgccgaaggccaaagccgaagacgcttcccgcgcgcccaagccccgtcagggacaggctccccgtccgccccgaggcaaccgggaaccgaagccgccgtttgaggaagacgactccatcggtaaccgtatccttcccccagtggaggaagacgactccatcggtaaccgtatccttcccgaggaaacggatatcgacgactccatcggcaaccgcgtcgatgagccccgcgctccccgccggccccgccgcaacgacggcccccgcatcccctacgaagggaatgaggacgccttccggcctcgccgcccccgtcccgagcgccgtgcgaatcaggatcgcctggatcgtcccgaacgtcaggatcgtccgcgcacgcctcgtcctccctacgagccgcgtcaggaacgccgccccgtggaagctccggcggagcaggacgtgttgcgggacagctcgctggagttcgatcaggacgaagccttgaacgaaggcttgccctcgaagcctttctccgagctggatcaggaaaagcttaccgccgtatctcaggaagtggccttcaagatcgtcagctccatcctcggggaaacgcccgtggaagtgaagatcatggagaaccgcgtggacatccatgtggactgcggcgatgactccggcctgctcataggccgcgaagggcagacgctggcggcgcttcagtatctgacctcgcgcatcgtcagccgccgcatggaagcgcctgtgcgcgtgcagttcgatgtgggcgactaccgcgaacgtcaggatgaccggctccgtgagctggcccttgcgctggcggaacgtgtccgtgccacggggcgtccctgctctacccggcccatgagctcctaccatcgccgcctcgtgcacatggcgttgcaggactccccggacgtgcagacccgcagctccggcgaaggccccctcaagcgcgtgatcatccagcgccgccgtcaggaacggcactagaaatattggggaggggaggaggcagcctttctgaagaaaggctgc

SEQ ID NO: 7491 - DNA, 24816 bp, Unknown
  gut microbiota DNA sequence
gggggggggcatcccccggagtgtctccacaccctatccaagagaacagtggaatgaacaggctccaggaattcctcgacaacccgcacataatcaccggaactgccaccgttgccgcagatccgcaacttaccttgatcgcggcgaacaaggccctctatacgcttgtcggggaaaccgccgagtcgtgccgccaacagggcaactccctccttccttggatcgaacaatcttccgccgtgcgcctcatcgggctcctcgccgggcaccctccccttttcgactgggaaggggtgctcgtccgcaaagacgccacctccgtccgcatccgcctctccggcacgcgcatggaaggcgtcctccacaaaggccagtaccccgtttacctttccgcctttaccgatctcgcctgcgtggaggagatgctgcgcagcgccgaatacgagcgccgtaaatacgccctcatcgccgacatttccgaagatctgccctttgaatacgactttgagacggataccatcgcctacacccaaaagtaccataaggtcttcgggcacgaacccgttattccccgtttccgcgaacggctgggcagaggcgaggccatcgatcccgtaagcgaggggttccgtgaaccttttctcgccctcgacgccgaaaaagcctccaccgaggccgcacccgaacggttcctgcccacccactcaggccgcaagcgctggttcgccctctacagcaccaacatcctggacaccctcggcaagcccgtcaaatccgtgggcgcgctgcgcgacatcgaccggcagaagcgcgaacagctcaggctccttgataagagccgcaccgactccatgaccgggctttacaacaaggtcacgaccgaagaggaaatccgcatcgccctgcgcgacgcaaggcccggcagttccggcgtgctgttcatgatcgacatcgacaatttcaaggacgtcaacgacagcatggggcacctcgccggggactccatcatcatggaaatcgcccgccagcttcggcgcaccttccggcaggacgacatcatcgggcgcgtgggcggcgacgaattccacgtctacatgcgcgacgtttctgaaatcgcgggtatccgcacacgcgcgcagtccctctgctcctccatccgcaacctgttcaaaaacagcaatatcgacaacgccgtctccgtcagcgtgggcatcgccgttaccgagcgccccatcgcctatgaggatctgttccggcaggccgacgtcgccctgtaccacgccaaagggaacggcaaaaaccgttacgaattcttcggccagtcctccggcggagacgccgacggcgtccagacatccgcgcccctcgccgtcaacaccgtccgcaacagcatcatggtggacatcatcgatatcctcttcagcatgtacgacatgcacgaagggatcgacaaggcgttgcatttcatcggaaacgccttgcgcgtggacaagattctcatatttgaatactcgctcgacgggaaggccgtcagcatcgcgcatgaatggtgctccgatccgaaatggagcaccaaggagcagctccaaaacgtccccatcgacaaaatcgagctgcccaaaacacgggactccagcggcatctattattgcagcgatttttcggaagtccccccggaagaaaaaacgttcatcctcgacgacaccatctcctcgctcctccagtgcgacatcgtgcgcgacgggcacgtggtcggccatatcggcttcgaggagcgcggcaaccgccgcatatggacgcagcaggaagtggacgccctcatcctcatgtccaaaatcatcggggagtacatccggcagcgccgctccgccagccttttgcgcgaaagttacgaatccacccgcaacatcctcaacagcctgcccaatacggcggtctacgtcatcgacgccaaccaccgcatcgtctacttcaacgatacggtcgcccgcgcgtatcccaatgtcaagctcggggtgacctgcttcgaggtgttttggggcaaatccaatatctgctccttctgtcccgtgacaaaacacggcggcggggaggcgttcaccaccctgcatgagcacccgcccttcaagggcatctgtgaaatttcggtttccggtatcctttgggaaaacaaggagcccgcacacgtcgtgctcatttcagagcgccttctgacgcccgaggagcgcaaggccaaggccaagcgcgattccttcgcccgcgccctctgcgagagctatcattatgtcgtggacgtggatctcggcaccggccattttgagcttctggccaaccgcaatgacctcgccaccgacacttcgggcgattacgccgcccatttcgagctgttcttcggccatatcctcccacagtaccgtgacgccttccgcgaacacttctccctcgaagggctgcgggcagccttcgcggcaggcgtaaacgacaggaatatccatctcgaataccagtttgccgaggaggccgggccccgctggcgtacccgcatcgccttcgcctatacgcaggacgacggctcgtgccacgtcctccaatgcatccgggatatcaacgagcagaaatgcgcggaattcacccacaggcgggacgaagaaaaccttcaagtagcccttcagaacagctacgccaagatctaccggatgaacctcgccgccaaccagctgacctgcctgttctgcaacaccaagctgctcgcgcccatcgatgtcagcggcgaattcgacaaggacatcatcacggtcatgaaaacccgcgtccatccgcgggatcgggtggtcttccggaatttcttcaccgccgaaaccatcctcaggaaactcgacgccggggaagagctttccgtcgaataccgcaagctcggccttgacgggacctatcactggatgctggcgctcatcgtgcccttgccgaccggcaaccggggagagaccgtcctcctcgtgcgcgacgtcaccgagaagaaggaagaggaaaacaactacctcctcgccctgcaaaacaattattccgagatcttctccctcgacgtcaggagccgcacggtcacgccgctgttctacaacagcgagcaggtgcccatcgtcaaggaggaagccaatttttccgcgttcgtcaagcggcgcgccgtcgaccgcgtggccccagaatccctcgaaagcgtgctcgatttctacgagcgccgccttttcggggaactggaacgcggcggccgcccggaatgtgaataccgcaagcgttcgtcggaaaacggcccttaccgctggatcgcggcctcggcgcagcctgtccccggcaacgaggggcacgcccttatcctgctgcgcgacgtcaccaagaagaaagaagaggaaaacaactacctcctcgccctgcaaagcaactatacggaaattttccgcctcgatcttgaagccgggcttatcgctcccctctattacaacagcgaacaagtcaccatttcgccgaccctgatgcccatcgaggaattcgtcctcgatcgtggcaaaaaccgcgtgcacccagaaaacctcaaaagcgtccgcaccttttacgacgtgccgaacatcatggcccggctcgacctgggcgaggccccacagctcgaataccgcaaacggcaggacgccggaaaaccctaccggtgggtcaacgccaccatccgggccatccccggagcgtaccaccatgccctgctcctgctgagcgacatcaccgaacggctcaacgaggaagccgatttctacaaggccctccagcacagctattccgaaatctacgaggtcatgctcgatacggattccatgcgcatcgtgcaccgggacgaagattccacgttggcgaaacccgagctgacccattcgtattcgcgggacacccgcaccatcgccaaccggtacatccaccccgatgaccgggagtccttccttgagcttttctccccggagaacgtcagcaggaaagtggccgacgatccccggctgtccacagaataccgcgtccttgccgtcgacgggacctatcactggatctcgatactggtgctgcccatgcccggatcgtcggggcgcctgctcctcctctggcaggacatcaacgaacgcaaaaggatggaggaaaccgccgcccggctcgaacgccgtcaaagcgccgtgttccgccagtccggggactgcatcatcgaaatcaacctgcgcacgtggcagttccaccgcaacgcctccgcgccgagcctgcccagcgaaccccgttccggcgactaccgcacattccacgccgaaacaatagcgatggtccatcccgccgaccgcgaacgcatcaaccgcaccaccacgcccaaagccctgctcgaggcctgccgcgcgcattcccgcaccctcgtcgatcagtatcgggtgctctttggcgaaaacgaacagttgtggctcgaaaaccgcgtgtttttccttgaagaaggcgacgatatgaccgcctttttcatcatccgggacatcacggagcagaagcgcgtcgaagaggaacgcgcccttgaggaagagcgctacaacatcgccctgcgcaacacgtataccgaaatctacgaaatcgacctcagcgccgatacgccccaccttgtctacgccgccgacacgcccatgatccccgtggatcacgacaagaacggcaatatccacactatagccgcaaccctcatccaccctgaggaccgggaacgcttcctcaccgctttcatcgggagcaacatacgcaaggagttcagcgaaggccgcatggaagtccccgccgaataccgccgccttggcagcgacggcaaatggtactgggtttccgccttcatcgttccgctgtgcgggcacgactcctgccgtaccgacaaggggatactcctcgtccgcgacatctccgaacagcgtgaagaggaacagcgccgccgcatcagcgagcagtacgatcacgccttgcgcaacatctacgacgagctgtacgaactgaacatcacgcaggacagctaccgtatcgtgtaccacgtgaagggcaagtatgtgaccccgcccgagcagggccgcctcagcgaatgcatcgatctcgtatcgcgcaacatgctctttcctgaagaccgcacccgcttcctcgaattctttaatctcgatgcgctgcggcagaacttcgcggcgggccgggaataccttatcggcgaattccgcaagctctggcacgaccaggagtaccactgggcgtcgatcaccatgttccccgtggcccagcccgacggcggcgacgagatctatctcgccttcatcatggatatcggggacaagaagcaggcggaggaagtcgctcagcagaacatcctccttgagcgccagcgcctcgacgacgaacgctaccggaccatcgtggagcagacggacaccctcgtcttcgagtggaacctcgaaaccgatacccgttacatctcgccggagatcgtcgcccgtttcgccgggaactacgaccaccgtgatctgatgcacgtctggcgggaagacctcgtgatccatcctgacgatctgcccctgctcaccgccttcctcaaggattcgcgcatccagcgctataccgagatgaccgcccgcttccgcaagcgcgacggcgtgtacatctggtgcaaggcggccctcacctgcctgcacgacgacaagggcaatcccaagcgctatatcggcacgctcaacgacgtcgacagcgcgacccgttccgtgctcgcgctcaagtaccgggccgagttcgatctcctgaccgatctgtacaacatgcacaccttctactcgcaggcggcacaggccgtgcacgcctaccccgagcgccgctacagcatcgtccgcatggacatagaccgcttcaaggtcatcaacgacctgtacggccttaaggaaggcgacaagctcctcatcgccatcgcggatctgctgcgggaaaagatggccgggacccacagcgtctacgggcgcctcggcggggatgtgttctgcctgtgcgtggactactcccgtgagcgtatcctcgccctcatcaaggaattgacggacaggctcgccgactaccccttgccgtacaaggtcgtgccttcgttcggcatctgcgaggtcgacaacatagacacgcccatcaacgtgctctgcgactgggccaacctcgccctcaagacgatcaaggggaattacctgaacagctacgccttctacgacggcaagctgcgcgagaggatccttgaggaaaagaagatcgaaaaccagatgcacgacgcccttctgcaggggcaattcgttctgtaccttcagcccaaggtgcacatcccgacatcgcgcatcatcggctcggaagggctggtgcgctggatacaccccaccgaggggctgatgccgccggaccgtttcatccccttgttcgagaagaacggcttcatcatccggctggatgaatacatctgggagcaggcctgcatcaccttgcgccgctggattgaccacggcctcacgcccacgcccatctccgtgaacatgtcgcgtatgcatatccacgatccgcgcctgcgtgaaaagctgctcgacctgatgcgccgctacgagctgccgccgcacctcctcgaactggaactcaccgaaagcgccttcctcgagaacgaaagcgggctcttcgaatccatgaaggccttgcaggccttcgggttccagttctccatggacgatttcggatcaggctactcgtccctgaacatgctcaagagtatgcctgtggacttcatcaagatcgaccggggattcctcaacgaggtcgtcacgaccgaacgcggcaagacggtcatccggttcagcatttccctcgcccgagaaatgagcatcaaggtcattgccgaaggcgtggaaaccgaggaacaggccgctttcctgcttcaggccggatgcgcctatgcgcagggctatttctattcgcgccccctgcccatcccgcagtttgaggcgttggcctttgggacagaacatcctttccccgtcgccccgagcatcaaagcccttgccgaaaaactggaaaaaggcagcacatgatggaatgcctcctgcggaaacatacctccggaggaggcctaagcccatagcgcaaccctatcagagtaccgccatttttctgttgccagagccataggatcccattagaatctatcggttggacgaacagtgtcataatatcccaccgacagaacgtcggtttccgccattcctcgcccgctacccgtaatcaggcctcctatgaaaaagaaactcttcaggacccacgccttcatcacgggtatcgtgcttattgggttcatttgtataacaatcattaactactgcacatacagcgtcgtcatcagggatgacatcaggaatatctcccgccttacctccctgaacatcttttcttccatcagtaacgaactgaccaagccgattttcgtctccctgacaatggccaacgacagcttcctcaagagctggctccggggagagaatgattcaccggaacaaattgcggaactgcaagactacctcaacggcctgaagaagaaatacgactacagttcggtgttccttgtttcggcaaagacgaatatttattatcattataatgggataaataaggttgtcagcagggatgactcccacgacgtctggtactacaacttcgtcgcttccgggatcccccaccggcttgaggtcgacaccgacgaaatggcccgcaatgagctgaccgtgttcgtggattgccgtatcgaagacgatcacggcgaactcatgggcgtggtgggcgtcggggtcaaaatgcgtgaattgcagcagatcctcgcctcgttcgagctcgatttcgatctgacggcgttcctcgtcaaccgcgagggtgtggtacaggtccacacgtccgacgccatgattgccaacgccaccatcgacgatctgttgcccgtatccgaataccgcaaaaagatcttcaccaagagccgtgtggaaagctcgtggtacaagtacaacgggcaggaaacctgcctcgtcacccgttacatcgacgatctcgactggtatctcattgtggaaaaagataccgccatcattaaggaatcgcttctctcgcagctttggaaggacatcctcgtcgtggcgtgcatcatcatcctgatcctgctgctggtttcggggaccgtatcgcgctacgacaaattcatgaccctgtttgccaccacggacaaactcaccgggctcatgaaccgggaacgcttcaatgccatcctgagccggaaactctgggaacggcctcttgtattcatgttcgacgtggaccacttcaaacacatcaacgatacccgcggccacctttggggcaatgaagtccttgcccgtgtggggcataaggctgaggaaatcgtcggtaaggccggttgcgtggcccgctggggcggggacgaattcatcggcttcatcgatgcgccgggcgacgccgaggaaaccttgagatgccttctggaaagcgtgcgcgatctcgataaccacgtcaccatcagcatcggcgcgacccgcatcaaccccgaagacgacatggacgccatactcatgcgcgtggacgacggcatgtaccgctccaaagccgaaggccgggaccgcatcacctacgtttgaagcccaagccgattgggaacctcgatcccataggcttcacggaaggaagccctatgctgagcaggaaaagcagatccgcaccgccagggaaaagccgaggcggacgccgtcatgatgtacggttccttcacgcaggatggcggaaatgcttattcaacacggcagatgcgggagccggatgttccttaccgatgacgcgccgcaggatcatggaagcaccgatggaggggaacaccacggcggaaacagtggcgctttccatcataacgtcggccccattcttccacatcccattcctccacataaagttatgttctcggcgtggctgatgaggaagttacgtttgcgtgtgctgaggtacaccatgccgcgcaggcaggacaagatcccggcgaatcaccgcaggcacatcggaaaccgtgctggcataagatgacagcgctgaggctgggggatatcgctgacgccatagcacctctgcgctccttaacgctcatctcctttgtaacaagttgataagcaatgctattcgtccctcccgttccgctgggaggccatgtccagcaaatatgcggccatatcgcagggttccatacgctccccatccatgtacggggcatggagcatgtgcgtccccggcagaacggaaacgcactgtgcggggcagccgcacacagccacccggatatcggctccggcctcgttgtccgtgagcacaatgctcccatcgagagcgcgcatggcggacagcacccccctgaaccatgccacgcgatcgtatccggagcggcatcccccgcaatacttcacatggagggaaggcatggcccgtcagcccctttccaccaacatggcgatcccctgcccgccgccgatgcacagcgttgccaatcccctgctctgccccttccgcttcagcgtatgcaaaagcgtaacgaggatacgcgcaccggaggcaccgataggatgcccaagggcaatggcaccaccgttgatattcacgttatcaaggctgaaccccagttcgcggcccacggcgaggaactgggcggcaaaggcttcgttggcttcgatctgatcgagatcggccactgtccaaccagccttttccaaagccttgcgggtggcggggatggggccaaggcccatcacgtcaggctccacaccggcactggcccagcccacaatgcgggcgagaggcgaaaggccccgttcagcggccagtccggcatccatgagcaccagagccgccgcaccgtcgttcacgccggaagcgttgcccgccgtcaccacgccgtccttcttgaaggcggggcgcaacttgccgagcacgtccatggtggtgccgggacgggggaactcatcacgagcgaagtcgaaggattttttcttctgctccacgtgtacgggcacgatctcttcatcgaacacgcccgcttccagcgcggctgcggccctctgctgggaaagcacggcatgggcgtccagttcttcacgggaaagatggtagcgggccgccacgttctcggcggtgatgcccatgtgatagtcgttgaaagcgtcccagaggccgtccctgatcatctcgtccacgagcttagcatcgcccatgcggcccccccagcgtgcggagggcaggacataggaagccagagacatgttctccatgccgcctgccaccacacagcgggcctctccggcgcggatggccagcgcggcttccgccacggccttgaggccggaaccgcagaccttgttcaccgtccacgccgggatctccatggggataccggccttgacggcggcctgacgcgcggggttctggcccagccccgcttgaaggacgttgcccatgacgacttcttccaccatgccggcatccacgccaccccgggaaagggccgcgcggatggccacggcccccagctcgacggcagggacggaggcgagagaaccgccgaaactgcccaacgcggtacgggccgcgcttacgatgaccacttcacgcataatgactcctgtccggcacagtgccggctctccaagggctttcgcccgatgatgctgcgctctttgcgagcgatatgttcccgacggcttagtagcggaagaacccttcaccgcttttgcggcccagcttgcccgcccggaccatcttgcggagcaggggcgcggggcggtacttgccctcgcccatctcgtcgcggagcagctccatgatggcgaggcacacgtcgaggccgatgaggtcggccagagccagcggacccatagggtgattggctccgagcttcatggcggtatcgatgtcctcagcggaggccacgccttcctgcaacatgaagaccgcttcgttgatcatggggatgaggatgcggttgaccacgaagccgggggattcattcacggtgaccgccgttttgcccagccgttcggaaagcgccttggcggcttcgtaggtttcgtcggaagtggcggcgccgcggatgatctcgatgagggccatgcggggcacgggattgaagaaatgcaggcccaccaccttgtcggggctgcccacggcggaggccacggcggtgacgctcaggctggacgtattggtggcgaggatgcagccgggggaaacgatgccgtccagcttcgagaaaatggaacgcttgacgtccagatcctccacggcggcctcgatgaccacgtcggccttggcggcatcctgcatgtccaacgtgccgatgatgcgggggagggccgcatcgcggtcttcggcggccatcttgccccgggccacgagcttgtcccaagcgccgacgatgcccttcagacctttgtcgacgaattcctgctttatatcgtagagatacacggtgaaaccgttcagcgcggccacctgagcgatgccgccgcccatggtccctgcacctatcacaaaaagggtctccataaccatctccttttcggcatgaaaccgttcgttgacctgtcccgtttccatcacccgaggacgccggacgcgatgaccatgcgctggacttcgctcgttccctcatagatctgggtgatcttggcatcgcggtacaagcgttccgcaacagatccttgtaaatagccgctgccgccgcatatctgcacggcttccgaagcgcaccacacggccgcttccgatgccacgagcttggccgccgaagcttccgcgcggaaccttttccccccgtcgcgcaggcgggccgcatacagggtgagctggcgggcggcttccaccttcgcccacatgtccgcggccttccagcgcagcccttggaagtgctccaaggcgcggccgaactggcggcgttccttgagccgcacgcatgcctcgtcgaacgcggcatccgctatgcccaccgcctgcgcggcgatgcccagccgcccgccgtccagcgtttccatggcgatgcggaacccgtcgccgggcctgccgatgagacggtcggcggggatgcagaggttgcgcaaaaagagttcgcaggtctgggcgccgcggatgcccatcttgcgctgaggggcggagatgagcaggccggcgtcgtcactgcacaccacgaaggcgctcaggccttccgtgccctgcccgccggtacgggcaaagaggatatagatatcggccctgccggcattggtgatgaatatcttgtgtccgttgatgacgtagaagccgccgtccagctccgccgtggtggcgatggcccccacgtccgacccggcctcgggctcagtgagcgcgaaggcccccagcttgtcgccgcggagcatgggacgaaggaagctttccttctgcatgggcgagccgaaggcatggagcggatggcaggcaaggcccacgtgcgtcgcataggtgacgcccacggaagggcaggccttggacaggcgttccacacagcggacatacgattcatagctggagccgcgcccgcccagcttgggaggatagggaagccccatgaatccggcgtcggccaaggctcggacagactccccgcagaaaaggctttcctcatcacagcgctcggccataggcctcacggtcctcgtaatgatctcatcaaggcgttgccagagcgttgcttccattcagtccatcctccgagggttgcgcagcggaacccgatcagcggcggcgattgacgaaggcgcgcatcctgtccttctgctccttcgtggagaaacagaggccgaacgcctgcgcttcgtacgagaggccggattcgaggccggattcgaggccatgacgtatgcagcgtttggtctgctggacggcacagcgagcctgacgggcgatgccttccgccagcgcggaaacttcagcggcaagggcatcgtgggggacgatcttgtcgacgaggccgatgcgcagggcttccgcggcatcgatcatgttgcccgagaagagcagcagggaggccgcgcccctgcccaccagacggggcaggcgctgagtgccgccgaatccggccgtgatgccgaggccgacttcgggctggccgaagcgggccttttccgatgcgatgcggatatcgcaggcaagggccagttcacagccgccgccaagggcaaagcccgggatcatggcgatggagggctggcacagggcctctatcttggcgaataccttttgcccaaaggcaccgaaggccataccggcttccgcttccatggactgcatctccgtgatgtccgctccggcggcaagggccttctctccggcccccctgacgacgaggacgcggatctcggcatcgccgtcgatcgcggcaagggcgtcgtcaagttccttcagtacggcgccgttcagcgcgttcagccgatcgggacggttcagcgtgaggtaagccacgccgtcctttttctcaaaaaggatgttctcgtacataacccccttccctcgcttcaagcagtggcctgccaaggccccgaaagccgcggcaggcgttttcaaatcagaacaggccgtcgggatcgatgccgcacaggcggcgtgcaagggccttcttcgcttccatgttggcctgacggccgatcatgatgcgctgggcctgcggcgaacctgcgccgtgcatggattcggtgaggtagcccaccgccacggaaccgatggtcatggcctcgatgaggcggaggatgcgctggcggtcttccacggaataccgggcatcgcccaccatgagtttgcggcaccattcgcccacttcgtcggacgtgaaatcggcatcggaaggcatggtcaccatgagccccccggcgatgtcctgcgcgaggcgggcgatctcgtaaggcaggcgggtgacgttctgcttgcacacgttggcgaggagcatgtcgatctggtagttgccggcccgtgtgggggagccttcacaggaacaggcgatgccgcaggagaacagcgtctcgttcagatggatcatctcgatgatcttgtccttgatgtgggacgccttggcgcagccgttgcattcggcggccgtctgggacgcgccgatgagcacgtcgccgtttccgaccttgcagccgccgtaggactggcggtgatagccggcgaaacgttccaccaacatgccggtgaaatcgatctcgcccaacatgtacacgttcttataaggaacgaaggtatcttcaaaaatgatgatgacttcctggccgccgtaattcgcgttgcccacgtccaccttgctggcttccagcttgcgggtgtcgctggcctgacggccatagatgtaaaggatgctggggtcatcggcggggacggagaaggccacggcatagtcccggtcttcctcgcgcatggtctgcgtgggcatgacgaggatctgatgggagttgagggcgccggtctggtgcatcttggcgccgcgcaccacgatgccgtcctcgcggcgttccaccacgcgcaggaacatgtcgggatccttctgggcgtagggggcgaggccccggttgcccttggggtcggtcatggcaccgtccacagtccagtccttttcctgccattctttgacgaattccacgaaacgccggtggtattcggtgccgtggcaggcatcgatctcgtaggtagtgctgaacacggcgttgagggcgtccatgcccacgcagcgctggaagcaggcaccggtcatgctcccgcaaagccgctgcatcttcaccttgttcaccagatcggccgtggactggtgcagatggcagaagcggttcacgggcttgccggtaaagctggaggacgtcaccatcagctcgcggtattcgggcatctcggccagcttgtaggtcatggcgcagcagttgatggaagggcggatcaaggggtggccgacgcaatcctcgatcttctcgccaaaggcataaactctgcgggggcgcagatcacggagggactggatgtactcctcggcggtcatcataacgcatatcctgatggtcttcgcgaccgctttcggaacagcggcggcaggtctatgaaaacgggcccccgcgaaggagcccgcacacgctcggtcagctcttatggcagaagctccagccgccgtcggactggcacatgggcatgagctccatgtcgcacacgtccatatgggcgggcaggttcacagaccaccacacggcttcggcgatgttttcaggggtcaggggatccaagttttcgtaagcggcttccgaagtcttcaggtcgcccttgaaacgcacggccagaaattcggtgtgcagatggcctggcttgatgttggtcacgcggacgggagtgcccagaaggtcgcagcggagcatcctgctaaaatggttcacgaaagccttggtggcaccgtacacgttgccgcacttgaaagcgcggttgccggcgacggagccgatgttgacgatgtggccggagccgcgttctatcatgccgggcaggacgcagcgggtgcagtacagcaatccgttgatgttggtggcgatcatttcgtcccagtcgtccatgttgcccgcctgagcggggttctggccgatggagctgcccgcgttgttcagcagcacgtcgatgtccttgaacccttcgggaaggttggcgaacatttccaccacgacgtcacgcttggcgacgtcgaaacagagggggaggaaatctccgcccagttcggcggcgagttcgtcgaggcgggactggcggcggccggtgccgatgaccttccagccttccttgatgaagcggcgggcggtttcgcggccgacaccggaggtgacgccggtgatgaagatgattttcttggacatgtctgactcctcggaaaggttagaagtgggtatgctgcgacattggggagggccccccggaagccgccccgaacggctgcggcttccgggaatggaggaaggggggctacagcatcttgaaggtcgcggtgaagttttcttcgccgtacttttcagcggtggccgcgaacacctcacgggcgcgggacatcatgggcacgcgctggccgaaggattcgcacatctcgatgccgaggcgcacgtccttgaaggccagattcacggtgaacaccggatgctcgaagtcttcgtcgaaggtgccggaagcggtgttcttgaactggaaggagaaggccccggaattggagatctgttcgatgaactgttccttggggatgttggcgagcttggcgagcttgatgctttcggagcagacggcgttgatgctcatgcccatgaggttctggatgagcttcagcgcgcagccggccttcacgtcgccgatgtaggcgggcttgcccatcttcttgagcaggcattcctcatacttgtcgtaggtggccttgtcgccgccgccgaacagggggcaggtgccgtccgcggcaaaggcgggacccttgcccatggggatgacgaggtacttcttgcccagcttggcggcttcggcttcgagcatcaccaccgtttcgatgtccaaggtggacaggtcgaaatgcacgccgccttcggggaggttttcaaacacgccgtcgggtccgagcagaacgcccttggcgtctttgggcatgggcacacaggtgatgcacacgtcaacctgggcggccagttccttcacggtggcggcggaagaggcccccatgtccacgaacttctgcacgttggcggggttgatgtcgtacaccaccacgtcgatgccgttcttgacgatgttggaacagatgccggcccccattttaccgaggccgataaaaccaactttcatggcaaactcctagtcaattacatggttccgcagcagttgcgccgtcattttccgcatccatgagaaggcggtacacggagatgtagtcttcctctccgtagccggcttccgatgcggccttgtagcgatccctgagcatggcgaaggcggggcaggaaactcctgcctcttccgccatctccacgccgaacttcatatctttccaagcgttgtcgagcgtgccgcgcatgggcaggaaggcttcgtcgaacaccttgtgccccgagttccgcatctggtaggaccaggcgccggtggactttgccccattgaggaaggcctcttcggagaggcccatcctcttcgcgaggaacacgccttcggtaaggatgacgttgttggaaagcccgatgaggttggtgatgagcttgaaggcgcaggccgctttcacgtcgcctagataaaacacttcccctatatcggagaggaacgccttatcccgctcatacacatcctttgagccaccgaagaacaagggggactccccggcctcggccgcttcgggccccttgcccatgggcatgtgcacgtagcggacgccgtgcctctcggcttccgcgtccagagcgaggacggactcgatgtcccacgtgcccatgtcgtagaaggccataccctcccccatgcaggagaacacgccgtttgcgccgcccgccacggccttgagcgcagccacggaagacaggcagctcatcaccacgccagcgccgcgggtagcctcctgaggcgtggcaaaggcttccgcgccccatccggcgaccttggccgccttttcagggctgcggttccatacctgcagggcgtatcccttgttcagcaggttgcggcacacgccgctccccatgctcccaagccccaaaaaacagaccttcatggcatcctctggcttacagggttctcaaaaggcggctggcggccgtttcgatctcgcccagcatgtcggagctggtcatggcgccccaacacacatccaccagcttgtcctgcacgatatcggtggcctgatcgagggtgagcccctgattgatgacgccggacacgtcgacgtcgatattgtcgcgcatggccttcacggtcatgggattgcccgaaatcttgatgacgggggccacgggatggccgatgcagttgcccttgccggtggagaagatgacggcgtggcagccgcccgacacgatggcggtgaggttctccacgccgggggcgggagcgtccatgatgacgaagcccttcttcgtgggacgttcgccctcttcgaggacttcgaccagaggcctggtgccacccttcttgatggcgccgagggccttttcctcaatggtggtcaggccgccagcgatgttgtcgggagcggggttggcgcccatgatgtcgagattgtgctcggcggcatagtcgagggtgcgctggatgatgcccttcaccttggcggccacttcgggggtgacggcgcggcggccgagcatctcctcgccgcccagcagttccagcgtttccgacatgatgacggtgccgccggcgtcgatgacgcggtcggccaaacgtccggtcaccggattggagacgatgccggaagaaccgtcggagccgccgcattccacgccgaggacgaattcgctccaaggcatgggttcggggcgcaggcggcccgcatcgtgaagcatctggatggcggcctgagcggcgcggtacgccacttccacggtgccgccctgatcttcgatggagaagcccaccacgggcttgccgcccttcgcgatctcgccggaaatatattcggcggtctgatcttccaaagccacgacgatgacgccgtacacgttgggatgcagggcggtattgatggagaggaggttgtgcagggcaaggtcttcgttcatttcgccgcggccgaacccggggcaaaaaggcacgcaacccttcaccagagagcatatgcgccgcaccgtaggattggcgttgtccatcgtagcgatgacggcgatatggttgcggatgccgaaacggccatcgggacgcctgtaacccatgatttctggcagcatgacagcgttccttattcttttacggtgtggcgaccgctgacgacgttatgcacgtgaacgtgctcgccgggggcgatatcggcggtcgctatccccacgggctctccatatttaacgatctggccacccttggggatagccttgatggcgaccttatgggcaaagggaagctcgtctttggcacaaaccatcttgcctcccaccgtaaattcgcttcccacagccaaggaaggggccatgacaatggcaatgttatctttggcgtgcatcataataacgtgttccattaggcaaccttttcgttgagtgtatagagagcggatcggtttttcgatttctcttttccagcactttgtgcaaaaggtttgccaacatcccctttctgccgaaaaaccttcagccaggcctcgtcaatcctctggaaaagtcgcaagcatcactgatcgccccgccgaaagccctgcgtgcggcatctttcatttcagttcgatgcatttcactttgaaccatttcattttgatataataaaagaaccagccttccaaagggcttctcccggcaccccaaaaaacgctatccatatctttccttttctaaaaaaagttttctatatataacaccagatagttccattgtttttttattccggatctgtcacagtaagcgattgaaatttcatttcatggaatttcatatgtatactacaaagtccatccctttgctgatggtggtcgaccaacaaaaagaattaaaaaacattgtatatttgccatcctgtaaaaccgtatcagccctatttatggcagagcctttattctttatgtcccgttgcatcctttggcacgatgaatcgatgattcaatatcgatatgaacactttatttattatcgtgttctaaaatcatattgcttcttgataaaaaaattccttttatatgcaaaaaaaccacatcgtgtaaccttgaagcgtgtagcaggcaaaccgcttttcgcccctatcatttttgatagtttcaattttgaatatttcattttaaaatcacaaaccattcctccgcctgaaatccttcccgagcgcatatccgaaccacttcaaaagccctgccttctcgcgataccgcgcgcaaggcccttcctctgcggccatacaccgggcctgcgcccgttgacacagaatttgcaagaagaaaaacacaagcggcgttccggctgtcgaaccagacctttcctcgtcccgaacatacgaactctggaggttgtcatgcagcgagttgaaagaagcgtttttggtgaactcaacggtaaaccgatccacctgttccgtctgtccaacgccaacggcatggtggccgagctcctcgaattcggcggccgcatcaaggccctgtgcatccccgacggtcagggcggcctggacaacatgagcgtagggtacgacaccttcgagccctaccatgcccgcttcaatccctggctcggcgccctcctcggccgcaccgccagccgcgtcaccggcgcgcggttccagatcgacggcaagacctataatctgtccgccagcggccccgccggcagcaacatgcacggcggcttcgtgggcttcgacagccgcgtatggaccggcgaagccgacagcgacgccaccagcgccacgctgaagctcacgtatctctctcccgatggcgaagaaggctatcccggcaacgcttccgtgaccgtcacctaccgcctcgacgacgacaaccgcttccacatggactgggaagccgtcaccgacgcccccaccatcatcgacatgtcctctcacgtgtacctgaacctcaacggcttcaagaaccgtgacgtcatgaacgaatacctgaaggtcaacgcctcgtattatctggaaaaagatgccaccggcacccccaccggcaacttcatccccgtggaaggctccgtgttcgacctgcgcacccccaagctgatggaagaactctctcagggcgcggtgtacaatcccatcatggctctggacggcgaaggcggcaccctgcgcgaagtggccgaagtgagcatcccggaacagggccgctcctacaccctgcacaccacggcccgcgccctgcaggtgtacaacgcctataacatggcctcgttctatacttcccgcgggctggaatcccccttcgccccggcccccggccttgccatcgaaccgcagaactaccccaacgccatcaacatcccctccatgccgtcgcccattctccgccccggcgaaacgtacagcgagcggcagttctttgccttcaaatggtaagcagttagcataaaaggatggaagctttgaagagcttccatcctttcatgcttttgccggtcatcaatgcagcaccatcctgctaggaggctcccatggccacccggaacatcatcgatctcagccagcccatcaccccggcatcgcctgccccttgcgatccgcctgtgaaattccgcacggtggccagccacggccccgattccccctaccagatgatgtggttcggcatgaccgatcacacgggcacgcacatcgatgcgcctctgcatttcgtccccggcgggaagcccatcgatgaagcagatctctccgccctgtattccatgcccggcgtcttcctcgacttcaccgccgcatcccccttccacaagatcgatgcgggcgacgtggaacgcgagctgaagcaatacggctccatcccggaagacgccttcatcatgctccacaccggaacgggttggtattccaatacgcaggaatatttcaattccccgttcatcacccctgccgctgcggaacgcatcatccggctccgtccggtggctgtgggcgtcaacggccccaccgtggacgaccgcaggggggaagggcgccccatccaccgcgccttcctgtcccatggcgtgcatatcatcgaaggcatcgtgcgttccgaacttctggcaggaaaacgattccactgtacggccctgcccttgaagctcgccggcttcacgggttccccgatacgctttgtggcggttctggaagagcccgcctgatctggcaccttgccgcccctgcggatgcccatacacggaatactgaataaaaaagccctcatgacagagggcataccaacaggaggttccatgaagccggattcccctttccgcaaagcaatcaacgccatcgaagtctgggtcagcgtcttcgccatgctgctcctgatcctcgtcgtctccattcaggtgttctgccgctacgtgctccaggactccctagcctggacggaagagctggcccgttacctcgtcatctggagcgtgcttttcggatgcagtttcgccatgcgcaccgactctcacctcgagctttccatcctttccaacttttccggcccccgcatgaagaagtacgtcaagtgcttctcctgcatcgtgtgcctcgcgttcagcatcatcatggtctatgccggcatggagtccgtcatcaacatccactggagcgaacagctcacccccgccatgcagctgcctgcctggatcatctggatggccatgcccgcaggcttcggcctcatgggtatccaagccattctgcgctgtgtcgatgagatagcgaagaacgtttaacatagcataataaaaggaaataatatggatcctgttcttcttaccacattcggcaccctcatcgtcctgcttatcttcaccgtacccatcggcgtttccatcggcaccgccgtcttcatgggcatgatggtgggcggccttccccccgtgttcctcgcacagaaaatgtacagtgcgctggactccttccccctgctggccgtccccttcttcatcgtggctggcgacatcatgcagaaaggcaccatcgccaactccctgctggccgtttcccgctgtctggtcggccacatcaaggggggcatggcccacatctccatcctcaccagcctcttctacggcgcgctgagcggctccgccgccgccaccgtggccgccgtgggcggcatcatgatccccgccatggagaaggaaggctaccccaaggagttcgccaccgccgtgaactccacctccggctgtctcggcatcatgatcccgccgagcatcccgctcatccttttcggctccaccgccggcgtttccatcagcgacctcttcgtggccaccatcgttcccggcatcctcatgggctgcgccctcatgctggtgagctacgtcatctgcgtgcgcaggaagtacggcaaaaccgtggcccgtgccaaattcgcggaaatgatgaaggccctgtacgaagccaagtgggccatcatggtgcccgtcatcgttcttggcggcatctacggcggcatcaccacccccaccgaagccggcgccatcgccgtggtctacgccctgttcgtggaagtgttcatcacccgttccatgacgaggaagctgttcttcgagatcatcaagagctccgtacgcatcaacgccgccatcttcctcgtggtggcctccgccacggcactcggccagatcatgatgtactacaacctttccgccgccgtgctcgataccatcatgggcatctccacgagcaaggtcgtcatcatggcgctcatcctcgtcgtgctgctcattctgggcaccttcctcgaagctgccgccatcatcatgatcgtcactccgcttctgctgcccgttatcaatgccattggcgtggatcccgtacacttcggcatcatcatgctcaccagcttcgccgtagggggacagactcctcccgtgggcatgacgctcttcgtgggtgcttccatcgccaagatcagcatcgaacgcctcagcattgcgagcatcccctacattctcacactcgtggtcatgctggtcatcatcgcttttgtcccgcagctctcgctctgtctcatctaagtccttaacgttgggaaaccattctcacaaactgtctggaggatctctatgaaactgttcaaggccatgctctgctccgtcgccgctctgagccttctgctccccgccgcccacgcacaggctgctcccaccgtggtgaagatcgccctcacccagcccacgggccaccccaccaccgacctcatccgcggccagttcaaaaagaccattgaagaaaagaccaatggccgcttccgtatcgacgtgtttgacaactactccttcggcaactttgaagccgtggtacagggcctgcagttcggcatgttgcagttcgctcaggaatctccttccaacctgtccatctacgatcccaaactgatgatcttcgaccttccctacctcatgcccgactacgacgccgtcaatattctgctcgacggcaaagttgggaaggaactgagccgctcccttgaaaagatcggcatcaagggcatgggctggatcgccctcggcacccgtttctactggatgaacaagccattccacaccatggccgaagccaagtccatgaagatccgcgccaccgcttccaaggttcatatcagtatgaccaaggccttcggcatgaaccccacccccatggcctggagtgaaaccttcaccgctcttcagcagggcaccgtggccggcgtggacgttgacatccactccgccgtttccgccaacctgcacgaagtcgccccccatctcgtgctctccggccacttctataccccccatctgttcatggcttccgccaagttcatggactccctgtctcctgaag

SEQ ID NO: 7492 - DNA, 2032 bp, Unknown
  gut microbiota DNA sequence
agaaacattcgctgaagtccagaagatccagcgtagtgccatccacaccggagaacagaaactcatcgaaaagctgcgcgctcagggcgtggacgtgatcgagctctcccccgaagcccgcgctgaattcatgaacgccggcaaggccatctggaaggacttcgataagcaggtccccccgtccctcatccagcaggtcctcgacggctacaaggccgctggtaagaactactaaaccatataaaagctatccggcgaggagaagctccgttagggagcttctcctcctttgtcgtttctgcttaggcagttgaaaagttagcgtattcaggtatcctgcatccattcaccaactgctccctcatccctgccgagtaccccctatgcctaagcatcccttcatctgtgccatcgtttccgacaacagtgcggcagagcagatagagctctgccagcactccatatcctcgcctgtccgaatcatcactacggaatccagcaaatgcatagtagccacgaagcgggtcattgaggaaggtgccgccgtcatcgtcagccgcggcagcgtgtggagcacgataaaaaaggcttttcccctcgtacccacgctacagacacccataacatgctgtgatgccattgaattccttaccaaggcaaagcagtacgacacgaacatcggcgtggtttcctttccttcccatatcgccaagatggtcacggtggccccacacctcggggtgagcctcaccgtccatcaggtcaacaaccccgacgatatcgaaaaaggctgttacgagatgagggacaaggggatgaaggtgctcgttggcggcggtcacgccgtgcagtgggcacagaaactgggactgcatggcgtactgcatacggtttccgcggacggcgtgatacaggtgctgaacgaagccgaccgcatactcaacgccatcatcagcgaacgttccaaggacgcccgcgtgcgcaccatgctcaacgcactgaaagacggcgccatctcgctgaacgaacagggcaagatactggaatacaatctgcctgcccaaaagatgttcgccaacggcgaatccaccatgaaaagcatccgcacctttttgcaggatacgggcatcatcgaggcggtacagcagcagctcacgtggtcgggagaaagcaagaagtacgaaaaaaagcagtatctctgcaatatcatccccgcctacagcaacgatatctactgcggagccagcgtgatcatccaggacgccagccatatccagagcctcgaacacaagatgcgccgggaactgcatgccaaggggcatgtggcgcgctataccctcaaggacgtggtagggcattccgcggagatgcgcagccttgtggaacacgcggagctttacgccaacagcccttcttccatcttcatctacggggaatccggaaccggcaaggagatcttcgcgcagggcatacatatggcaagcccgttcaggaacggcccctttgtggggatcaactgtacggccctgcccgaatcccttctggaaagcgagcttttcggctatgccgaaggcgccttcaccggcgcgaaaaaaggcggcaaagtgggccttttcgaaatggcgcacaacggcaccctcttcctcgacgaaatcggcgagatccccacctcggtgcaggccaagcttctgcgcgtgctcgaggaaaaaatcgtcatgcgcatcggtcaggaacgctatatccccatcaacgtgcgcatcgtgtgcgctacgaacaaggatctggcggaattggtgcggtgcggcaagttcagggaagaccttttctaccgcctgaacgtgctccggctcaacctccctcccttgcggaaacacccggaggatatcgaggaactcgccgacagcttcctcagctggctgccccagtcgctctccctcccccggccccagatcagccccgaggctctggccgtgctgaagctctatcatttcccgggcaatatcagggaattgcgcaacgtcatagaaaggct

SEQ ID NO: 7493 - DNA, 1445 bp, Unknown
  gut microbiota DNA sequence
ctgagctataccccctgataagtggtgggcctggaaagacttgaactttcgacctcacgcttatcaggcgtgcgctctagccacctgagctacaggcccctgacgttttcttctcaaagagcatggcgttaagcccttgttccttgcaagtgaagagcgaattgggaatttttcctataaaggaggtgatccagccgcaggttcccctacggctaccttgttacgacttcaccccaatcatcggccctaccgtagacggctgctcctcttgcgagttagctcaccggcttcgggtaaaaccgactttcgtggtgtgacgggcggtgtgtacaaggcccgggaacgcattcacccgagcatgctgatctcgaattactagcgattccgacttcatggagtcgagttgcagactccaatccggactgggacgcgttttttgggattggctccacctcgcggtctcgctaccctttgtgcgcgccattgtagtacgtgtgtagccccaggcgtaagggccatgatgacttgacgtcgtccccaccttcctccccgttgaccggggcggtctctccagagtgcccagccttacctgctggcaactgaagataggggttgcgctcgttgcgggacttaacccaacacctcacggcacgagctgacgacagccatgcagcacctgtcttagggctccccgaagggcaccccttcatttccgaagggttccctagatgtcaagcctgggtaaggttcttcgcgttgcatcgaattaaaccacatactccaccgcttgtgcgggcccccgtcaatttctttgagtttcagccttgcgaccgtactccccaggcggggtgcttatcgcgttagctacggcaccgagacatacatcccagcacccagcacccatcgtttacagcgtggactaccagggtatctaatcctgtttgctacccacgctttcgcacctcagcgtcagttaccgtccaggtggccgccttcgccaccggtgttcctccagatatctacggatttcactcctacacctggaattccgccaccctctccggtactcaagcctggcagtatcaaaggcagttccacagttgggctgtgggatttcacccctgacttaccaagccgcctacgtgcgctttacgcccagtgattccgattaacgcttgcaccctccgtattaccgcggctgctggcacggagttagccggtgcttcctttgggggtaccgtcaagccctcgcattattcacacgagggggtttcttcccccctgacagaggtttacgatccgagaaccttcatccctcacgcggcgtcgctgcgtcaggctttcgcccattgcgcaatattccccactgctgcctcccgtaggagtctggaccgtgttccagttccagtgtggccggtcatcctctcagaccggctacccatcgt

SEQ ID NO: 7494 - DNA, 848 bp, Unknown
  gut microbiota DNA sequence
gatatacagcgctccaaccgccaacgtgtgacggcctacctggggatagcctgtgcgtttcttacagttttatggatactgtctggggttctggaatttttgcggcccaatatgctggcctatatgatagcgctggccgtgtgcatgggcctgcaggcggtcaaccggacattcccgggaaaaaacggcctgctgctgacctggctgatgtacgcctttgaggctttgctctatgtgctgggcatctatctgggcatccatccttctcccgatactcctacggtgagctttattgcgttcttgctggcagtgccgctgctctttgtcatgcggcccatccagcatatcttgaatgtcgtctttttcgatggtgttttcatcctgacctgctttttgttcaagagtaaagagacactcccggtcgatattctggacggcatggtgtttggtgcggtgtcctgcatcatctccaccttcatcatgctctcgatgcacgaaaatttttccatccggcacaagctgctgggcatcgcggagacggacttgaacgtcggcctgaaaaaccgcaacgcctacgagagccagatgcacgactacccgatgcactgcagcagcacgctgagctgtgtttatctggacgtgaacggcctgcatgagctgaacaacacccggggccacgcggcaggcgacgagatgctcaagaccgtagcagccaaggtgcgggacatcttcggcgaaaagtacagctaccgtgtgggcggcgatgagttcgtggcctttgcgatggacaagagcgccgaagagatgcgcgcgctcatccacaagctggtgcaggaggtggacgaggc

SEQ ID NO: 7495 - DNA, 259 bp, Unknown
  gut microbiota DNA sequence
caaggcttcatgctacggccctccgtgccatgatcttgaggtagttggcctttgccagaaacgaccgtgcggcgttctcgcacgccgtggccagcgtttcggcggtgtagtgttccgcgcaggacgagcagatccagaagtcgcggtgccttctgagcctcacggccttgtcgtacttgagcttgcagtgtgggcagaagatggcggcgctcatgcgaccctccttgcgtcgagcttttcaatccacaggccgacgact

SEQ ID NO: 7496 - DNA, 396 bp, Unknown
  gut microbiota DNA sequence
cacggtttcgcgcttcccctgtcgaagtttgcggcctgcctgacgccggacatttccggggaggacgctgcgggcatcatcgggcaggtgtatgcggcggaagccgaggcccgcgaagagagcaggcctacccccgtcgtcaaacctgcggaaccgcgccccgatccgttcattgagcaggaggaggggttccccttcgccccgcccgtgaacgtggcttgtaccctgaccctcagcgtcaagtacgcgccgaagtatgaggataccgtacaggaggcgcttgccatgctccgcacggtcggcgtggtcactgtcttctaaccttccggcgcccacctcccgcgccgtccccatagagcccgccggggggcatgtaccccggcgcaatgccaatcc

SEQ ID NO: 7497 - DNA, 8707 bp, Unknown
  gut microbiota DNA sequence
gaaaaagggagggctttttttgaggggactattgtatcaatgagtagtcttttttatgaaactgtaaaaaaatattatttattttacgtaattattgtagttatgaacagaatatgctcaggattatgaacaaaaagtgagcagagcctttcatcaaaatactggatgcctcatggaactgtaaaatttattattttatttcagcatgattaatatgttatgcacagaaaagaaacagagttacgaacagaaccagagtggcattttcctttgggaggggggggtggaaatgccggaagaatgcaacaatataacatataattatatcatgttatttaaatgtgttacctattttacaaacagtatatgaacaacattatgcacattagtggagagaaggaacaatatggcgtatcccaccgtaataaaaaaagcctccatacggaggcctttttattttatgaaagagagtggaaaatcgggatggtcagctcttcctttcccaccagttgcgatcggggccgagataccaccaatccgtatgatcggttttgaggatggtctgagccagttctttggcgatatccgtgcgcaaccgctctacggcgctttcgagccatttgtcggcgtaacggttcccgagatcgctttcgcgtttcagattgaggatcagatcaagctggtcagcatcatgggcaagcagcgattcgggcgtggtccggcacgcatgttcgtcccatatggacatgatgtcttcttccagccctgtcccttccaccgcgtcttccagcgcgtcgcgctcgcgtgaagtatcgtagaggcggtttacgtaattgaagtcccctgtacgggcttccggcaggtcatggaagaggcaaagcatgaccgtgcgggccgcgtccgctcccgtcttttttgccaatgcgtagccgatgacggccgtccggtgcgaatgttcggccacggtttcttggccggacccaagaaacttgtaaccactccgaggcgtatggcggagcatccctacctcattgagaaaatccgtgagccgctgcatggcgtcccgttgtttgagctgttctgctgacatgaagcaacactctgattgagatccgaatggtggaaaatattcggaataaaggtctacaggaatacactctgggagagaaaaagggaggaaatgaactgttcggttcagcttatttcttccagctttccccaacggccttaccggacgcccatgcccagtgcagattgtaaccacctagtaaccctgtgacgtcgagtacctctccggcgaagtataggccgggctgtttgcggctttcaagcgtgcgtgggtttacgtcactcgtatccacccccccggctgcggcttcagcgtgtcccataccttccgatcggcttggtgttaccatatggtcatgtattgctagcgcaaggtattccctgtcttttttggcaagctgagcgacttttcttgaagccagcgatcccggtatgagccgttcggccaggcgggtggggagcacctttttgaacagccccaaaaccgtactcttgccgtgctcgggttggtgcataagctccaaggcgggatggtcgggcagaaagtcgatatgcagcgcttcgccctgccgccagaagcaggatgcctgaaggatggcggggccgctgagccctttgtgggtgaacaggagcgggtagcggaaagtgcgcccgcccacggatacggcggcaggcaggctgacgcctgcgaggccgtgcagaggccaggactcggggagcagcagaggtgccagcaccgggcgtacggggacgaccttatggccccattggcgggccaagcgcatccccccatccgttgccccgcaagcgggccatgcggggctccctgttgcgatgacaaggcgcggggcctgtagggtgcctccggacgtttccacagagaacaggccgtcctcgtgccggatttcgccgaacgtacggttgaacagcaattccgcccctgcattgcggcaggcggctgccatcgattccacaagccgggccgcctgtaccgtgcagaaaatctgaccgtactctcgctcttcccattcgatgccgaatgacgccaacatgctcaggacaaagtccgtcgaacagcgtttaagcagggtgtcagggaagcctttctgcgtgcctacataccactccggagatatataccgattggtaacgtttcccttgcctcctccggcaaggcgcactttgcgccccgcaaccgggctatggtcgatgacggcgcaagaaaagccccggcgcccggcggtcatggagcacatgagcccggcggccccggctccgagaatgatggcgtcacggatcattgttcggccgggaggcttttgagcttgcggaacaatgcccgataggcgtgcggaggacggctgtgttcgcgttcgttgcgggcctttgccgtgaggtcgcggatttcggtggcgtcttcggctgagaaggcggcaagcagtgtatccatttccgcatcggtggcgttcatgaggtcgtcccgcagtttctcggaacgcttgaagctggcggtttcgcccgtgtgcccaagcttgatggcgtccagcgcgtcacgcacagcctgcggatccgcctcttcgcgcatcaggcgcccgatgtactgcatttgtctgcggcggccttcatgtgagctgaggcgctgccattcgaggacggcttcgcggatgttgggagtgagcggcatcttggcgagcacggatgagccgagggtggtgagttcttcacccatacgctggagtgctgtgctgtcgcgtttcttctgtgagcggctggggcggtcatcctcaaattcggaatcttttgtgtcccactggtaacgttttttcggcggcatagtgtgtcggtgaggttgaaagttgcggaggaatgcgctttttggaaaaagcgtctcctccctggtccccacccttaaaaacgctgacaagtggggaggatacgcaaagaaatttttgttgggcacatagcgtgactctatagtcacatttgacggggaaaacctctgatagaaaaaggggtgcccaaaaaggcgaaagcttttgaatgggggagagggtatgggaggggcgggaaaagcctttcttcagaaaggttcccccgcccctcccaacttaaccagtcaatgaattacagttgcagggtgccgcggaactcggcgaggtttttgataccaagttgctggcacagatggggaagttcttcggctatccggaaggcggcgtcggggcggacgaagttcatggtcccgatttccaccgcgtgcgcaccgacgaggataaattccagaacgtcctgcgcacaggtgatgccgccgatgccgatgaccgggatcttgaccgcattgcagacctgccagacgcagcgcagggccacgggcttcacggcggggccggagagcccccccaccacattggcgagcagcggcttgcgggtcttcacatcgacgcccatgccggtgatggtgttgatgcaggagatagcatcggctccggcttgctcggcggccttggcgatggcggtgatgtccgtcacgttgggcgacagcttcacgatgacgggcaggttccccgcgtgtttcttgaccgcttgggtcacttcggcggcgagggccggatcctgtccgaacagcacgcccccgttcttcacgttggggcaggagatgttcacttccagaccggcgatgccttcctcggcggcgaggatacccgccagttccgcgaattcagccggcgaggtggcgtagaggttggcgatgaccggcgtttcatgccacggcaggcggggcagtttgttcttgaggaaggattccacgccgtcattctgcaaacccacggcattgagcataccgcagggggtttccgccacgcggggcagcggattgccgggacgcggcttgagggaaagccctttcaccacgatgccgccgagatgcgtgagatcgccgtaattggcgaactcgacgccgtatccgaacgtgcccgaggccgtcaggatggggttcttgaagacgagcggtttcgtgttcccggaaggcttatgggaggaagaaagtcgtacggtgaagcgatccatgactaagcctccagggtgatctgatcggcccagaacacgggaccatgggtgcatgtctgcacgggcgttccggccttttcttcgacgggccacttttccgtcgtcttggtgacgcagccgaggcaagcgcctacgccgcaagccatgcggctttccagagaaagctggcagcgcgccttggccgccagagcgaatccctgcaccgccttgaggaacggggccgggccgcaggcgagcacgaggccgttgcgttcggcataggcttcgatgcgcgagcggacatggttgaggaaccattcaaggtcttcgctggtgttctcgtggaaggattccacgtcgatgcgctccccgaggctttccacgggatagcagtcttcgggcaagcggtggccgaagaccatcgaaaggacgcccggcgtggggtggcgttccgcatacccgacgaaaggcgcgatgccgatgccgcccgcgaggagcagcgtcggggtcccgccttccacggcgaagcgattgccgaggggcccccagaggtgcaccttgtcgccgcgccggagtttggccattttttcggtgcctctgccggccacctggaaaaagatgacgagctcgttggtgctcacccggcagatggagaacggacgggcccagggcatatcgagcgcccagccctgaggacggagcatgacgaattgtcccggcgcccaactcttccaatcgggccgttcgaggcgcagggcaaaaaaacgtccctgcgatccggtgagcccgaagggaacattatcaataaccgccaggtcgtaaaacgcggactgactcatgtgcgaacttcctgtctgatacaagtgctttggagttttgtagtgtgtatgcccccctacggtcaaggggctagagaagtcttttgtaattcccttgaatttcgccgggatggatgctccggttttgtttgattgtgggatgcaagcgtggcatacttttgttttatacctatctgtttgtgaggattgcaacatgtccaccgctcccaaaggctttcgtttcgccaccgcgtgtgccggattccgtaaggaaggccgcgcggatcttgcccttctcgtcagcgatgtccccgccgtcgccgcagggacgtttacgcagaaccgttttccggcggcacccgtcctcgtcgccaaggccatgctcgccgagcgtcccgccgttcgtgccgtcgtgatcaattccggccaggccaacgcctgcaccggtgatgaaggtatgcgaaactgccgcacgacccaggagctggtggccggcgccctcggccttgaggcgtcggatatcctgcccgcgtccacgggcgttatcggtgcgcagctcaagatggatctttgggagaaggccgcccccgccctcgccgccaacctcggcaaggcgaccccggaggattttgccagggcgatcatgaccacggatgctttccacaagatttcgcaccgcgaagtctcccttcccggcggcgtggtgaagcttgtgggcatggccaagggcgctggcatgatctgccccaacatggcgaccatgctgtccgtcgtgctgtgtgacgcgcaggtggaagcctccgtctggcaaaaaatgttgcgcgacgccgtggagctgaccttcaaccgcgtgaccgtggacggcgacacctccacgaacgacacgctgtatggccttgccaacggcgcatccggcgtgtccgcgtccggcgaggaatcgctcaaggcgctgtccgccgccctgacctccgtactcggggatctggcctatatgctggtaaaggacggcgagggcgcgtccaaggttgcccgtatccatgtgaccggggcggcatccgatgccgatgccgagcgcgtggcccggacggtggggcactcgcagctggtaaagacggccctgtacgggcgcgacgcgaactgggggcgcatcgtcgccgccgtgggccgcagcggggcggacttcaaccccgacgatgtggtggtgaccctgtgcggcgtggagttgttccgcaaggggcagcccaccgatctggatttcgacgccctgctcgaagagcccctcaagcagcgcgatctgcccatcgacatcgtgctgggttccggttccggcagctatacgctgctcgcttccgacctcgggcatgagtatgtgaacgtcaacgccgattaccgcagttagagcggatgctctttcagatgatgtgaagccgttttggggagggaaaatttttttcagagaagttttccctcccaaaaaattccgccagagcggagcccctccctttccaaatatttttgtggctatccggtccctgcttacaatctttttcggcacggattgcctctggaataaaacgcgcttcaaaatggaaatggacaagagagggaacagggggaatactccttttcacggaaaggcctccttctcgtcaaggaggccctcatcctccaaagcgtttgtaagcgggcatcggatcggtttcgatcgtgagcccgagccgatcggatgccttgcccaatctcccgcccgtcagaagcgttgcgggcgggagattccggtttgcgcgccgcatgaaaatccgccctcagcctttcctgagcgggcacggcgacacgaaggacatgaagctccccctccgcagggggagaggccgtatttttcaaaggaatgccatgcctgaaccattgcaagtgacggcggcggaagccgggcaaaagctgttgcagttcctgtcccggcgtttcgaagagccgcagaacgtcctgcaccgctggatccgtaccgggcaggtccggatcaacggcgggcgggccaaaccgttcgaccgggtggaactgaacgatgaaatccgggttccgccctttgccggggccggaacgaaagcggaacgcgtccccgtgtcgtcgggcggcaaggaattgccccccatcgttgcggagacggctgacgtcatcgtgttctgcaagccgtccggcctgcccgtacatccgggcacgggacacacggacagcctgactacacggcttgaagcggcgtttgccggatcgccttttatccccgctccggtacaccgtctggatagggatacctccggcctgttgctcgtcggcaagacgtatgccgccgtacgccgcctttcggatgcgctggcggctcatgatgggagcgtcgccaaggactaccttgcgtgggtgcagggcgaatgcccgtggagccgcccgaaaggccttgaggatcatctggcaaaacgcacagtcggcgcacagggccgcgaaaaggtcgttgccgggaaatcccgcacgggtgggcccgacgagaagcccgcgagcctgacggtccgctgcctgaccgtgcgcgaaggccggagccttgtccttatccgcctgcacacggggcggacgcatcagatccgcgtacagctttcggagcggggttttccgctcgtgggggatgtgaagtacggaggcccgcgctgcggggatgggctcaagctccatgccgtgcggctgcgggtgggagaggaaacctatacggccttgccgccgtgggccggtccgtggcgcgttgcgcacctgccgcccgaatgggaggatgtctgagatgtatttccccactgcggaaatcgaagtttcgccgttcgtaccgccgctggtcgcgttcaccgtttccttcttcacgtcgatgggcgggatttccggcgcgttcctgctgttgccttttcagatgacctttctgggctacaccaatacctcggtcagcgcgacgaaccagctctacaacgtgttctccaatccgggcggcgtgttccgctattaccgcgaaaaacggatgctctggcctctgtcgtggatcgtcatggccggggccgtgccgggggtcgtcatcggaggccttgtccgcatcaactggctggcggatgtccggcctttcaagctgttcgtggcgctcgtgctgctcggcatagggctggagatgatccgcgacctgttcggctggatgcgtttcaagcccgccccaaaatacgaacaatctcctcccaagccctatgtcgaggtcgtggagcggaacctgtcccgcgtatcctacacgtttgacgggtatctctattccttttccgtgccgatcctcttattctactccattgcggtcggtcttgtcggcggcatctacggcatcggcggcggggcgatcatcgcgccgttcctcgtttccgtcttccatctgcccatctacacggtggcgggggcgacgctggcggcgaccttcgtcaacgcgctggccggcgttctcttctacatagccatttcgcccctctatcccgacctgagcatcgcccccgactggggcatggccctgcttctcagcctcggcgggttgctcggcatgtatttcggcgcgaaattccagaagtgcatctcgcccgtgcttctcaagtggatgctcgttgtgatcctttttgggaccgtcattgcgtattttgtggaatttgtgagggggtagggaagagaatattggggaggggagaggggccctttttgaaaaaagggcccct

SEQ ID NO: 7498 - DNA, 971 bp, Unknown
  gut microbiota DNA sequence
cagacagacagacagacagacagacagacagacagacagacagacagacagacagacagacagacagagcttgattaaacttttacagtacgtgtttggttatgcggttgttaaattaagtgatattgctacgattacaagaggaggaaactttcagaaaaaagatttttgtgaagagggagttccatgcattcattatgggcaaatatatacttattatggaacgagtgctagtaagacaattacaatgattacccaaactgccgcagataaatcaaaatttgcagaacccaatgatattataatggcagttacaagcgaaaatattgaagatgtgtgcaaatgtgtagcttggacgggaaaaaataagattgcagtgagtgggcatacagctattttacatcataatcagaatgcaaagtatttatcatattattttcacacaagtatgttttttagccaaaagcaaaaatatgcacatggaacaaaggtaatcgaggtgacaccggataaacttaatgatgttattattccattaccatcaatagctgaacaaaatagaattgtagatattctcaatcgttttgatatactttgtaatgatattgtagacgggctgcctgccgaaattgagcagagacaaaagcaatacgaatattatagagataaactattatcattttaaatgaagaactagaggtatactatggggaaaagtttagatgagattgcaatacaactgaaggagtgcaataaaaaagtacagctaatatatgcttttaatggtactggtaaaacacgactttcgagggcatttaaagaattgattgcacctaaaaatgaattagaagaagaaaacggattggcgagcaaaaagatactatattacaatgcctttaccgaagatttattttattgggataatgatttggataatgatactaatttaaaattgaaaattcatccaaatg

SEQ ID NO: 7499 - DNA, 269 bp, Unknown
  gut microbiota DNA sequence
cggatacttcagtccacgggcctgcgcacgcaaacggatgtcgccgctatgctcggtgtgaagcagagcagcatctcggatgcgaaacggcgcaaccacatccccgattcttggatcttgacgcttttcaataagaaaggcctcaatccctcttggatccgcaccggagaaggcccgcagtatgtggcgggaacggatacgcccccgacgcctgttttgtcggaacagcaggcggcagagagccttgagccgatactccgggcggccct

SEQ ID NO: 7500 - DNA, 66331 bp, Unknown
  gut microbiota DNA sequence
tagtatttcggatgcgaaacggcgcaaccacatccccgattcttggatcttgacgcttttcaataagaaaagcctcaatccctcgtggatccgcaccggcgaaggcccgcagtatgtggcgggaacggatacacccccgacgcctgttttgtcggaacagcaggcggcagagagccttgagccgatactccgggcggccctgctcggcgtggttcccgagcttgccgaccagctcaggcaaaagatgaacccataacctcaacacgcatcacacggaacggtaatgaacgacgctgaaatcatggaactcgttgatgaggtcagaaggtgcgaacgcgccgtgcaacaggcgaagaacgctcttgaaatcgccaaacgtgacgccgccgtcgccgcctgcccatataaggaaggcgacatcgtatccggatgggatcgcgacggcaccagtccggcaaaggtcgataaaatcctctttaccccctcctacccctactacgacctgcgcgtgctccccatcacggaagggggcaaaccatcccgacggcacaggtacgcctacaacgtgctggatgtaacaccatacgaaggcgacgaatgaccccaaacgaaaggcggctcactttgatgtgggtcgcctttttccgaccatctgtttgaagaggtgcacatgctgaaagacacgttccgcgctcaatccgaggaaatcgttgtggacatgttcgcgggcgctggcggcgcgtcctgtgggcttgaaatggcgggcatccatgtccatgccgccatcaaccatgatccggtggccgtcagcctgcacgcccggaaccatcccgaaaccgaacaccatgtgcaggacgtgtataccctctcgccgcagtgggtgacgcgcggccggcgcgtcgggctcctctggatgtcgccggactgcacgcatcactccaaggccaagggcggcgcgccgacgcgcagcgtccggcggcgtgagctggcgatggtgctggtggatcgttggattcccgaactgggagacagggctccccgcgtcgtcatccttgagaacgtcgaggagttcgcggaatgggggccgctcgacaacaaaggccgcatcattgaagccgcgaagggggagaggttccgcacgttcgtcagaaagctccgttcctgcggctaccgcgtcgactggcgggaactccgggcctgcgattacggcgcgccgaccatccgcaagcgtcttttcatgatcgcccggcgggataaccaggccatcgtctggcccgagccgacgcatggtgcgccggactcgccggaagttctcgccgggacgcggaagccgtggcggaccgccgcagagtgcatcgactggtccctcccgtgcccgtcgattttcgcctcgtccgaggaaatcatggtgcggtatggcatccgggcggtgcggcctttggcggaaaacacgctcaagcgcatagcgaaaggcgttgtccgctatgtcctgagcaacccgacaccgttcgtcgtgacgaataccagcggccatgcccctaccgacattgccgaaccgctggcaacgcaaacgacgggcaaccaccacgctctggtgcggccgttccttgccaagcacttcggcggtgtcgtcggccagcccgtggacgtgcccgccgggacggtgaccaccattgatcaccattccctgtgcgccgcacacatggtcaagatgcgcggctcgaacgttggcgacgccgcggactccccactgcataccgtgtcagccgaggggacgcaccatgcgctgtgcgccgcacacctccagcgggacttcggcaacagcatcggggcaccctgcggagaacccgtgcccacggtcatgccgggaggcggaggaaagacggccctcgtttccgcattccttgccaaatactacgggcagggcttcggatgcgccgcggactcccccctgcataccctcacgacgaaagatcgcttcgggctcgtcacggtcagcattgagggaacaccctacgtcctcgccgatatcggaatgcggatgctcacgccccgcgagcttgcccgggcgcagggcttccccgactggtacgtgctggagcgcacggcggacggagcgccgatcacaaagacggcgcaggtgcgcggcatcggcaacagcgtctgcccgcccatcgcggcggcactggcgtcggcgaactattccccgcaggagtatcctgttcctgaatttgatatgccgctgctggcgatatgcgaaaactgagcgaaaggaattgaaaatgacagcacaggaatggcttgacgctctaaaacaacagaaaaatgcagcgacaccggggccgtatagtttggatggaatgtatcccatatattcccttggaagaggtggattgaaggataaaaccgtagcctgcgccaacagtaaattcgatggagattatatcgtcgcggcctgcaactccgtgccgaggcttatagatatgatcgaatatctcgccggaaggctctgtgatgaaaaccacggcgacaacgattttgacggaaagatacaagacgcttttgaaatgacggagccgaaagaatgaaaaataccatccggcagtattcactgcccggatacgaactgcgcgactatacaaccgaggcgatagccttcctgcgggagaacgaaccgccggaaggcttttttgtgggattcagcggcggtaaagactctatcgtgtctcttgaactgtgccgcatagcaggggtcaaacatcaggcgttttactcgtgcacccgcatcgatccgccggaagtcgtacgcttcatccggcagcactaccccgaagtgacgtggttatactcaaaaatgacgatgtgggaggccatacaaaagaaggctcctccattacgtatgcagcgttggtgctgcgatgtcctgaaaaaagaaccagcgcgtgatcatcccctcaagcatcggatcatgggcatacgcgccgaagaaagtgtacgtcgggcatctcgccccagaatcgatagctttctgggccaaacgacatacaaaccaatcttccgttggcccgaatgggccgtatgggaatttattgagagtcgaggattacaatatccatctttatacgatgaaggtttttcacgtatcggctgtgtcgtgtgcccctttatcctaagttcatatccgggggctacacgacagcgtgaggaatcaatgcgacgttggccggggatatggaatacatatgaacacgcagtaaaaaagtggtttatagctaaaatggttgaaggactgagaagtaaccagcgccacggaacaccagaaagctactggcaggcatatctacgggggtttgaatgagcaccctccctcaagtactggatccatgttgtggtggccgcatgttctacttcgacaagcagaatcctctggtactgtatagcgacatccgacgtgaagagcatgtactttgcgacggcagagtatttagggtttctcctgataccgttgccgatttcagggccctgcctcacgccgatgaaaaattccatctcatcatctttgatccgccacaccttgaaagatgtggtccacgctcgtggcaagggaaaaaatacggaaaactcacaagggagacatggcacaccgatctagccaaaggctttttagagtgctggcgcgtcctcaagcccggaggaacgctgattttcaagtggaacgaaacacagatcagcctacgcgaagtgttttcttgttttccgcaacgccctcttttgggacataccacgacaaccaatctgaaaacacactggattgttttctataaagaagctcggtacgaaccgaatagctaagcccctgttcggggctttttctttttctggaggactccatgcctgagaagatttcccgtttcgccatcctcgtccgcgacatgcgggctgcccagaaacgctacttcgacacgcgggacaaggccgacctgtcccgcgccaagggacttgaaaagaaggtcgacgacgaactcgccgtcatctttgccggtgtccggacgcaaggatccctgctatgaagaaacactttccgcccccgccagaagttgtgcaacgcgcccggtgctacctcgcgctgcggattctgcgggcctacgttgatgtcatgggcaagacccacgaccaccggttcgacgacctcatggacaaaatccgacactggctcggggagtgcgaggagatgttggagcggcggccggtgtccaaccggacagactcggaaatcatcgaaaagctgcggatcgtcctttcccgcatcgactgcgggccgcagaaatccccgcgcgagcagtacacccactggggcgcggcaatcttctgcgcccataccctgctcgtggacgtccgggccacatgcccggcctggtacgggaaggcggttcgccgcaagaatgctgcgggcaacatcacaaaccgctatccgtggcggtatctttacacggttgtggaacgcctcgccgaagggctggaggccactatccccgaagttgccgaattgggaacggaaatctacctgacggtgcaaaactgaaaatatttacaccgttacaaggagaagaagttatggaaactctgctgatagacgccgaagaaatgtgcaaacggcttggagtcaacaaggaaaccttcaggcgttcttggcggagatggaagcacgagcgcgtaggcgcagggtacgacctgcgctccatgcgcttctactggtgtgatgggccgatcaaggcagagggctacaatggctgtatcgaagtacaggacaaaaagcggaatcaggtgggcggcggacgtttggcaggacggcatacgaatcggcagaaaagcaggcttcacaagcaagcgggcggcaacggcatgggaggaaacaatattgacctctccgccgaagcccgccgatttggccttgcgtgacgtctgtacgcgccatcttctctactgtgaaaacagactgaaaccgaacacattgtcttacaagactaccgcatatagaaggttcattgcttttgcaggaggagatacatctttcagaagtattacaaaacatgccatagacaaattcgttgatgaacttgcgcggatcataagcaaaaaaacagccaataaacataagacggaactgtcttcactctgggcatgggccaacaaagaagggcttgttcaggggaatcctccccaacagatagattcatatgccgtcaaaaagacggtaaagtatattcccccatccgttgatatagcgaagctgctgaatatagctgatgaaggcttcgagaaggactttcttgtatgcctgcttcatactgccgcccgcatatcagaaatccgcaacatggcatgggaagatgttgaccttccccacaggacggtgacgctctggaccagcaagcggagaggcggcaacagcgagccgcgcaagattgcgatgtcggaaaccctgtacgagctgttggaaaagctgaacgggcaacggaccggtgctgaggcgtatgttttcacggatcccaagacgggaacggcatacacccgcacatgcaacaaaatcaaattcttcatgggcaacctctgcgcgcgggcgggggttgctcatttttccgcccacagcttgcgccacttcatggccacgcactttgacgacccgcaccgggcgcaaaaagtgctcggacacaagaacctgcggacaactgaaatctacctgcacgagcttggtgtggacaggaaagctgcggatgtttttgagtcaatcaccaatgaaatcaccaatggcaaaagctccaccaatgaaaaaagggcttactttttacagtaagcccttgaaatttatggcggagagggggagattcgaactcccggtaccttttgagtacacacgatttccaatcgtgctccttcgaccagctcggacacctctccgcgtcgtgcagcgatgtaactagcgaaattcaggatggctggcaagcttttttttgggaaaatcggcattttttccacaccacgaacgacgctggcaaataacacgcgataaataaagggtattttattatcatgatactctaaaaaaatacggttcccccttttcggaatgccgagtattcgaattcgccgggaatttccttgacagttcatcttttcatggggcaagagtcgaaccaaattctaaggagcgtcttcatgtctgtacaaagcatcattcagcttcttggcggcgttgggcttttcctcttcgccatcaagctgatcagtgaggccctacagctgatagccggggaccgattgcgacagcttatcggaacactgaccaaaacgccgatcatgggcgtgctggtgggtgcctgcgtcaccgttctcatccaaagcagcagcgccaccacggtcatgacggtcagcttcgtcgacgcggggctcatgaccctgacgcaagccatcggcgtcatcatgggcgccaacatcgggaccacgatcacgggccagatcctcgccatcaaagtccaagactacgcctacctcttcattattataggcgtgcttctctccttcttcggacgctccaaggtacagaagtacgccggcaacggcctcttgggttttggtctgcttttcgtgggaatgcagaccatggaatcctccatgagtttcctccggaatgaaaaggaattattcctcatgttcagccacaacccgctcatgggggttctggccggaacgctgcttaccctccttgtccaatccagcgccgctacggtcggcctgaccatcgccctcggcgtacagggcctcttgcccctccacgcggccatccccatcatcttgggtgacaatatcggaacaaccatcaccgcggtcctcgcttccatcggcacggatcggaccgccaaacaggcctgtgccgcccatgtgctcttcaacgtcattggcgtatgcattttcctcaccatccttccgctttaccaagagctgatcgccatgacggctacgggcatcgcccaccagatcgccaacgcccatacgttgttcaacgtcttcaacaccatcatcttcctgcccttcgtcaagccgttcgcggcgctcatccgcaggctcctgcccgacaaggcccataaggtcgtcgaaggggcccagtatcttgatcccaagctcatcgaagccacccccggcatcgctgtggaagcggtcaaaaacgaatgtgcctacatgggctttttggtcatccaccttcttgattcggttcaggaagtattcttcaacgacaagaaagacctcatccccaagatcgaagagaccgaagccaaaatcgaccaactgcacaaggccgtcaaagcctatgccgaagacatcatgcaggccgggatctccgatgacgcggcccgcgtgctgacgctgtatgtcgccagctccgggaacatcgagcgcatcggcgactacggcaagaagctccttgagtactacgcgtaccgccagaacaggccgaaggatttctcccagcaggccatgacggaactctccggcatgtacgccgaagcccatcacgccattgtgaccgcgctggacggcttcatcaacgacgaccccgacaaggcgcgcgaagtcgcccccatcgccgggaagctgcgcggcctcgaagtcgaactccgcaaccgccacatccagcggctggacaagcaggaatgcgactccgaaacgggccttgtctatgtggatattctcgggatcatcgagcacatcggctatcattcgaacaacgtcgccaaggccaccatttcctcctgcacggcggagcacaaggcgaaggcgtaacagataccgagaaagaggctttttccaaaaagcccctccccacaaaaactgcgacagggaggccgcgcggcaagagttccgccgcaaaaaggctctgcatgaacacacatgcggagcctttttccacaacatactgtgatcatgaaagggcgtttccgtactgtcgcttacctttactggagattttttcttggcttgttcagtccgttcaattcatcagtcaccctcttgaaaaactccagaggagaaaggccaagggcttcacagatggaatagatcgcggtgatggtgggattcctttttccttttatgattccacggacatagcaatcctgcaaatccgaaaaggccgcgagggccgttttggtcatctttcgttcttttcggatttttttcgattgtaatgccagtggtttccaataaatgaggataggttttcattccatcaaggtacacaatgtattgacagaaattcgatacgatagcaccgaaataaacaaaataagatacaatcgtaccgcttttatgctttcacgtgtgaggggggagcgtgtcatggctgacatggtgcaagacaatctctgttgcagccgcagcgtggttgattgggccaaagtgacacgttcgctcctaggtgcggtgtcctttccggtgataggcctgcttgtcccgtacggcatgtcgaagcaaggcatacatgacatttttccctatttttttcatcgcaataggcattgtgaacctgcttctcttcagggtgaacgccaacggtacgtcatcgacgcagaaaacggtatgctggagtttccgggcggcggcatcaaagtccaaaactggacgtcgcacttcaaccccctttatctgtttcaggaattcatgaggcataaaatagctctcgccgagatacgcgaaatccacccgcctctaaacatgaggcaaacggtctacggcaatggccgttcgcgtgcgagcgtaccaagcaggatcgaactcaacggcgattttggcgccgtttcgctttcattccgatcaaaggaaaaacgggatgaactgtaccttgccctcgtgcgggtacaccacatagggaggctcatccccacgggatgagccgtatccgtcaccccaaaaagcaaggagatttcctcccatagccgaatatacgcccttgagggtaggaagccactattcctgcatcaatcatgcactatcacaggccttttcccccgttcccctcctgtcggcagggattcaatgatgaaagcctttgaagcgggagagaagggggtttgggggagggagaaactttcttcagaaagcttctccctccccaatcttccgtgtgcctcccctactccagcggaacattgggatgcatcgtccaaatgccgcagggacagacgccggagcagatgccgcatccgatgcaccgattgggatcggaaacataccgatacgcgccgcccgccagtgtttcccggctgatggccccctccgggcaggattccaagcacattctgcaatcccggcaggtcccgcaactgacacaacggtcaaaatcccggttcgcggcaggcagctcaccatgagggcaacgggtgaaatacgctgtgctcagttgccctgagggtaccggtttcttctcgacgggcgcataggccacaccgtgaagcgaggcgtcaacggcctcagccgccttgattcccgttccgatggcgtccgccagcaacccgggcttgatcacgtcgcccgccgcaaacacgttttcgagaaggctcatatccgccccgggaatgacccaatcgcggaatttccgcacgccttcaggcaggtagcccaaatccggggattcgccgatggtgatgatgaccatgtcgccggaaatgagcgtcccgtccgccgtgatgagtccgccatcggttatttccttggtcatcaccggccagagcaacttgccgcccagcgcttcgatgtgcgcgatttcatgggcaaaggccgccggtttctgcacgtcgatgcaggtcacgctttccgcgcccatcgcataggccccggctgcggcatccatgccagcgttgccgcagccgatgacgatgacattccggccgacacgagggttctcgcccttgttgatagccttaaggaagtcgatgcccgccacaatcctctcatgcccgggccacgggaacacgcgggggatatgccctccggtggcgacgatcaccgcatcgctttcccgccggagccgctggaacccgtccgcgtcaaccaggctgccggtcacgaaacggacgcccatgtcctcaatgcgcttcagttccttttccaaaatctcatgcggaaggcgggcgcggggaatgacctgctccagcttgccgcccatgcggtcgtcagcttcgtagacggtgacctcatgccctttccgggcaagccgccatgcggcgctcaagcctgcgaccccgccgccgatcacggccacttttttgccggtaggcccggtgggacggggcagggacacatcaatggaacagcgcccgagcgctccgatttggacggcttcgtcgatgccgccgcgcgtgcacccttccatgcacgggttgggacacacgccgccgcacactgagccggggaacggcgtatagtcgagcaccagcttgtaggcttcctccaccttgcccgcgcgcagcaggttgtaccgtagctgtgtaggaatggaagccgggcaacggaactcacagggcgcggcacaggcggcgttgtcccacgaggggacgcgctggcggtacaggccacgcgctacggtggcgttcacaacgaaatcatcacggcatacgtcgctgaaaatgccgccctgtatccattccttggcccggaacgccttcatcggcatgggatcggtcccaagggaatgtccccccaaggtgaggggataaatcttccgccactcgttccaatcgctgaggacggcgtacagttccggcctgcccacggcggacaaaaatgtttccagcccggcgtcaaggtaggcgatgtcatctgactccagcccggatacggcgagatcgtccgcgacgtcctcggaaaacgcgccgcgcacatacactatgccgccgaccatgcccacgcagggacgttcgccaaggacggaaggaagcccttcgcagtcataaccgcagaccacggccttgcccccgcccatgaactcgaaggaaaaactgcccacattcttgagcacccacagttccgggggcgcataaaggggatcgtgcttcatgagcgaaccggatcgggcccctgcccggccgccgatatggatgacgcccgccgccgcgcagtgcccggcggtgtcgcccgcatccccgcgcacgacaatgcggcctcccgcgttcagccagcccacatcggcgggcgctgggccgtccacaaggatttccgtattgtcgaggcacatggaaccgacgcgctggccggggttggtcacatggaaccgcagggccttgccttccctgttccacagcgggccgccgatgtcgtgctggcccgacgcttcgatttcaaacgatgtctcgccgttgccgaccgcttcctcaatggcgagaagcaagtcctgggtcgacatgcggtgcgtcccttgcaatgtcttgattgtcaacatgtcgcgccctcctagcacacgtattggatgccgagcttgtcggccacggccctgtccgtcgtcacaagggcgtcggaacggcccaccggcaacgaactgttgccgatgggagccatcagtttgcgcagttccccgtccaacgccagcatgtagtcgacaatattctgagcgccgcgatcgacgtccagccgatggacgaggcgcgggtcctgcgtacagatgccggtgggacatctgcccgtggagcaggcgttgcagcggccctgctcattgcccacgcatccaagaagctgaatgaggatcttgccgaggaacacgccgttcgcgccgaggcagatcatcttgaaggcgtcggccgccgccgtcccggtcatgccgatgccgccgcccgcccacaacgggatctgcccctgcaacccctgccgcacggcggcgaggtagcagtcacgcagtttggaaaccaccggatgccccgtatgatcgagcgaaacctcattcgccgcgccggtgccgccctgaatgccgtcgataaagaacccgccgcagattttgtacggatcgcggagcaggttgttgtagaccgatacggacgttgccgaggccgcgcacttgatggccacgggaacgcggaacccgaaggccgcgttcagggacaagtgcatcttctggaccgattcttcgatggaatagagcccttgatggttcggcggcgaatgcagagtcgtcctcggcacgccgcgaatggcctgaatgtgcggggccaccttggcggcggggagcaggccgccgtcgccgggcttggcgccctgccctatcttgatcaggatgcccgccgggtccgccttcatgcggggcatggccttgatgatgcggttccagccgaaatgcccggaagcgatttgcaggatcatgtacttaagccgctcggattccaacagcttgacgggcataccgccctcgcccgaactcatgcgcacgggaaggccgcattgctcgttgaggtaggccgtagccagcgcgatggcctcccacgcccgcgtggacagcgcgccgatggacatatcgctgaaaatgaccggataaatccagtgcagcgggggtgttttcccctcaagcctgagttcgccgccctcggcgcgcaacgggagttcgccgggcaggagcacacgcccgaacggggccagaatatcaaaggtatgccgctcggaatccagcgccgggtcggtcatctggctgatgcggcctacgacgatgtgatcaagggtacgctgcgcgttcagattggtccgtccgccgcgcttggtggggccattcgtccgggccagcagcgcataccggctgtcagggttgcggacggcacggatggcctgattggggcacactttttcacacatgccgcagccgacacacgatccggtaaggctcgccttctgccggatgacgggacgggccaggtgctcccgaaccggttccggctggctcgcacgggaaaccgtcagatcctgccgcatgaccgcgacttcaagcgcgttcagggtacagctcgccacacagctgccgcacatggtacagcgctcgggccgatagtcgatgatccaccttaaatcgttgacgccaatatcctgcgtggtcactgattccatctttgcaccgccaaatcattattgatgagcacaacttcccgctcgttgggatagatgtcccgcgaggcatcccgatcgggcaataccgcgttcagcccgcagacttcggaggaaatcgccatggtcgtcccgtcgccgcccacaaccacagggcgcagttttttggagtcgcagcacgtcatcatgcttccgtcagggagcacggcgatgatcgtgttggggccgttgatttccagatgggcgagggattcgcggatgaggctcagcaccttgcggtcgccgcgccgttccgcttccgcaaagggcagcggcgtaatgacgtgcttgaagtacttgaggggccacttcagttcgcgcagcacgtaatgcagggtgtagagaaaattctgcgagtccgactcgaacccgacgtatccccggtgcagcgacttctggtactccgtattcttcgtatagaacgtgttttccccgttggcgcacagggtatagccctgaaggaagaacggatgcgccgcataccggacgatgtcgtagttcgtattctggcggcactgggtcacgatgctcttcgcccgcagggggccttcctcatcccacagacggaaataggcggcgatgtcacggggatcgccgatttccttcaaggtcagcacgtcgggccagaaggaatagacgaacccctgcccgtccttttccagcatccggcgcagggcaagccgcgtatcgagcaggagttcctcacgctcggcctgcgggcgtcccctgtaggcttcgggatactcgtagttacggaacacataacagggcatggccttgatatcgagatcgggccgccgatccacgtccggaagccactccaacacctgctcaaacccctgctccgccatatacgcatcgaccatccggacgccgcgcggcgtacaggccagcgacagcagcggcttgtccttatggccctcgaacacgccgtacaaatcctgcatcaccatggcataacccgagttgtcatgcccttcctgttggggaagcatcaaatacaacgctttcgccggttcgaccggcaccttgcttttgatcgctccgattctgcacatagcttcctccatcctcatacggattgcccgccacgcgcggcgggacttcgtgacggcgcgccatcccgcgctttccgtgcgtgcggcgatcgcccgcatcaacacgcaaaagggggaagaactttggcgggccgttttcggcccggcggcacgcgcttttatacaaaattgttattttaaatgtcaaaagaaaaacacataccctgtttgacgattcagtgagcaaataacatacttatttttaggtatcaattcgttcatttgatttttgttctatttttacaaaattgtaatatccattctttcatcgaagcgtctcccccattcctctttcctcacgtttccccgtgcaacgaggcggcaacgcgctcgcacggtctcccttcttgagggcctccgccacacggcgcggaaacgtcccattcgctcgatcagcaggctaaatggccttgcatggcctgacgctttgccgtatgagacgggaacatcttttcgggttgataaaggatagaacaccatgtccctgcagcgttttttcacacgttccacttttgggcgcttcgccctgttcatgatggccgggctgctgtgcgcaagcctttccgcgcggcccctgctcgcagctcccgacaaggacgccgccgcgtccgaccagaaaacgtccgccaaagaagagaaggccaaaacggacaaaacggctgacgcgtcctccgaaaaggccgccgatagagacgccctgacggacaaggaaaaagccaaactcgaagctgaagagaaggccaaacaggaagccgaggaaaaggcccgactggaggccgaagccaaagccaaggccgaagcggacgccaaggccaagcaggaggccgaggaaagggctcggcaggacgccgaagccgcgacggccaaacttcaggcggaagccgaagcagcccaacagaaaagcgagtccaccgcctccgacgacgccgtgtgggaagaggcgttcaagcagaatcaggatgagctgaacgcgatggaaatcgagatcgacggcttggccgggggcctcaaggcgatcatcaatccgctccgcaagagccttcccggcatggaggaagccgcccagcgcctgttctctctggccgggacgcacaagcttgatcccatcatgctggaatccatcgatcagcgcggcgtattgcaggcttcgggcctgcgccagcagatgcagcccgtcctgaccgcgcaaaacgtggtcaaggacaaaatcgccgcgctggaacagatgaagagaagcctccctccccttccggagaaaggcagcaaggaaaagctgaatccagatcagcagcagacgtggaaaaacatcagccgcatcgagaacaaactcatcaagatggatcagcggctgacgcttgagctttcctccgccacggacctgctcggcaaaatcgagagtatgcacacaggcgtgaccggctacctgccggacctgtggcagacctattatttttcagtcccgagccgcttcttcgaccctgtcgcctgggaagggatcaccgagcggtgggaaaagacgctccagaacatgaacctgcgcatgagcatcgaattcccgcgcaacccttccgcatggaagggcgtggggctgcggttcctcaacgtgctgcttctgggctgcgtcgtcatcttcttcgtcaaccgccgcatggtccgagccgaaaagaagggcaccatgcccacggccgcccgctccggcatcctgcgcagcctcctgtggcaattcaccggccttgcgctggtcggggcatccttcgggagccagggcgagctcttccgggggctgctcgtgctcggcagcatccttgtcatcggcggcgagatgaccctcgcatggggtatgcgctgcttcatcctcgacaagaagatgggcctcaccccgctctggcccatgtatttggcctcaagcctcggcatcctgatcagctaccccaacctgcccggcggcatcctctccctgagctggatcgcggtgggcctggtttcgctgtacatcctcaaagaactgcacgcgcgcgagcttcccggcatcgaaaacaacctgctgcacgtccacaggctgaccgtctggctcagcatggccgtcgccgccatcggctggccgcgtatggcgatcctcgtgctcatcctcgtcgactgcctcgccatcaacacgcagttcatcatcggcctgctccagatcctcaaccgttcctcggacgtgcaggacagtgaacagcacgcccagcgcagcgtgctcgcgggactcgtcgcggccttcatcgcgcccatcgtgctgctgctcatcctgtgcggcatggtgctctgggtcatcgccatgcccggcggcgcgctgctcctgtggcactacctcggtaccggcgtgcaggtcgggtccgcctcgttcaacatggtgcacctgattcttatcgtcagcgtgttctacattacgagggcggccatcacggcctcccgctcgttcctgaaccgcgtggcctcccagtcctacaagatcgacaagaccctgatcccgcccatgcagacgggcatcacctacgggctgtggacgctcttcgccctcttcaccctgaaagccctcggattcgggctggaaaacctcgcggtcatcgccggcggcctctccgtcggtatcggcttcggtatgcagaccatcgtcaacaacttcctgtcgggcctcatcctgattttcagccggaccctgcacgaaggcgacgtcatcgacgtgggcaacctgcagggcgtcgtccgcaagatcagcgtccgcgcgaccacggtagaaacgttcgacaacgccatcatctttgtcccgaactcggaattcgtctccaaccgtctgatcaactggacgcgcaacgggcgcatcgtgcgccgtgaagtggccatcggcgtggcttacgggaccgatcccaagctcgtggaacggctgctggttgaagtggcgcagtccgtcccgcagattgtacggcggcctcagcccttcgtcctgttcatggattttgcggacagcacgctgaacttcgtactccgttactggtcggacatcgggaccgccacggacgccgcctcggccatccgccaccggatcgtggaggtcttcgccgagcatcaggtggaaatcgccttcccgcagcttgacgtccacgtcatccctcagacgccgtccctgacacgagctgaagggtaagaaggcttgactcgccgcatttgaaagcatcaaacaaaacaggctctcccgacggcatcgggggagcctgttttgcataacaatacgtatctaaatccaacccagcgaaacattaaaggtactttttactttaacgtcaatgtgctccgtgttacgcttcctccggtaaagacctattcatagaacggaaaaggccggaactcatttcttggcaatgagccccggccttgcctcgttcctgtggaacaacttccactagaaaggattaaaacgcgtagttcaagttcaggccgaccttgtacgcggtcttgtcgacgccgctgagcttgctcccccaaacatccttatccagatcgaggcggacaaagcccatttcagccgccagcgtcaggttctcgtagatcttgtactgggaatcgaagttgacttcccacgcatggtctttcgtcgtcaggtagacgttgccgctctcgacgccgccgaccgggccggaagtgaccatccgggtattgttcgtacccgtatagaagcccaccgccaacgtatgggtgagattttcaaagaacgagatgtcggcaaggcgggcgaccacgccccacgtgcccgtgggcgtattgctaagcacagcgccgtccgaaatcccataagcgccgtcccagccaagggtcgtggcaccccagccgggagacagcgtgggcaggcgttccgagccgtccatcgtatcggaattgtcgccggagccgtaccaggcgatgaggccaggggtcacgtagtcgagcttgtactcggcaataccggaaagcagccagccctgccgggtcagatcctgcccgttggccgccttgccccagtcggccttgccgtaagcgaaatcaaaggcgaggcgcagcggatcaaacgtcgtcagctctccgccgatgccaagccaccatgccgggttgttcgaatccttggccacgacggaaacgccgtcctgcccatagggaagcaggccgacgatcagggattcgccgttctcgcccacttcattcaggctgttcttgccgagattgccgtacatgccccacgggttgagctgccagccttccccggtcaacgggacgctcaggcccacaaagtccatcgcgttgcccacgccgcggtcaatcgtggtgttgtcgttttccgcacgcatccagaacagggacatcccggccatatcattgaactgataggacagggtgatgcccgcgccgtccgagtcgtcgctccccatgatgggatcgcccgctacgaagttcggcaggctgaacggctgcaagcccatacggacgcgcagatccgtctggggcacaacccaatccacgtacgagtaccggacttcgacgaccttgccgtccgttccgagcgcgccgccttcactgctgttgccccaattggtgtccccgacttcaaagaataccgtacccttcagggattcggacgcgatgatgtccacctgcgtgcgcaagcgctggcgggcatggaacagatcgtcggccttttccttggcgaagccgatattgttccattcggtgttgaaatcccattctcccgaaaccttgatgtcggcggcctgcgcacccttgtgcgccgcgccgaaaacaagccctgctgccaaaagaaggacggctacttttttcatgctgcttcctgaattgagtctttgaggttcacggaaagggccgatggcccgtttatggctgaccgccccccgggatgaagacgcaaggcatggcctcggcttgcggaacaccgtcgccagctgagcgttcccgagagcggaagatcccgtcttggacggctagagagcctttctataggtatagagatgggcgaggttgaagaggaggaacagccctcccgccacgacatgcccgcgttcccgtccggcaaggccgaaggcgagggacgctcccagcgtcgccaacatgccccggttcgtgaaccggatggccctggcccggtcgaagcgccgcttccggggtgccgccgcctcatcttgggcggaggcgaaatccgcccactgcccggcaagggccaacaagtcctcccggctgatctgatccggatcgtattccagcagcagggacccggtacggctgttcaccgtcacgcgcaatattcccggcagtgaggccagaaatccgcggacctgttcggcgtcctccgcccgtttcaaggaaggatggcgcaggcgcacccgcccatccacaaaactcgtgatgcacgattcgatttcgctcatgccgagacctcctcaagttggggttccgcgcccgctttgagcatcggacgcatggcgttaagggacacgcccaccgtcgtcagattgtgcaggagcgccgagggccccggctggaggaaaccggccagcccggacgcgaggaacacggtattcagggtcatgatcaggccgaagtcagtccggatgcgccgcatggcggccttactcagatcgacggcggtgacgaggccgtcaagacggcattccgtcagcaccacgtccgccacttcccgagccagatccgcaccgtcgctcagggtcacccccacgtcggcggcggacagagccggagagtcgttgatcccgtcgccgagcatggccaccgtgtggccttccgcctgaagactgcggatgacctccgccttgtccgtaggcaatacctgcgacctgtactcgctgattcccaaccgctcggccacagcggcggccgtgcgttcatcgtccccagtgagcatgacgacgcggattccccgcccgagcagcttgcgaataaccggagccgcctcgggccgcaacgggtcttcaatggcaatgagcccggccagtttcccgtccaccgccagatagaggatcgagcggccttcgcgggccagacgctcgatgtcctcccgcataccgtccaccggcacgccttcgtcgtggtggatataatgacggctcccaaacagcacgcgcttgccgtgcaggcgggaggcaatgccgtgcgccaccacatattcgacttcggtatgttcttcctgatggtgcaagccttcctgctcggccttccggacgacggcccgggcgacgggatgcgggaaatgctcctcaagacaggccgcggtcctcaggatgtcgtcccgctcgtagccttcgccggggatcacctccgcaacgcgcggacgggattccgtaagggtcccggtcttgtcgaaaaccacggcgtcagccgccgccagcgattcgaggaaccgcccgcccttgacgaggacgccacgccccaccccttccttcatggcggcaagcaccgccagaggggtggaaagtttcagtgcgcacgaatagtcgacgagaaggacggaagcggcgcgggcgggattgcgggtgaccagccagacaagcccggccagcagaaagctgaacggcaccaccgcatcggcaagccgttcggccttgccctgcactccggccttgagcgcttcggaatcctcgatgaaccggacaatctgccggaggcgcgtgccgtcgcccacgcccgtgggtcggatggcgatctcgccctcctcaaccacagtcccggcgtataccgacgaaccgggagagcgcaggacaccgagcggttctccggtcatggaagcctgattgacggaggcttcgccttccgccaccacgccgtccaccggaatggcggaccccgtgcggacaatgaccagatcgtcttcgctcagttcgctgatggcgacatgcatctcccggccttcgcgccgcacccagacggtatcgacgtcaagcgcgaggctctgggcgagggtgtccagcgacttcttgcgcgtccacgcttcgagcgcttcaccgaaaccgagcagcagagtcagcaggcgtgccgttttgaagtcacggcgcaacagggaaatgccgatggcggcggcatcaaggacatccacactgaggcgcccacggcacaacgccgcaacccctttgaggataaagggaacggaggccgccaccgccgtggccaccctgacgagaaccggcatgaacggccggacaaagatatagcggagaaaaggcccccaactcggccttccggctggctcggggaggttttcgccgcacacggcgacatccccggaaggctgttccgaagcggccaccgccagcaacaggaacgcggcccgcttggcttcgtcgttggcatacaagaggagcacactccccgtacggggattgacgcgcaccccttcgatgcccccgacggcgtcaagcctgtccgcaaggacttgcgccttgcggaggctgaaaccgtaccgggcgcgcaggcggacccgtcccggcacgtcatggacaataaaaaacagcatgggagttcctttttggaggaaaggcgggaaggaccgcccgccttccgggagcggcgcgaggccgtcccggaggcgtaagaaaggggagcgttcagcttcctaaggggcttctccctctttcgagggaaaacgaaagcctaccggaaacatcggctaaacgctcgcggggaacaccggaggactaggcctcttccttcgcttcccggcgctgttccgccgcgtggcgggcttcggccaccatgtcgtccatgttttccttcacggtttccactttggcgagcacagcgtccttgacgtccatgccacggctcaacaaatcagcggccatcggcttcaggtcaagcttgcccttgctcaccgccaccgcgccgattgcaccaagcgccaagccgccaaggaaaaacaggccgtacttcatgttctcgttcatgtcattctccttcgatgtggaatttcattatcaattaaaagtgaaaaaagaagcctacaaagccatgcagattctataggctgccgccgccacaccgtacgcaaacacggtgttgaatatcatgctgaacgcaacccaaccccagctgcccgcctcctgacggatgaccacgagggccacgaagcacggggagtacagcagcacgaagagcatgagggacaacgccgtcgccttgttccagttcgggtcctgtgcgaggcgttccgccagcgacgtcgcttcttcaggatcctgctcgccaagcgaataggccgtgccgagcgtggaaacaatggcttccttggccgctatgccgccaatcagagccacgtcagtgcgccaatcgaagcccacgggcttggtcaggggttcgatggccatgccgagacgtccggcccaagaatgctgcaaggattcttcagcgagggtcgcctgtacggcggccagctcttcctccagcggagtgcgggcttcatccccttcgggcaaggcgtccaccttctcctgcaaggcggcgatctgcgtttccagcggcgcggcctgctcaggatccagcgtcgggaaggtcatgctcgcccagatcaggatggacacggcaacaagcacggtcccggcctttttgagatacatccatgtgcgttcccagcagtgcgtgaccacgctgcgcagggtggggacgcggtacgggggcaattccatgacgaacggggtggattcgccgcggatgatggtcgagcgcatgaggcgcgccatgagaagcgcggcggcccaaccggccaacgtcagcaggaacatggtacgggcggggttttcggggaagaacacgcccaccagcagcaggaacacggggagtttggctccgcacgccatataaggaagcgtgagcagggtcgccagcttttccttgggactgcgcaaggtccgggtggccatgacgccggggatggcacagccgcccgcgataccgcccgcgatgatgaacggcatgacggaagccccgtgcaggccgaaggcgcggaacacgcggtcaagcatgtaggccatacgggccatgtagccgaagtcttcaagaatcgcgaccagcgtaaacatgatgatgataagcggcacgaagctcatgacgccgccgaggccgtcgatgacgccgctgacgatgagcgacttgaggaagccgtcgggcatcagggcgcttacggtctcgccaagccagccgaagccgtcttcgacccatccctgtgggtatgcgccgatcacgaaggtcagctggaacatggcgtacagcacgccgagcatgataagagggccgaacagcgtgttggtcagcaccttatccagcttgtcggacagctcaaggcggtccttggccgattcgcgccggacggccccgctgcgcagcacaccacggataaagccgtaacggtagtcggcgatgatggcttcgggcgacgtctgcaaggtatcccgaagatggtcggccacggtttcccggtcggcgcgcagctgcgcggccacatcgggcatacgctccacctgcctcaggatttcggaatcgttttccagcaccttcagggcaatccagcgggcgggatagcgatccgtcaacagccctttctcggcaaggagccgttccatcttggtgaggaccggatcgagatccgggccataggaaatgttcagcggagcgctcccgcggcggccaaaggcgacggcttcgcgcagagcgtccttgagtccttcgccggaacgcgccacggtcgccacaacgggaatgccgagctgtttgcccagctccttcgtattcacctgaatgcccgctttccgggcttcatccatcatattgcaggccagcacgaccggcaggcccatctccatgatctggacggtgaggaacaggttgcgctcaagcgcggaggtgtccaccagatccacgaccgccatcggcttttcctcggccttttcgggcgcgagcacggcacgggtgacgatttcctcctgcgagtacgccgtcagggaatacgtgccgggaaggtccaccatgaggacctcaacgccgtcgatggagacgtagccttccttcttgtcgacggtgacgccgggatagttcccgacatgctgatgggttccggtatattcgttgaacgccgtggtttttccgcagttcgggttccccgccagcgcaatgcggacctctttcaacgcgatgtgcttcgcctcgctgccgtcctggcggcagtgcgggcaatcggcatgggcctggctcatgagacctccacagtgatgtaatcggcttcgcggttccgcagggccagcgtgaccccgaaaagccgcagtgcaaccgggtcacgcagcggggcgcggcccacaatttccacatccgtaccggggatgagccccatgtcgcggatacgccgcccgagctcgccatcggcatccacgctgatgatgctgcccttctgccccgcctgcatctggcgcaaacctatcctccgcatacagtcctccaaattgattttgattttctttattaagaaaacctgacgacactctacttcaccaccgcatgcagtttgctgcgtgcgttacggttttcccatggggcgcttcaacaaagctccgtacactctgacacaagccctcccggaacgggtgaaagatgccattattgaaaagtattgtcaatataagtgagaaaatctttcaattacagcatctgtattcgcctatcgcgtacgatttccgtgtgttagaaaccgatgaaatgttactttcccaacctgaacaacacggcgtgagccgttctggggaaaaaaagctcaaagattgactcatcaaactttatttgacaaatactcacttttgacctactccccggctctggggggaatccatgctcacaaacgccgcgccgaacagcgccctgccgaccgcccgggaactcgtttccctcaccgtgccgcagctcggcatgatgctgtgccatcttgccgtttccatgacggatctgtgggtggcaggacggctggatgcctccgttcaggcgtcgctcggcatcgtttcgcaggtcttcaccctcctcatgctgatcacttcccttgccggaagcggctgcctgacgaccatcagccaagccctcggagccgggctcgaacagcgcgcccgccggtacgcggcgctgatcgcagggcttgccggtctcacgggcacggtcatcgcagcgacaagcctcctttgcctgccgatgacgctccggctcatgcacgtctcccccgaaatggaacccgtggtcaggacgtttatcattgcctacagctgccaactgccgttttattacaccctgatcatgctgaactcggtgttccgggcctacaagctggtccgcctcccgctcatcgccatagccgtggtcgccgtcggcaacctcatcggcagcgcggggttcgggctggggctgtgcgggttgcccgactacggatatcaggggatcgcgtggagtacctttgggtccgccctgctcgggctggcctgcaacctgtacgccatcgtccggcacggcatcctgacccgcgcatccctcgccccgtggcggtgggcccggcgtgccatgccctatctcttccgggtgggcggaccgtccgccctcggcgctctggcgggacacatggggaatctcgtcatcctgtcgctgctcacggggctgcccggcgacatggtgcctgtccttgccgggatgaccctcggctcgcgggtggagagctttctgaccttccccactgcggcgctgagcatgaccgtcaccatcctgagcgggcatctgatcggtgcaaacaggcccgaagcgctgttccgtttcggccagcggctcgcactcgccgccgcccttgcgctcggattcggcgctgggctgctgtttgtgttccgggttccggtggcggagatgctgtccacacagcccgaggtcgtccggcaggccgcgcagttcctcgccttcgcgtgcgcgggcattccgctcaagacctattccatgcttgtgaacggggctttcgccggggcgggggccacgcgcgtctcctgcaaagtcaactgtgtgaccatgtgggcgctccagcttccgctggcgtggacgctcggcaacgccttcggcgcgaccggcatctacgccgccatgctctgcgcgaacgcgggttcggcattctggtacgcacggctctacgccgggaaaaaatggcttgaatacggtatgcgaaaatgtcagaatgcctgacgagccgaaagaggagaacgcggtatgcccgaagagcgaaacgacgccagacagctctcgcctgtgctggaaaactacctagaaatcatcttccatcaggaaatccgggaaggcgcggcccgcgccagttccatcgcggaggcggcgggcgtgtcccgctccaccgtcaccagcacgctgaaggcgctgaaaagcatgggctatgtggactatgagccctacagcctcgtccacctgaccgaagcggggatgcacatcgggcgggatatcgcccaccggcacatcgtcattcaggaatttttccagcatatcctccagttggaaccgaacgtctccaacgacgtggcctgtgaactggaacacgtgattccgccggacgtcatacggcgtctggggcaattcgtcctgtacctgcggagccgcgaggacgactggaaaaactggcaggaggactacaaagaaatccggctggagcatatccagtccaatacggacagggatcttgtccgcaacgcgccgcccatgctcgccatgcgcacccagatgatggggcaggacgaactgcggaaaaagtaccgttagcgggctttatcctacgcgtcggcagagccctccggcggcgcgaaaaaccatgcaaaacctccgaagcgaacgccctccgcgtggcctcgccatcagccggaaagcgtggaaacgtgaaggcccgataaggcttccgtgcaaacatccccggctctccgggatggatcccccctgccccatacgttgcgtcccggcgcctttggccgcttacgcaacggaatccgggcctttccttgcgacaaggcacaacgccccgccctctccgcgaacgtcggaccggacatcgacaaatccgacggcgcacagccatcccgccagcgcgtccgccgtatacgtccgcatcccgtccactatggagcaccaccgggaatccccggactcctcgttcacgatcaaaaacacgccggacggtccgagtacgcggaacacctcggcaaaggcggcggatacatccggccagaagtagaccgtctcgaaagcggtgacgagatcgaaggacgcatcggcatagggcagccgggaaacatccccctgccgcacttcgcagcgcccggcggcgacggctccggcgttcttccggaggctggtggcgacgctctcagcggaaaaatcgatcccgcagacagacccctgcgggcagagtttcagaaattgcgccagattcgccccgccgccgcatcctatatcgagcacccgggcgtcgggctccggcgacacatgcgaccgaccccacttcgccagcgaagcgtgcccccagttcatagcccacagcatgatcctcccggataggccgccgggcttccgggcgttctgaaaaaacgtccgcaatacatgacgcatacgctctccttgtctatccggctgacgttccctcgcttcatgtacaagtaaaacagactggacgaggaacgactggcctcctctccaaaggtctgagaggtacctggaagtattatctacggagaaaacccggcacagccgggctgagatccgccacgagtcgggaacgcgaaaccggggcctttctcaccagaacggcccccccaatccggactaccccaaagtttccgaatacggactttgcgggaacggcggcccatacgtcaagaggggcccccgcatcgggcgctcctgtccggcgaggacaacagggggtacgtcacgcatccttgagcgagtagcgcaccggcaccagaacctgaaaacctttccccccacggaccgagggtatatcaaggccgacaagcttctcgccgagccgttcggtggctgtatcgagcacgccgaagccgctgcccttgccgagcgagcacgcactgacctttccgtcggcggagatcgtcacgagaagctgcaccgtcccttcagcgccgatccgccgcgcctgcttgggataccgcttgtgacggttcagggcgtcaaggatggctcccagcgccttgctcttgtcgtccggtcgttcctgcgttcccccgaccggggccggaggcgcggccgccacggaggatacgcccgtccccgccgaaaccggaggaatctccgtctgttggcctactggagcggaaggcggcacgggcttctccggctgccggaccactggccgcgtttttttcaccggaggagctttcttgaccggtttcggcttcacgggttcgggagctaccgttttgggcgcctcctgcggaggcttgggccgttcgacgaccggaggcggcacggggatcgtcacctccgattccgggctcaacagcttgcgcatggcgtccggctgaacgggtttcgcctcgggcgtcggctcggggcggatcacacgcatcagcatgatggatgaaggggctttcggcggcgtgaggatcttgacggagggggtcatcagacacacggccaaggccagcaggacaagccccccggtcatgccgcccgccatgctgcggctcttgcggaattcctccaccccgtacaggggcctaacgctcacttggctgcgtactgataacaaagtgtcctcctctcttcagccttgcgatgtctacgacgccgacaaacgcttcaaaaggggccttttcgtcgacgtacagattcagcagggcttcgggccgcgtctcgagcaccgcggccaacgcctctttcgtcaattgccgatcctgataatggatagtcccatcggccttcaccgaaatcaccagttccgcattcttacggctggattcctccgacgtctccgaggccggaagcacgatatccagcaccggcttgctgaatgtcgtggtcatgatgaagaaaatcaggagcatgaagataacgtcgatgaccggcgtcagatcgatgctggcatcctcgtcgaaatcatgcatggcacattctccgggtttcgggccgggcttcccgcttcgcgccgccgcacagttccagcgcacggtagctgtgttccacggcctcgatgtggaagcccttgaatttgagcatcaggtaatagtagaacatgagcatggggatggcgacgcacaggcccatgatcgtggtgatgagcgcttcccagatgcccgccgccagctgcgcggcgttgggggcgctgttttccgcgatggtgcggaacaccgtcaccatgccgaggatggtcccgagcaggccgagcagcggcgagaccaccgaaatgagcctcagccagcacagccctttcgtgacctgctcgaaattgcggtggaacaggtaagcgacctcggcccggatgtcttcggagtggcctccgtgggtcttcacgacatcgcggataatggcaatcagcggattgtcgctcttatcgcacacatcgcgcatacagcggccttcctggtgctcaatgtcgagaaagtcccgcttgaagtcgcgccagacgaaatgcagatacagaaggttccgcagcgcgaggtacaatcccgcacaaccgacaaaaaccagcgcgacgccggacgggcctatggacgcatagattgaggcaagattcatgagcgtttcctgaacacgacgtatgggcggcagagccgcccttccggtttcggggccgaagccccgttgatccttctggcccgtcaggccacctgttccgcgaaccccttgaaggcttcctgcgcccggaggcagtcggcctcgtcgggatgcttggccgcttcttcgaggcgcgccttgcgttcgggcgtcatggggtgcacgtcggacgccattttctgcatcatggcgacgatcttcggatcgaccttgccctgacacagatacgtgccgagcaccttgttccggcgttccggagcgttcaccagcgcttcgccctgcgcgatgcagtccctggcgtgatcggaatccggccatgcgcccagcgtgccgaacaaagccaccttcgcgtcccgcaccgtttccagataggccttggcctgcgcgtcgggcatacccttgtccacccagtagcccacggcaaccagatcgtagccctcgggcgcgggagcggactccacgggatggatctcacagccgggaagaacggcggcgatggcttcggcgattttccgggtattcccggtccgggacgaatagacgacaagagctttcatgacgggtcctttgtgcccacggcctcgcgcaacgcgaagaacgactcgcgcgctgccgggatgagttgacggttttcgcggcccacatacacggagaacaggaccgtgcccgccgcgttgaaaaactgcacggaatggctttccaatcccataaagggtaaagacaggaaacagatgtgaccgagatcatcgatcttgagatgtccgccgagtccgctgccgccggacaggttgaaatagccgtgcccgtgcctgccttccggtatctttcccttgatttcgatgacggagcccagatgcgccatgataaaggtggcgttttcccatgaggccaaggcctgccagaccgtatcgaaggcgtccttgcccgcgaaggcccgcgcctcgtccggcagggctctggcgacttccagttccgaaacgccgaagcgttccgcaaggcttgccagcatcaccggcttcttttcccgcagggccgcggcgatggactcgcccagcgtttccgtcgtctggcaacacgatgccgtcatagttcgttctcccgtttggtttccgtttattcacattccaacagcgcttcgtctgttcgagacgccccggaaaagatgatcatgcgggtgccgctctccggaaggtttcccttccgatccgcagcattccctccgtacgcactcgctatgaaagaggcagccgcaacgcccgggcgcaggacaaccccatcagttcgagatcatgggtgatcacaaggacgcaggcccccctgccggccagcagatccagcgcgtcggcgatgcggcgcatgttgcgcccgtcaaggccgctggtgggctcgtcgaggatgagcacgtccgggcgcttggcaaaggcgcaggcgatcacaagccgctgcttttcgccgccggaaagcgattgcgggtgacgttccgcaagcccttccagcgcgaacagcgacagcaggccgggcacatcgtccgcgccgccccccgccagcgacaggctgacttcaagttcctgccgtaccgtcttcatatggagctggtgatcggcgttctggagcacaatgcccactctggaaagcagtttcgatgccgggaccggctgccccgcgatggcgaaccgcccttcctgcgcggcgttcaggccggtaagcaggcgggcgagcgtggtcttgcccgtgccgttgtccccgatgagcgcggtcacgcccgccgggatcgacacgtccacgccgtcgaacagggccggtttgccggagtacgcgaaccgcaggccggaaacggccagcccgccttcacccggctccagcagttcctccgcgcagtccggcaacgtgcggcggggatcgtctatccgggcggcgcgcagcccgcaccgtccgcgcagggcgtcgtcgtacagcaggtcaaagccgccccgctccgcaatccggccttcccgcatgacaagcacgcgatccgctatgccttccagccagtacagccgatgatccaccacaaggatcgccatgccccgcgccttgagttcggcgagcttgcaggccaaatcctcggtagcttcgggatcgagattggcgctcggctcatcaaggataagggccctcggcccctgcgagaggatggaggccaacccgaccttctgcttctgcccctcggacagttcgtggatggaggaggacaggatcggcccgagccggaaggcccgcgccgcctcatcgattttggcggcgatggcttcgggcgaaacgccctgccattcatgggcgaacgccagctcgtcctcgacattcagggcgaaaaactgctgttcggggtcttgaaagagcgttccggcctcccgcgcaatggcgttgatgggccgggcgtccgtcggctcgccgccgatcaggacacggccttccagcgtcccctgaaaatagtgggggcacaggccgttggcgaggcgcatcagcgtggacttgccgcagccgctggccccggtgcacagcaccagttcgccgggccgcaccgaaaacgaaatatccgaaaccgccgggcacgtctggaacgggtacgtgtaggtcacacgttcaaagcggatcatcagcgcatccctccttccagcggggcccatcccacggcatgttggcacagcaccgccgcagccgccacaaggcaggccgcgaccaaaagccatgtgtcggacgccttccaaaccagcttccggtaagggcgcatcccttcgccgtagccgagccccttgagttcggcggcgatgccgagctcttccgacgtcttcagcgaacggaacagcaacggcgtgaacaccagcctgatcagcagcacgggatggcggaaggcgttccacggggtcatgcgccagccgcgtatccgaagcgtttccgaaacctgtttggcgtcatgcaaaaacgtggggatgaaacggatcatcaccgccgccgggagatacaggcagaacggcaggcgcaaactcttcagggcggtcagcaggctctgcacccggcaggaaaaggccagcggcaggatcacgttcagcatcgtcgccatgcgcaggaacggcaccaccagcgacaccgccgaaaacgcgggcatggacgggatcagcaggctcatcccgaacgcgcaccccatggccagcagcgacatgcccacaaggaccgcatacccgatcagcaggatgcggaactgccgcatcccgagggcatacaccagagacatgccgaaaagcaccatctgcggctcgaccccggacagggccaccgtagccacggacgccagcaggctgacgaacatcttcgcccgcgtatctgccgcgtgcagcccgccgccccagacggccccctcagttacggacaatgcctgcatgacgcagctcccgaacggcgcggacgccggaaaaaagcccgcacagcgatcccacgtagccgatgaccacaatggggacgatgacatacaacaaggccggactctcgcgcatgaacagccacgaaacgcccagcgaaaagactttcgacgtgagatcgtacaccgcgacgccgagcacgggcgcccacggcttccgcatccctccggagcaggccatcgccgcctcggcgcagcccgccgccagcagcatggccgggaggagcgtcacgctgccaccgagcagaagcatactgatgagcatgttcacgagcacgaacagggccagcgtcccgggcttgcgcaccttatagagcatgaccacgagcagcgtggtgaaaatgaggttcttggcgagcaggctcaccggattcatccctccccccaccagcgcgaccagcagggtggaaagcttggcggcggccgagaaaacgccgaggacgacgagttcccgcgcgctccagtaatgacggttgaagacctgtgacggcatccgtattccttcccctcctccccccgacgccgcacgggattaccgtgggcgtccgccgccgtgcagcgtgggaagagttttttgataatataaatgaaattcaatttcaatactaaagcacaggcttcctcatgaaatcagaatctcatgccgaccttgatgttggcgtgcaggccgggttccaaaatgctgtcgtcctgccggtaccgcttgtcgaagaggttcaggacttctgcggccacggtatactgcttttcgtcgccgaactcgaaaccgaaagccacgttcgccgtctgccagttgttgtagtgggtcgtctcgctttcggtcttctcgacggaatttgaggagaaccgcccgtacacgtcggcgttgaagtcaacggtttcgctcagggcgtgcttgaagcgcacccccgccctgcccgaccattcgggtacgccggttttccatgtggtcagcgtgccatagtcgaacttgcgccgcatccatgtcgcggaagcgtacggcgtgaggccgcattcgaaatcatagctcgcggccagctccaccccgtgggtcttcgccgacgagacgttgatgtagcgcgaagtgtcggtatccgcgtcaatggtggggttataaatatagtcgtccgcatcggaatagaaggccgcgacgtctacggacaggccgtcatggacataccgcgccccgatttcatagctgttcgaggtctccggcttgaggccggggttcggcaggatcgtcccgcctcccatcgccgacatcacatacttttcctgcagcgaagggacgcggaatccctgcgcgaacgtggcccgcagcgtcagatccgggatgcccgaccacataaggcccacattgaagaccggccgggaattgtttgaggagctctccgtgcccacgtcatacggggccgtgcccttggagttggtcttgcttccttcggcatgtttcatctcggactggacccacgtataccgtaccccatagctcaacgtgaagtcggcgggcaaggtcgattccatctgggcatacagggcgttcgtcagcatgtcgccctcgtggtaggccgtggaggtgtacgggatgctcttcgccatggatgccgccgcgatctgttgcgcaaaggggggcgcactggccaagatgccggtggcaaggatgcgctccactgaagtggaagccgaagccctcgtatcagccttcagcgtatcatagctgatgtcgtatccggtgatcaggtaatggttgtcgccgatggcccagtccatctgcagcgaggagccgagctgcttgttccggttgtccgcattgttggtgacgaccagcggcatcttcgtgatggccgggtccgtgttcacgtcgttggtcatttccttttcattcttctgccaaaatgcgtcgaagcgcacacggggaagccacggcgtcacgtttttggcttcggcgaaggcataaaccttatcgcgctgccacttggggacgtccacggcgaacttctcatagccgggctccatgctcccggaatggatggaccccttgaagctgtccagcccgccgccgaccgtgaacttgtcggaaaagtcgtagctcaggaacgcgctgccttccttctggcggaaggaggtgttcggcgcttcgccgtcaggcgtgcgcaggttcccctgatcgctgtatgagccggacacgcggtacttgaatccgttcataccgccgaaagccgacagggattcggcaaaaccgttggacgcgccgttataggtcacggacgcctcgccctgaatcggtttgtccccgcctttcttggtgatgatgttgaccacgccgccgatggcttccgaaccgtagagcacggacgcggggcccttgatgacttccacgcgctccacgttggagggatcgatcaacaggggcgtgccgtccatcgacttgttttccacgagcttctgcccgtcgatgaggatcagcacgcggttgggattctcgccgcggatggatatgcgcttaaagccctgcccgccggaattcctgatttccacgcccggcacgtcctgcaaaagctcgccgatggtccgggcgggagaacgcttgatgtcctcgctcgtcatgacggaaacgctcatgggaacgtcctgcaattccttctccaccctcgtggcggtcacgtacacgtcgtccgccttgaccggctcctccacggcataggcggggcaccacgccgccaggcccagcgccgtcaacggcaaggcacgggccagcatcttccttacaaacatcaggcctccaaagcacgcttgagataatcaagcaacagttgtgaaaggttcacctgccagaactgcccggcgagcgtaagcacgatgaaggccccgtcccgttcgacaagacccgcccgctcccattgctcaagcacgggtttccacacctcgcccaacgggatgccgtaagccgcttccagccccggcatgtccagccagccctgctccatcccctcggcgatggccttgaacagctttccctgcgggaacgggcggaacagcatggcgatgggcttgcgtccggcccggacttcttcctgccacgcccggtagtccgactggttcagatagaagaacccgtccagattgccgcccgcgccgggaccgaacgccagacagtgggcgcggcctttgacatacagattgtacaggttgcgttcccgcgacgtccgcgcccagtggctgatcgacaggcggcggtaaaaccctttctgcatggccttcacccctgcggcgaacatggccgactgcatggggacgtccgccccggcgggaaggcgtccgctctcaatggccttggcgagcggggtgttccggtacacgttgagctggtagcagtcagcgccgtcgagcttgagcgactgggccgtggcgatgtccgccagccagcgttccatcgtctgcatggggaagccgtagatgagatccacgatgacggcggcctgatcatagctctgcaaaagctggagctgccgaatcagcgtgtcgcgatcggacacgcggcccatcgtctgccggatctccgtgtcaaagctctgcaccccgagtgaaaaacggtttaccccgccctcgaagcacgcttccatcttgtccgggccgaaattcgacagacgcccttccaccgtgatctcgcaatcgttggcgagcggcagcacggcgcggacttccttcaagatgcgccggagatcgtccgcctgcagcgccgtgggcgtgcctccgcccatgtacacggcatgtaccggcccggcatcctgtccggggcggccccgccacaggcgcagctcctgaatgagcgcgtcggcgtagatccggctttcgtcttcgcggtatgccttgttgtagaaaccgcagtacaggcagtgcgtctcacaaaacggcacatggatgtacgccacggtctttcccgtcctcggctccgccagcaaaggctccagcgtcgcctcaaaatcctgtttctccacgcccgaaccgccaaggccgggatgtacggcgatcttgccttcaaacgcgtacggcagaggatcgaccccctccctagcgaagtaacgttcgagcccctcagccgggacgcttggctgccctacccgctcctgctcggacggaaggcttttttccaatcggatttcagtcatgacccctccgggttcccatcaaaagtacattgaacaatattaagttttattaatcaaactttatgtccgcagatgtacacagtccgccccggcctgtcaaccgtttctgccaaaaggcggaatgctttttattacagcctattttgaaggagattgcccagcgaggcactccggacagacgccgtacagatacagcctgtgttgcgtgggcgtaaatccgtattggcggacaaggcgctcctgcagggcttcgatcttaggatcgacgacctcaatgctcttgccgcagcactcgcagatgagatgatcgtggtgccagtcgctggcctgctcataccggacgacgcccccgccgaaagagacttccttggcaagcccggcctcacacaacagcttcatcgtgcggtataccgtggactgccccaccgtcggatcctgtcgctgaaccaggccgtacagatcgtcaatggtcaggtgcccctcttcctgaaaaaacacggaaacgatggctcgccgctgctgcgtgttgtggcaaccttttccgcgtaggaagcgcgtgaacaccgtctccggatcaacatggacttgtccgcctgacatacctcacccttacataacggttcaagatgtattgaagcgcgggccctgcactccggcccgcgcctcaggcataacggctacggagtgcctataccgcccacagtctattataattgaatttcattttcaatatattcgcataaaaaaatgtggttaaagagccgccagcagccggttggcccaatcttccacgtcgctcccgttcgacgagagattgccgtcgagcttcaagccttccagaatctgaatgccgccgagttcgctcaaacgcgcctcaatcacatccaccgccccgcaaaaatgctcaaaggagctgtccccgctcgcaaagcacgcggtcttgacgcccttgactccaatacgatcaaaggcttcgaacaacggctcgaaatccgtctgcaactcgacttcatcggtcccccatgcggagcacccgaacagagcgacatcccggccttcgcacaggccatccggggaaacgtcggcggcgtcccgtacatcggcgacatgccccgcagcccgcagacgcccgccgaggtattcggcaatatccgccgtgttgccggtggtggacccgtaaacgataagcacattactcatgaaaaagctccacttgaaaaaaagttaatgatcgtgattgtgttcgccgcgacatgcgcatcctccatgcccatgcccgtgttcgccgtggcatgtgcagtgcgcgcattttccgcagcacccgcttttcttcttgcggggcggcacgataagcacacggctcccggagggcgccatgttgaatccgttttcgcccttgaagaacagctgcgacgccggaacgggcgtctggcacaaccgggcctgcaacaccttgctgccgaacggcaacacttcgcttacccccgccgtatcgacgaacaccctgccgccgcacctgtactccctcaaaaagagattcagcagttcgtgtgcggagttgccgtcaaaaatgccctgcatcttcacatgcaggttgtccttgttgtgatgatagttcatctgaaaatcggtgctcatgcacgttctccttcttgccgtgcggattcgctccccagaagccgggaaatggtgctcagactcccgttcggcaacatataaaatgtcttgttgtgtttcttcgccagattcttgactttgatgcaggcgccgtggctgttgcagttcacggggcagaggatgatgtccgcgcgcctgaggctccgctcgagctggcgcgtgccgccctgcagcgagccgttgtggtaatcgaggacgccgccgcccccttcaataaattcgcggtacaacgactccatgcgctcaacgccgccgacgatgagcacccgcttgctgcacagatcgaacgagggacaactctcgtcgcagtccctgccgcaacaggtcccgcaggaatcagccgccatgccaggcaagttcccctgctcaaagcgagcccttccctgcttgagcagcgaattgaccagttcgcgctggccctcgaaacgctgcgtcaacgacgcaagcgcctcccgcaggttctcgttttccgcttcaagttccgggcccctgatttcccacagcgccgtggacgcctcatacatggcgtccagttcggctttcaggcggttgcgttcgtcccggagcgcggcgttttcctgcgcaagcgcacgcctgccctcttccgcctgttccatgccgccgcgcgaagccgcttcgcgctccttcaacagccggatacggttggcctgctgctcgttcttgcgttccagttcaacgataaaccgccggatgcgcgtctgttcctccgcgatgccgtgcatggccatgtggaccgcgccgtagaccgtgcgacgggcttcatccgaaagcctgcgcgtggccgccgcccacaaaaagcccacatactggccggcggagaacgcctccttccactgcgcgagaaaatcctcttcactcaaaagccgcaacggggcggcctcacgctcgtacttccggcggagcagctggctcatcttccgggacagagggttttccgtagcagcggcattgacgaacagttcgtgcatttcaaacggcgtcagttcaaccgccggaagcgacattttcttcaagagatgtttctgttcggcaagcgtgatccccatgccgacaagcggacatctgaacagttcgtccgcttcccatatgccgtgaacagcccgtgaaacaggcgacgcaacgtccaacgcgggttccgcgtccgctgtctgagataaccaactcatagcgttcctccattccgttctgttggaaacagatctgccgtatatgaaaatgaaagtcaagatcaataagtatattttttctctcttccgtcctccctttttcggcaaaacaaaaaggaggctgcccggaaacagcctccccatgtcgcataacatattttactctctaccgatgcgcttccttatatgcgatgacgttcgcctcgctcatcgccgcggcgaaagcccgcacctgcgacgccggaacatgcaggcaggctgtggcggcgtcaccctcggcgtggaacggaaggttgcttgccctgagcagatcgttcaccgtggcccgggccttggcagggtccccagagacggcctggaaaatatagccgccctcgccgtcacgctggatatgccgctgctggcggccgccctccaccacttgcagatgctccaattgaaccgttccgtgcggggacgtccgcgtggtccgggaggtcagcttttccagactgctcaggttctccagaatgggcggattgtcgtcaaggaaaggaagccgctcgccgaacacatcgttcagaatataatcgcgccgagcgatgaaggcatcacgcatcgtttccacctgatgcggcacaaccccaaatcggcggcactgccaaaaacgttgcaggctctcccctcgtgttttttcgtcgcatgaaacgcgccagaaaaaccgtctttacgggacagcaccgccaaaagccttttttccggcggaaacgccgaatggcggccctgaagaaatcctgggccgccattccttttaccgtgccccagtggcgtacacaacccccggggcattcaacgcgcctgcggaactgaggggagttccgaggtatcccttccacaaccccgttccgaagatatccggtttatccccacaggaccagccgcgtctccagcggcgaggccagccctggtgtgacgggaagcactcgcacgccgtacacatgcggcccgctccgggacgggctgtaggcgcaggcgtacacgagcctgtccgccgtgctctcctccgtgcgcgccatatccacgacgtccggagtgtccgtaaaaccgttgccgtcgcccggtccggccacgagctgcacaagcagctcctcgggcttcatcccgccgggcaggacgccgatctgtacctgcatgggctgggtgcccatcagttcctcacccttaagcccttcaatacggatctgctcgatccgaagggagctgaagcgggcgttgacgtcctgcttccaccgggcgaggcgcttggtgagggcgttgtgcttgtcgcgcagttccgcataccgctgcgccgccgggatgtagtagtcgttgagatactcccgcaccatccgattggagctgaaccgcgcgatcaaggactgcatggactgcctgaccgtcagaagccagtcgtggggcatcccttcgaaattgcgctcgaaatacagcggcacgatcttttcttccagaagggcgtacaggaacccggcgtcgtcataatcgctctgttccccgcacagatattcacgggtgacggcgggcccgatggtccagccgttctcgccgttgtacccttcacaccaccagccgtcggagatgctgaggttgacccccgcgttgacgggcaccttctggccgctggtcccacaggcctcgtagggacggcggggagtgttgagccacacgtcgcagccctgaaccatgagccgcgacaccgcaaggttgtaatcctctatgaagaatatctttccgaagaagcgggggtcgagcatgtggcggatcacttcctgcagcatgtcgatgccctgcgtgtcggcgggatgggccttgccggagaagacgaagatcaccgggcgctccgcattgcccacgatgcgggccagacgatccaaatccgcaaaaagcagcgtcgcccgcttgtacggcgcaaaccgccgggcaaaaccgatgaccagagaagacggcgtaagacaggccgccatttccttctgcttttcgtagggaatggcgaacttcttgaaaaattccggcagcgaagcccggagataatccaaaagctgcttcttctggagctgccgcaccgcccagaggccctcgtccgggatttcgtctatcttgctccagatggacgaatccgggctctgctcctgccagccggggccaagcacgttatccagcagcgcccgcatgggcgcccccgtatacgacggcacatggacgccgttggtgacgtaccggatggggatctccgccttgggcacgcccttccagccttcctgccacatatggcgggaaacgtatccgtgcagggcgctcacgccgttggcccggaacgagtaattcaaagccagcaccgtcatttcgaaaacattgcgctcgctcccttcaaaccgccccatccgcacgaattccggccacggcaggccgatgctctgggcatacggcaggaagtacggctccatccgttccagcccgaaacgctcgttcccggcgtccacgggcgtatgcgtcgtaaacaggctgcttccgcgcacgagttcccccgcttcggcgaaggagagcccccgctcctgcataagcaggcggatacgctcaaggatgaggaacgcggaatgcccctcgttcatatgatacacggagggcctgatgccgagggcgcgcatgagctggaccccgcccatgccgagcaggatttcctggcggaggcggcaatccctgtccgcctcgtacagccgggcggtgatcttgcgatcgtcggcggtattgctgggcgtgtcggtgtccaacagatacagcttgacccgccccacacgcaccatccagatctgcgcatggagacgccgccccggaagctgcaacagcacttcgagcggcgctccgccctcatccttgaccagctccagcggcaacgtggcgaaatcgttttcgggatactgggcgatctgccgcccgtccctgtcgatctgctgccggaaatacccgctccgatacagcaatcccacgcccacaagaggtatattcagatcgcttgccgatttcaggtgatcgccggacaggacgccgagcccgcccgaataaatcggcaggcactcgctcaagccgtactccgtcgagaaataggccgccgggcgctccggcgacaacgcgccgaagtcctttgcagaaacgcccatgtaggcgtcaaaggcctccattgtggacttatacagccgcaggtaggactggtcatgcgccacgatgagcaaacgggccttggtcgccttttcgatgaccgccacgggattgtgtccgctgcgttcccactccgccggattgagcgcggaaaacagctgatggcattcgggatgccagctccaccacaggttatgggccagctcgcgcagccgcccgatgggctccggcagcgcggtgacggcggtaaaggcgtgcagggtcggcgtcgtggacatcgtcgcctcaagcacccgcgtcagggatgcgctgctcggcgcgtcacgaagcgccccacgctccacggccttgtccaaggcctgcgtatacgcctgaatatagtgggggaaaaaccgatcccacgaacacgcgccggataacgcgcggacggccgtgcgccgctcgtcgagctgcgccgacggcagggcagcgtagtccagcaaaacggcccgcaaagccgccacagtcccctcatacgaagtctgctggcggtgcaggatcgtaacgccctgctcctgcccctgtgtgtcccgcacccacaggccgaagcccgacaggtccgtggtcacggtggggacggcgtgcgcggcgctttcctgcggcgtgtagccccacggctcgtaccacgaggggaaaacgcccagatcgcaggccgccagcacttcctcgtacggcatgttcaggaagccgtcgttgccgtccagcaaagcgggatcaaaaatgacctgcacatggttttccggcctgttgtccagaccgagccgcttgcaggcgttcaggatggggtcctgcggctggttgtatacgtggtggctgctgatccagtacggcccctgatcggagattttggaaggatcgccgcccacggcatcgggattgaccccgctgtgcccgcccatgacggcgcacaaggcgagcacgttggtctgggactggcgcagcgcctcgttcacgcccgccagcgcgtcgaggaatacgtccacgcccttgttgtggtattcataccgcccggaaatgatgaatatccgggtatccggcgcaagctcgcgccgcaggaggcgtcccgccgcgccaaggagtttggcccgcgccccgaccggaacgtcccgttcggcgctgtagtcggggatgacccgcatgtcgaggccgttgggcgtcaccacgtccggggagcgccccagaaaaaccgtggcctcgtccgccgtgatgcggctcaccgtggtaaagcaatcggcttcccgcgccgacgccgtttccatcgagcatttggcggtgatgttgtaggccccggcttccattttggggttgatctggttcatctgcttgtagatgtcgaacccggatcccgccatcgaccggccgagcatggtcgcgtgcgtcgtaaagaccgtgccgagcttgggcgcgcgctccttcaggtacaagaggcccccgccgcacatccattcgtggaaatgcgcaagcaccgggccggacgcgggcacggcaagcgtctggcacgccgcctcgatcacctcgccgcacgcagtactgaacatgacgggctccacataatcccacccgccggaaatggaatcgatgccgtaacggttccacagggaaaacaaaagctgcccctgattgaaccgatcccgatagccgacaaggatgaccttgggccgccccggaatatcccagcgcccgaagcggcaggccagattccgccgcgccgtgatcgcgcgcagctcctgccagcaggcttcgtccgtttcctcgaattccgcgttgttgcccagatccgggcccaacagatagtagttgtctccgaaaagagcggcggcctccagagccttgctgctcacgacggcgtaaatgccgcccactttgttgcagacttcccaactgacttcaaagagcgtggtacgggacatatcatactgcatacggttctgctcccgcgccggcaaggttggcttccggggttccccggcaagcccaagcgccctcaggcgctttccaggacggcgcttttcgttccggggtcaaggggggacgccgcgtcaagcgtaagcctgaaatcggcgagcacattcatataattgatgtaggcgtcgtacggcgtgccgtaggggttgaaatagctgtgcacgtcgccatccgagaaccacttcgtggacatgtagtaaaaatggtcggaggtctgcagacgccgccatgtgcggagcacgccgggatcgcccgtggccttgaccgccttctccaagcgatagacggattcgatggcgtcgttctgcatgtcgttgccgagccatgcggtgagatcgcgctcggcgtccgcccacgacatgaaatgcggcacgtcgaggctcgccaccggctcgaaccgggccgccgcttccgaaggcgtgatgaacgcgaaaccgggcgtccgcagcatgacctcgggcaaggcttccataaaggcgaaaataccggtggattcccattgatgctccccgaacgtctcgtaatccatgaacagattgatgagatccccggaggcgttggcggcgtgcgcccactcggaaaacttgtccgccgtgagcggaaattcgggccattggtggttcgagaaccggaaggcgatgtcgtccgagaggcggtaattcttgagcagaagcttgaggcgatcgcaccccgccgggcggtagacgaagttcgggctgcgccagccgagcacgtgatccgcaccctcggcaagcacggccttgtagcccatcgcttccacggcccgcgccagatcgttgttgtagataagttccgtattgcggaagacacggggcgttacgccgaagagcgcttcgatccgctcgtcgtgcagggcgacctgttcccggaactcctccggggaatacaggaacgccagcgaatggttgtacgtctcggaaagcagttccacgcatccggtggccaccagttcccggaagctctggatgacttccggcgcgtaggcctcgaactgatcgagcgccgttccggaaatggagaaactgaccttgaacctgccgtcgtatttgcggatcagcttgagcagaagcgcgttcatgggcaggtagcatttacgggccaccttcagcatgatgccgcagttcgcgtcctcgtcctcgtaaaaggagtccacgccgatgtcgaaaaaggtgtagtgccgcagcctgtacggctggtggacctgaaaatagaaacaaagtgccgacatatcattttcccccggaaacaagttgcgcgtaaatggcgttcagacgatcggccacgttttcccaacggatggccttgagctcctcgcggcaattcctgacttcctcggcggcgagaaacgggtacgacaagatcgcgcagatcttgttcgccatttcccggatgtcccaaaaatcgaccttgatcgcgttccgcaccacttcggcgacgccggactggcgggaaatgagcaccggcacgtcataggccatggcctcaaggggcgcgatgccgaagggttccgagacgctcggcatgacgtagaggtcgctcaccgcgtacatatgatccacctcctcatccttgaggaagccggtaaaatggaaatggctgccgatgcgcagctgcgccacccggcggaccatgttcggcagcatgtccccgctgcccgccatgacgaaccgtacatccgggatgcggtcgagcaccagcttggcggcctccacaaagtagtccggccctttctggaacgtgacgcgccccatgaacaggacccgcttctcgtgcgcgcagcgttccgggaccgcatagacgcgatccgcctcgctgcgggaaacggcgttgtgcacgacctcgatcttgtcccccggaattccgtactgccgcatgaccagacgcttggtgtaatggctcaccgccaccacgcgatccgccgcctcaagacccgcgcgctcgatgcccgccacgtcccggttcatattgtcgccgctccggtcgtgctccagcgcgtggatatgcgccaccagcggctttcccgtcagcttgcggacaaggatgcccgccggataggtcatccagtcgtggacgtggatgacgtcgaaacgcgccttccgggcaatggctaccgccgcgcaagcgtagcgatagacctcgctcatgagatccgggccgtagccgccgtgcagacgcaggatcgtttcctgcgtcgaagaaaaaacgtccgcgttccgtttcaccgactggaggcgttccagctcacgccgccgctcgtcatagctttccggcgtgtcgtaagggagcagcaacgagtccacgtgctcgatgtgcagcttttcgcgccacaattcccgcacttcctcattgatcctgaggttccgggccgtacgctccaccctcgtgccggatgccgaacacagcgacaggcgttcccccacccgcaccggggcgtccaagggggtctgcggcaagacgaacaggatttccgtgcctttcttcgccagcgcccggcccataccgtagcacgccgtcccaaggccgccgctcttgtagggcggaaattcccagccgaacatcagaacgcgcatcagttccctcctttccgggcgttggcctcccactcggcatagatgccgggagcggcctccttgagcaagtgcagcaaacgcaggcattcggcgacgctccaagcctgagcgatgcagccgttgggaagatgggggggatcgccgtcaaaaatttccgaaacggacccgatccccgcgtcgccgaggtgctgggcgaacaagggccgtatggtccgcagcagctcccgcaccgagccgggcacgtcccatgccgcccgcaatacggcttccccgtacgcccccagcagccacggccagaccgtgccctgatggtaggcctcatcgcgttcggcggggccgccttcatacagaggacgataaccgggcgcgctcggtgccagcgtccgcaagccgtacggcgtaagcaggcaccgccgcacgcgggaaagcacgctggcatacctctcctcgtccagaaccggatagggaagcgaaagggcgaaaagctggttgggacgtacgcacgtttccacgccgccgtcgcgccatacgtccgcgaggtagtcgccccgctcgtccgtaacccaataccgcttgaaaaagacggaccgcatggcgtccagctgcttcgtccgccgccactccggttcgccgaacgctttggcgaggctgtccgcgaaggccagcgcgttgtaccacaaggcgctgatttccacgggctgaccgtggcgcggggtcaccgggcgaccgttggcgacggcatccatccatgtgagctgggttccggggttccctacggaaaggaacccctcggcgtccggcgccacaaaaggaaccttgccgccgccgtagtgttcaatgatgttcttgatgaccggccagcaccgttcacggatcaaacccttccgatccggcagcgccttgagcatctgctgcacggcccagacataccagagggaggcgtccgccgagttgtaggcgtggttgccgtcggcggagaagacgttggggatgagcccgtccctgacggcggaaccgaggccgagcagcacgtccgtgccctcttcgggccttccggcatagaaggtcaggccgggcagcgcgataagcgtatcccgcccccacgatccgaaccagtggtagcccgccgtcacggcaaggcctccatcgggcctccggacaagaaagcgctccccttcccgggcaagatggccttccagactctccgaggaggccgccaaccccatgcggcgttcgacttcccgccgccagatctcgccgatgacgttgtgcccgtgctccgtctggagcgcctccgtcgaagcggtgaggaacactggtttgccgggaacaagcctgatctcgaactggcccggctgaaacagatcttcctgataggcaaagccgcgctcccgctccaccaaatactccacattgaagcaccagtcgggagcggcgttgaagatgaagccgccctccacctgcatgaataggggcggcaatgcctcatacggcctcaggcagatcccggagggggccgaaagcgtttcgggacgcagcgcgggattcgcgcgggtgaggtcatgggcattgcgaaaggcgagcaagggcttcacgcgcaaaaccaccggaggcgtgtcgggagcggtgccgcgcacctcatacctgacgagcagcaaacggtgtccgggaatcagcatcaattcccgcgtgagcgtcacctctccgaaacggtaacggaacacaggccattctccggcgtccatttcctcaagatgctcattcccgcgcggataaaagacgccgggatgcttacggcaggaaaaacacagttcccgcccgcccacgagcaatgattcctcaagagacgacagcaatacatgccgccccgccgggctttccagatcggccacgagcaggccgtgatacttccgcgtattgcagcagatgagcgagctggaagcgtaatcaccgaggccgttggtctcgatccattctttcctcagggattttctgatattctggcacgtgggcttatcgaaacgaaacttcatgtccactccttcacggcaaaaggggaaacacacccgtaaaaagcgacaaggcaagagcaccctgcggacagggttaacgaggtctctttagagatggttgacgataagcaagcgccctgtgcacggtggcacaggcggagggagaaattgaagcggcgggaggagccgcccggaacgggctggccagccggagtgcttctacggccaatcgcttcaactttcagtatgcttaccttcctgaaacggaggagcccgtttgggaaggaagactactgacgaacgtaggatactaccatgattaagctatagcttcctacttctgtaataatcattttaggccgaaaatcaagggcacaccagaaatcttattattcttcccagctacagtacagtagacttacacgcccgcaccacaagacgccccatcagccgaaggggacgtttcagtcccgttccggcaacggcggcgcttcttgtgttcgtacatgtcggcatcggccagccgcatcagcgcttccaaggaatcggcctcggaggggtacagcgccagccccatactcacggcggggttcaggtctatgccttcaagatggtagggttcgcttccgatggcttccagcatacggcggaaccgctctccggcaatgcaccgctcgctgacgccgtacaggatagcgatgaactcgtcgccgcccagccggatcagcgtgcccgccgtcgacagggcgctctggagccgttccgcgaacccgttcagcagctggtcgccgcaatcatggccgtacgtgtcgttgacctgcttgaagtcgtccagatccatgtaacagagcgcaaagggccgcttcgcctccatcgccttctccagttcacggaacaagacacggcggttgggaagccccgtcaggggatcgtgctccgacatcaactccagccgcttcttttgatgggcaagatccacggccaaacccaccacgcatgagaacaggatgctgataaaggtggcgatgccgaaagaagcgtaccggatgctccagttccacccgcccttgggcgtcacgctcaggatccagtccgcattgggcaggtgcaccttcctttccacgggctcgatcagcgtttcggcggaacgcaacagcacgatccggtcccccgtgtcggggtggatgcgggaaagctggtacacgtagttctgcttgtcgaggtattcgagcttcaccggatccagcacgtccggaaaagcgaaggtcacgcagatgagcccccagaacttctcctgggccgtgatatccccttccggctcgcccatgaacacgggaagcctgaccgccatcgcgtagccgccctgaatcagatcgaacgggccggcaatggtggccttgcccgaatcccgcgccagcagcgcctcgcgggaacgctcggggttggcgaacagatcgtgcccgatggccttcttgttgcgctcaaacgggtatactttggtaacgacgccgcggggggccagattgatgttgatggtgctcgggtgcatcttcaccaactcttcggcgtaggagtagaactccgagatccggccctccccctgccgcagcagggcttccaccagataggcgctcgaaaaggcgttggcgacgacgtattggatcttcgtggcgtagctgtcgacgacgtaccgggctttttcccgttcctgaagcacacggacgtgttccagacggaagaggaaaagataactccccagcagacagaccagcaagacgccgagggcatacaagacgctccggcagttcccgccttcccgcaagacgccggtgtcgaacgtccttcgctctccgtgccgtatcagtcgctgcatcgtcattcctcaaacgcactcatgcggggaaaagttcttcaggcagacaaacatattctttgaccatcccacgaatcccctctttcggcaagggcttccggattgccgaaagaggtcccgccgccgtttggcccccttcccccccctctcttcagcaacctcttgccgaagtggagaaaaaattccgtcagccgtgtcggaatcgactgatatttttcaaccttcttatactctggacttttttcacacaatcgtcatactactgtaacatacttccagggcccgcctgctacaagacctgcatccatgccgtcatgcgaaggaggagcgatcgtggtttccaaagattccgaagggtacccggagcaactgtgcgccacagaggaaatcagtgaactggcctgccccaacctgtacctgaaccgggaaatcaattggctggacttcgatgcgaaagtgctcgacgaagccacggatgccggtctcccgctccttgagcagcttaaattcctctccatcttctacaacaacctcgatgaattctttatggtccgggtggcgaacatctatcgccagtaccgcagcggggccgtgtcctcgtcgccggaccgcatgacgcccgccaaacagctcgccgaaatccggcgcaaggtgcttattctggtttcccgcgcccaggagcattggcgcaagcggctggccccgcagctgcacgacaaaggcgtacgcctgatgcgctatgcggacctctcggaaaagcagcgcaagtttctcgacggctacttcaggaacgaaatctaccccatcctgaccccgcaggccatcgatccgggccaccccttccccacgatttccaataccagcctcaacttcatcatccagctgcgcagccgtgacggcgtcacccggttcgcccgcctgaagtgccccaacaacatctcccgcttcgtcttcatcccccggaacaaggaggccaaaacctatgcctcgctcggcttcaacgccaacgtccgtgacagcgacatcatcctgctggaagatctgatcgccgaatacctcggcgcgctgttccccggcaacactgtcgtcaacgccgggctgttccgcatcacgcgcaataccgacgtggagatcgaggaggacgaagccgacgatctgctggaagccgtcaaggatctggtggaacagcgccgcttcggcgacgtggtgcgccttgagatagcccacggcacggccaaggaactcagcgcgttcctgaccgagcggctggggatgcagccgttccagatttaccgggtcaaggggccgctggccttttccgaactcatggccctttacggcgtggacaggccgggcttgaaagaatcccccttttacgggcgtacgccgagcgtatttcaggaaggcgacatctacgcgcacatccagagcagggatgttttcctcttccatccctacgacagtttcaccccggttctggatttcatccgccgctccagcgaggaccccggcgtcatcgccatcaaacagacgctctaccgcgtgggcaacgcttcgcccatcgtgaaagcccttatcgaagcccggcgctccggcaagcaggtcaccgccgtggtcgagctgaaagcccgtttcgatgaggaacgcaacatcacgtgggccgaagagatggagaaggcgggcgtcaacgtagtctacgggctcgtcggcatgaagatacacgccaagctctgcctcgtggtccggcgcgaaccggagggggtttcccgctacgtgcacatcggcaccggaaactacaacccctccaccgccaagatgtacaccgacatggggctgatcaccgccaacccgaacatctgcgcggacgtcaccgatctcttcaatgtcatgaccggatacgcccaccgcgagcaatacagggaactgctcgtctccccgctgtccatgcgccgctccctgctggatatgatccagcgcgaaacggccctgcaccagcaaaatggaaacggcgaaatcattttcaaatgcaaccagctggtggataaacacgttatccgggccctgtacagggcttccatggagggcgtgcgcgtccggcttcaggtgcgcggcatctgctgcctgcgccccggcgtgaagggcatcagcgacaacatcgaggtgacgtccatcgtcgggcgtttcctggagcacacccgcgtctactggttcaacgccaatggggaaggccgcctctatatcggcagcgccgacatcatgccccgtaaccttgatcggcgcattgaagtgcttgtccctatcctcgatcccggattgcgggcgtgcctgcgcaacgatattttggaaacacacctccgcgacaatcagcagacgtggcgacttcaggaagacggcacctattgccgcatcaagcccggcaagggagaagaacccgtcaacgcacaggaaatcatgatgcgccgcagccgggagtgtgtctgatcctcaaacgctcaaaaggaaaaaccatgaccatacatacggaagaccagttgcaggaaccgcaggccgaaccccaagcgaccccggcgaaacgccccgccagaaccgcgaaaaacgtccccgccgaagaatcgcagcccaagccgaggcccgcccgcaagaagccccaaagggcccagcccgaacaggtacaggaatccgccccggaacccgcagccgtggcggaactcgtaaccgccgccccggaagcctatgaccccgctccggcattgtccgccccctgctccgaaccgtgcccggaaacctgctccgcccccgccgccgaaacggctgaactcgccgaagagacgcccctcaccacggcggtcatgcccgaatcgccggttatggccgattcgctgacgcacgggcagcgtgtggccgccatcgcggcgaccctgtttcaagatctcgccgagctccacgggctcgacgacgtctgggggcacaggctccacctcgcggcgcagctgcacgacatcgggttcgccgaaggccgcaaggggcatcataaaatcagtatgcgcctcattgaggaagatctcagcctgaacatccacgaggacgatcgcccgtgggtcgccctgctcgcccgctaccaccgcaaggcgtggccctcgcgccggcacgcccgcttcgacgccctgaaaaaaagcgaccggaaggcgctgcgcaaggcggcgtccctgctccgcatcgcggacgcgctcgattacacccacacgggcgtcgtcgggaaccttgccgtcgccgtcaagaagcgtaaggtcatcatcgccgtccagtgctccggagactgctccgcggaaatggaacgcgtcatcaaaaagggcgatctgttcatgcacgtcttcggacgggagctggaatgcgtatgtcaggggaactagagcggacggaaaaagccatcggcatcatcgatctcggcagcaactcggtccgcctgctgctcgtccgcgtccatgcggacggatccacgacgatcctgaatcaggtcaagcacatggtccggctcggcgaaggcggattcacccacaaccgccttcaggaagagacgatggcccgtaccatcgcggtgctgcgcgggctggcggaaatgtgcgcggtctatgagacgacggaaatcatcgccatcgccacggcggccgtacgcgacgccgtcaacggtcccgaattcatccgccgcgtgcaggaaaagaccgggatcgacttcacggtcgtatcgggccgcgaagaggcgcgcctcatctatcttggggtttccagcgggctggagcacagcaaaagccttcggctgttcatcgacatcggcggcggcagcaccgagctcatcgtgggcgattcccagtcctacgtgaacctcgattcgctcaagctcggctgcgtgcgcctgaccaacctgttctttgaggacaacaaagggccggtttccgcctatacctacgcggcgctgcaacgttacgtccgcaacgaggccctgcactccttccagcgcatcgcgggtttcgagatccccgaagccgtcgccagctcaggcacggcccagaacctcgcggaaatcgccgccgcactggagcagcagggcgccgcgcgcacgggcaaaccctcaacggcttccaagcatgtcctcagctatgacggactgcgccgcgcggtcaaggaactgtgttcccgcacccttgaggagcgtaaatccgttccgggcatcaatcccaaccgggccgacgtgatcatcgcgggcgcggccatcctccagaccatcatggaggagcagggattcgagagcgtgaccatcagcaaccgcaacctgcaaaacggcatcctcgtcgactacctcatgcggacgcatccgcagaaggccggttcccgcctctccgcccgcgaggaaagcgtcctccagctggcacggttctgccgcttcgaggaaaaacattcccggcacatcgcgaagctggcccttgaactgttcgacagcgcgcgggccatcgggctgcacgacgccccgcccgtatcgcgcgagctgctgtactatgccgccctgctgcacgacatcgggatcttcatttcctttgcgaaccacaacgcgcacagccactatctgatccgcaatacggaactgctcggtttcacggaacgcgaaatcgagctcatagcggcgctggcgttcttccaccgtaagcggccctccaagaaaatcccgctgttcctccagcttgatgagggcatccgggaagaggtacgcctgctgtccctgttcctgacccttgcggagcgcatggacaaaagccaccgccagatcatccgttcggcccgtttcgggcgcacgccggacggggaactggagctgtgccttcgtgcttccgaggtctgccccatcgaaatcgaagagatcgggcgcagccacaagctgatcaagaagaccttccacacgcatttcacgctttgcccctgtctcgaaaacggggcgcctattgtctgaaaagctgggggaatgagtataccggggaaggggccgccatccggccgtcctcccctcccccggtcccctcctctctccttcccaagacttttggctgatggggaggcggcgcggagggaggtcgttccggctgaggcggggattcctccgcaccgtcagccgtttttgcttacagcagttcaccgtactttttgatgaagatgcccttaagggttgtcgtcagcagcatgtaggccgcaagcgtggcgaacagccacgggaagaacgcgcccggaagcggcatcatgtcgagagccccgccgactgtcgtaaacgggatgcacgttcccgccagaatcccgagcgaagtcagccccgtcacctgccacgaggcccggctacgcaggaacggaaccttgggcgtacgcagcatatggagcaccagcgtctgcgtccacagcgattccacgaaccacccggcctgaaagaggcccacgaacgcgacctgcattcccgcgtccagcgtctcatacgcccccccgaacaccagcgggcagatgtaggtatacagcagaacgaacgtcgtgatgtcgaataccgaactggcgggcccgaaccagatcataaaccggctgatcgatgaagcgtcccatgtcttcggctgcttcaggaaatccgcatcgacgttgtcccacggcatggccgtgcatgaaatgtcgtagatgaggttcagcacgaggatctgcagcggggccagcggcaggaacggcagaaacgcgctcgccgccaataccgagaacatgttgccgaagttggagcttgccgtcatcttgatgtacttgatgatgttggcgtagatcctgcggccctcgatcgcgccctgctccagcaccatcaaatccttttccagcaggatgatgtcggcggattcgcgggcgatgtccacggcggaatccaccgaaatccccacgtccgaagccttcatcgccgccgcgtcgttgatgccgtcgcccatgaaacccacggtatgcccgttctcgcgcaggcacgtcacaatgcgcgctttctgctgcggagtcagcttggcgaaaatgtccgtacgctccgccgccgcgcgcaacgccgcgtcgtccatcgcctccacatccgaaccgagcagcagggaatgggaccgcaaccccacctgcccgcacacgctgcgcgtcaccgcgtcgttgtccccggtcagcaccttgaccgcgacgccgtactccttcagcgcggcaacggcagccgccgcggaatccttcgggggatcgaggaaggcgagatacccgatgagcaccatgtccgactcgtccgccacggaaaacgctccggcgaccatcggattcgtcttgtgggccacggcgatgacgcgcagcccggcctcgttgtaccgccgcaccgtggcgaggatctcctcgctcaacgcgctggtgagcggctccacattccccttgtattccgcgtagctgcaaatggagagcatttcctccaccgcgcccttggtgatgatctgcgtcttgccggccttgtccgccacaaccacgctcatgcgccgccgggtgaaatcgaacgggatttcgtccaccttccggtaatcctgccacagcgggagcatgttcgtctcgtaagcgtgatccacgatggcttcgtccatcaggttgcgcaggccggtctgatggtagctgttcaggaaggcgtggcgcaggacacgctcatccacattgccgtgcacgtcgagcggatattccagcacgatgcgatcctgcgtcagggtcccggtcttgtccgtgcacaggatgttcatggccccgagattctggatcgcattgagatgctttacgatgacctttttccgggacatggcgaccgcgcccttggcgaggttggcggacacgatcatgggcagcatttccggggtcaggcccacagccacggacagcgcgaacaacgctgcctgcacccagtcgcctttcgtaaagccgttgaggaagagcaccaccggaaccatgcccaccatgaaccggatgagcacccacgatacggcgttcacgcccttctcgaaattcgtgcggacgcgcgtttccgcaacgcgccgggccaaagccccgaacagcgtatccttgcccacggcgatcacgagggccagagccgaaccgctgaccacagtactgcccatgaacgcgagattgttgcactccagcggattgccgcccgtctgcggctgcgcggcggtccacttttccatcggttcgctctcgccggtcagcgatgactggctgacgaaaaggtccttggtttcgacgatgcgcacatcggcggggatcatgtcgcccgcggcgagccggatcacgtcgcccacaacaagctccgaaatggggcgttcccggctctcgccgtcacgcaagaccgcaatggtggtcttgaccatcgcctgcaaacgttccgccgcgttgcccgagcgcacttcctgcacaaaccgcagcgtgccgctgatgaaaaccatgatgccgacgatgagaacggcggtgagatcgcgatcctccggctcgacgatgacgtagtcggtgatgaaggaaatgaccgccagaacaatgagaacgacggtaaacgggttgatgaaggctttgaacagacgcttcaggatggagtccgcctttttgcgggcaagctcgttccgtccgaacagcgcccgcatgatgtcgggccggggctgtccttggggcgtcgtttcgtaggctgcaaagacctcttgcggcgtctggcgggccgcctcaagaagccgggcggacgcggggcgggcggccagtccgcagacctcctgcgtgacgttcaggtccttttccgtttcgagctgctttttaatcatagtttcaacctcatgaatgcttttcggatcaggcgggaaccgatccgacggtgactccgaatcatggctgcagggcagcctttccacgcgcggggaacaaacgccgcatgagcggcggggttcccggcgaacagcctgcggcaacaggcaatgtccacaagacacctccgatgttgtcattgataaaacgaagcggcgacggagcgcagcctcatgcaacgctgagtgagaagccctgaaaagggcacggcaagagacgaacggcggttaacggccgcgttcgtgaggagaaaggcgcaatccgaagagggtgcgccgcgagaaggacgggcgaagggagaaagccccggccatacggagacagccgaaaggcgcaagtaaagacgccgggagctggaattcccgaaaaaaacggacaagggcacgcgagacgccgcccgcatacgaatacggagagaagaagggcatgtaaacctcctgagccgccgggggtgcgccccggactcgtcagaaggccaggagaagcacgccggcagcggttgctgtggcactatcagttgacgggcaactgtgactactgtcggacgacatgcttttcctccttggcgagatgtggaaatgccgctttcgcagcttccggggggatccctaaacaactctcccgttaaagtcaacgcatgatatgcgatcgtacagcttccaatacggtatccgcggcggcaaacgggctttcccgggttttggcgcggaacaacgtgatttcaatcattgtcttccccgaaccccggcgtgtacgggtaggaaaaggccgccgatttcaaggcggcgcaaaccgccggaggggtcccatgaccacagctacggacacgttcaggcagcatctgcaagaaacccaagccatccatttcctcccctacgtgggggacggctacgccgacgccagaccgcgtatcctcatgatcggcgaagccaaccacggcacggcgccggacggagcagacagaacgtacactgacggggtcgtgcgccgggcgctccaagacgccgccgaaggcaacggcaaccactgggtccgctacatccgcaacatctccgccatgctcaccgggaacgcttacggtgggtccaacgcggtgtgggataccgtggcttacggcgtattcttccagcacatggaaacggaaacgcaccgcaaccggtcccgcgccacgcctgaagaaatcgcgctcggacgcagggcgttctttgccatgctcgacgtcctgaagcctgatttcgtgatcgtctggggcttgaccttattcaaacaacactggctgtcccccgaaagcggcatcaccatgcttgctcccggcctctgcgcgtatgtcttcacagatcgcccggatgtccgtatctggcactgccaccacccgtcgcgggatttcagccatgtttccgaacaccagaaatgggaggccgtccggaaactgcatatccgctgatacccctcccggccttattcaggtttcccttacgcgtccggatgccgcctcccggatggggaccggccttgtaagcccggaggctttgggcttataaggtgccgtatgcgccgcacggacaatcccttgcggaaaacggcgcatctttttcggcatccattgcgaggcgggccatgtccatccggatcgatttcttgagctacgagggggaacgcaacaacgagcggcacccccacgcgcagtttgtcctgcccatcgccggtgaactggaaatctccatcggcggcgcggaaggcaggcttaccccctcctgcgcggcgttcgtcgcgcccggcgtcccgcattcgcagctggcgaccgtctcgaacgcctttcttatcgtcaactgcgatcttgccgaatgcggcgtccctgcggcggaacaactggcggaacaaatctttcttcccgtttccgaagccacccgacacctgatcgggttcgcggagctgtccagagaccgcttttcacagccgggcaccacgcaatgctggatgcccctgctcctcaattccttccttgagcgcccggtatgccgcccttcccggctcgccgtactggaaaggctgatcgatacccaccccggcgcgccgtggactgtgggcgaaatggcccggcgcatcggcatcagcccaagcaggctgcacgcgctgtcccgctccgaatggggcctcagcccgcaggcatggctggcggaacgccgtatcgggcatgtgcggaaatggctggcggaatcggatctgccgattgcggatctggcgctgcgggccgggtacgccgatcaaagcgcgctcacccgcgccatgcagcgcctgaccggcctgacgcccgccgcctaccggaggcaaacgcgattggaacaaaaaaacaggagtccggaacaagactcccggacccgcccgtgatattgtccgttccggcatgaggacgaggcggccgcttcgccctcggcaatccccattgcacaaggagcggacatgtcggccctcaacgtcaccatcgatccatccatcaagggcgcgtggcccgaagcgcgtctgggctgcttcatctacacggcggacgtacgcgcccgcgaagactctctctggacctgcctcgaaaacgaggttgccccgtacctcaaaaccatgctggagaccacgccgctggcccagatccccaacctcgccgaatcccggaaggcgtacaaggccttcggcaaggaccccggacgcttccgcgtttcgtccgaatcgctgtaccgccgggtgcgccagggcaaggccctctaccagatcaacagcgtcgtggacgccaacaaccttgtctcgctcgaaacgggtttctccctcggctcttacgatacggcccgcatcggtgcggacatcgttttccgtctgggcaaggccggggaggtgtatccgggcatcggcaaggacgacatcgcgctcgaaaacatgcccctgctcgcagacggggaaggcgcgttcggaagccccaccagcgactctacccgcgccatgatcacgcaggaaacccgctcctgcctgacggtcgtgttctccttctccgccagatccaagcttgaagaagcccttgccctgaccgtcaagcgtttcggccagtatgcgaacccctcgcacgcggaatccttcatcatagaatagcattcaggccggggcggaacgcagccaagccccgcgcggaaccgccgaccctctggaggaaaacgtttatggcaaaggatccgaaacagatgacgggctatctgtatgtgctcgccgccgccgtcctgtggtcgctcatcggccctttttccaaaatctgcatggaagaaggccttgcgccgctggaggtggccttctggcgcgccctgctcggcggcatctgcttttttgcccaaacgggcatctgcggcggggcgcgcatccctgtgaagcacgcgctgttcttctgccttttcggtgtgttgagcatcagcgtgtttttcagttcgctgcaaatctccatccagctgagcggagccgccatggcgatggtgctgttgtatacggctcccgcatgggtggccgtattctcccgcatcctgttccatgagagcttctcctcccgtaagggcatcgctctggggttggccctcttcggaacggcgctggtgtgcttctccggcggaagcctgaacgccgagccgtccgtgctcggcatcgtctgcgggctcatatccggcctttgctacgcctcacattttcccttctatgtctggtggcagccccgctactccaccgccaccctgtacgcctacatgctgctcggaggcgcgctcgccctattccccttcgtggatttcgcccccacccgctcgtggacggcgtgggccaacctgctggccctcggcgtggtcacgaactatggggcctacctcgcctacgggcggagcctccagagcatcaatcaagtcaaggccgccatcatcgggaacatcgagcccgtgctggcgacattctgggtctggctgttctggaatgaaaacttctccgcctacgggtgggcgggcagcgcgctggtcatctcggcggtattcctgctgacggcggatcgaagctgatacggttcttcccccgttacggcacacggcatgttctttggacatgccgttttttttgcgtcctcccgtaacacggtttttcaaaaatatatttatgatttcaatgtaatatgatattttatatctaccatattccattgaataaactaacaacatcttttctttgaaccagataggaatgcaaacattcaggcactgtaaatcatgaaagttgagtgcacaatctatagtatgccttctttacgtttgagcaatcaatttagctcttttctttatttcatcatgctgattgcttccatattgaaactgtttcatgaaaattcttatgtaacgcgatagacgtcttttgctgtttattcaaacaatgaaacatatacagaatggattttttatccaaaaaaatactttatctttattcttgacaaagaaaatagtttctgtatgaactgaaccatcgcgcaatcggtagttaatgcattacatccacagattgttatattattcattatctatcctgtgtggtatttccggcatactgcgtttctttagtacacgcaacgttcgccggatttccttttcgagatagtgcctgttcagcagtaatcctctgcaccaggttttatctattgtttagaggctgcttcaataacaatcttacagttggaggatggaagcatgaaactcggcactcttttgagcgcgtttgcctgtatgactctgagcatggggttcgccacccccgccaaagcggaagatcccatcaagatcggcgtctacatgcctctgaccggacagaacgccttcgccgggcagcttgaacttgaaggcatccagcttgcgcacaagatcacgcccaccgtcctcggccgccccgtcgaactggtcatcgtcgacaacaagtccgacaaggtcgaagccgccaacgccgtaaagcgccttgccgagcgtgacaatgtgacggccatcatcggtacgtatgcttcctccctcagcctcgccggaggcgaagtcgccgaacgcgccaaggtgcccgtcctcgccacttccagcaccaaccccctcgtgacgcagggcaagaagtactacttccgcgcctgcttcatcgacccctatcagggagccgccgccgcggcctacgcctacaagaccctcggctacaagaaggccgccgtcctcaccgacgtggtcagcgactacgccgtgggcctctccaacttcttcaagaagtcctacaagaagctcggcggcgaactcgttgccgatatgaagtacagctccggcgaccaggacttcaccgcccagctcaccgagctcatcagcaagaaacccgacatcgtcttcatgcccgcctacttcgccgaaggcgccatcatcatgaagcaggcccgcgaactcggcgcgaccttcgtgctcatgggcggcgacgccatggacaaccccgacaccgtcaagatcgccggcaaagccgccgaaggtttcatgcagacggcgttcccctatgacatgaccatgaaggacatgaacgatcaggccaaggccttcacggaagcgtggaagaagaacttccccaacaaggaccccaacgtgaacgccaccctcggctacacctgctacgacatgatcatcgacgccctcaagcgtgccggaaaggccgaccgcgaagccgtcaccaaggctctcgccgaaacgaagggcctcgccacccctgtaggaatcatgaccctcaacgcgaaccatgatgccgaaatccctgtcggcatcctcaagtacgagaacgggaagcgcatctacctcggcgaaatcgtccctgaataagccccccctgtccacggcggtggaggaaggttccgctttcctccccgccttttttgccgtccccggcctcattcgggagggttcctcccaggcggaaggatttacggattccaaggattttcaacgaataaggcaggcactatgagtctggacatgttcttccagcacttcttcaatgccctgacactgggttccctgtatggcctcatcgccatcgggtacacgat

SEQ ID NO: 7501 - DNA, 4847 bp, Unknown
  gut microbiota DNA sequence
tccagaaaggggcctctccccctccaatcttttcctagaaagattcctcaacaacaagatcctccagcggcttgcgcttggtgtgccgctcggaggggtgcgaatcttccgccgggtaaccgatggcgaggatgtattcaggctctgtcccttcggggatgcggaattgctcgcgtatgggcgcgggatcgaaatgcatgagccagcagctgcccaagcccagatccgtcgcttccaaaagcatgtgtgtcgccgctatcgccgcgtcggtgtcgggcttgctcttgccgtcaaagggacgcacccagacttcggaagcgacactgcagacgatgatcgccagcgggtagcctttcacgttggtgcaggcggaaagttttttcagcctttcagggtgctgcacgacgaggaacctgaacggctgggtatttttcgccgttggagctacgcgccccgcctcaaggatgcgctcaagtttttcggcctcgacgggcttggggagatacgagcggacggcatatcttttttgggcaagcgaaaggaaatcgttcatggcaaacctccaaagttgtttgcctgtactatagaggtacgattcattcttgcaagtacgcacatttttatcctatagttcctaaaaagatactaaggggacggcttgcggcatgaagcagatcaaaccgcaatacaactgctcgttggaactggcgatggaactggtgggcggcaaatggaagctcgttcttctgtggcacctgctgagcggaaccaagcggttcagcgaaatcaagcgcaagttgggggacatcacccagaagatgctgaccctccagctccgcgaactggaggctgccgggctgcttacccggacggtttatccggtcatcccgccccatgtggaatattcgttgacggagagggggatggagctcgccccggtgctgcggggcttgtgcgcatggtcgggaaaatacgccgtggagaaggggattacgcttgccccgctgccgccctctagggacggaaaggatttgcccggcgcggcggaatctttcccggaagcttgacttttgggataaagatgggtaacgctctggagcttacaaattgtgaagttcctgcatcacggagaagttcatgttcgaaagtttatctgacaggttgtccagcgcgttccgctccctgagcggccgggcgcagctcaccgaggaaaatatccgcgatggcctgcgcgaggtgcgtcttgccctgttggaagccgacgtcaacttcaaggtcgtcaaggagttcgtggagcgcgtgcgtgagcgcgtgctcggccaggaagtcgaaaaaagcctgacccccacgcagcagctcgtcaaagctgtgcatgacgaactcgttaccctgctcggcggcgaaacaaccgaactgaacctgcgcggcgcgcagcccggcgtcatcatgatggtgggccttcagggttccggtaagaccacatcggcgggcaagctcgccaatctcctgcgcaagcagaaaatgcggccttatctcgttcccgtggacgtgtaccgtcccgccgccatcgatcagctccgcacgctcgcccggcagctcgacatcccctgctttgcttcttcggcggatatgaagcccgtggacattgtccgcgccgcgctcgaagacgccaaagagaagcagtgcaccgtggtcatcctcgatacggcgggccgcttgcacatcgacgccccgctcatgcaggagctggtggacatcaagtccgccgtacagccgcaggaaattttgttcgtggccgacgccatgaccggtcaggatgccgtgaccgtggccgaagccttcaacaaggatctggccctgaccggcgtggtcctgaccaagatggacggcgatgcccgcggcggcgcggccctgtccatcaagtcggtgacgggcgcttcggtcaagtatgtcggcgtcggtgaaaagctttccgatctcgaggtgttccaccccgagcgcgtggcggggcgtattcttggcatgggcgatatgctcacgctcatcgaaaaggcgcaaagctctttcgaggcggaagaagccgaagccatggccaagaagctgcaaaaggccacgttcgattttgaggatttccgtacccagatgcgccgcatgaaaaagatcgggtcgctggaaaatatcctcaagcttattcccggacttggtggcctgacctccaagctcggcgatctgaaggccccggaacaggagatggcgcgcactgaagccgtcatcaattccatgaccatgaaagagcgccggaatccggatctcatcaacggcagccgccggcagcgcatcgccgccgggtccggcacgaccgtggcacaggtcaatcaggtcctgcgccagttcacccagatgcgtcagatgatgcagcaggtgatgaaccccaaagccaagggcggcaggccgaagatgcctccgttgcccaaagggatggggggaatgggcggtatgcccggtatgggagggctccccggtatgggcggcctttccggtatgggtggtttgcccggtatgggcggactccccggcatgggcgggatgcccggtttgcccggagctccgggcagcggtaaatccgccacgaaaaagaaaaagacggaacggcagaagcgcaagaaaaagcgttgatcctcttccgtttgcgggccgcgtcggcacccggtcggttattccccggccgaaaggctggtggcgagtttccggcccagtcgtgcaggtcgcaaggcattccccttgtccttgagcaacaactttatacgataccaataggagtgttccaatgtccgttaaactgagacttacccgcatgggcaacaagaagcgttccttcttccgcatcgtggccaccaacaccgccagccgccgtgacggtcgcccgctggaattcctcggctactacaacccgcaggtcagccccgccgacatcaagatcgacaccgacaaggtgcagaagtggatggacctcggcgccgagatgagcgacaccgtgcgctcgctcatgaagcagtatgccaagaaggccgacgcctagttcgcctttcggttgtccagcttttcagcgacccggtcggcctctgcgggtcggctcgggtcgtttgtctttttttatgttgctgtgaagagaacggtaagcgcccttcttttctctaccccccgcatttgctgatgggtggagaggctccgcgtcaaaaattccggcggcacgcttggagaacacatgttttcccgaaagcctctgccgctgagagctgttttccctcaccgaacaggacaggtacgctatgaaagattttgtggaatttgtcgccaaagggcttgtggacaagcctgaagacgtgcaggtcgtcgaggtggaaggggaacagggcgccgtccttgagttgcgcgtcgccaaggaagatctcggcaaggtgatcggcaagcagggccggaccgcccgtgcgctccgtacgctgctcggcgcggcctcttccaaggcccatcgtcgcgtcatgctggaaatcgtggagtagttcgtggcggaacagcgcaacatcccggccgatctggtcgaaataggcacgctcgcccgtccccacggcatccgtggcgaaatccgcgtcaattactatgccgactcgttggagctcctgcgcggggatgtggtgtatcttcaggccgggaacaagcctcccagaaagatggagatcgacaccgtccgtatgcatcaggggacgccgctgatccggtttgtcgaggcccccgatcgcacggccgccgaattcctgcgcgggcagacgcttctcattcccgaatccgcgttgcccgaacttgatgaggacgaggtgtatctgcacgatatgctcgggctttccgtggtgcttgacgcgacggggcaaaagctcggcgtgctggatcacgtccttttccacggagagcaggaactttggtccatcctcacgccggaaggcaaggaaatcctgcttcccgccgtgcccgaatttgtcgcggacatcgatctcgataccgagatcatccgcatcacccctcctgaagggttgctcgaactctatatgtagcgccttcaccgccgttaccgtacgccctcatctcaccgttgagagctggccatttcctctaaggggatttttgggccgtgggcataccgtttcagtacgtcggtgatctaacgacaccaaaaggccgtccggaagggcggccttttctgttttcaagggaaagaaacggctccggtttgatacgggtaggtgttccacgaaagagtttttcagccgccagaatgggggcatcatgctctttcggcgcactccataaggatttccgcaacatcatcggggcggtggagatggacgttgtggccggaggcgatttcgacgacgcgccagagggggagcctgcgggcacgctccacagaaagggcgatggggtgaagcttcacgggcgtgcaggaaacataggttacgggaacgccgttgccctgggggacacggacgtcgatgcgatcgaaatagggcttgatgggctgcggggtcatgtggtctctgaaccattcgcgcatggcctcggtggcgaaatgtcccggagtcggggcgggaatgctgatcccgccgtcatggcgcgcccggaggacacgctgctcggcttcgtcgttcgggatcagatccattgcgcattcgccgggttttgggaccattgcgtcgagatagacgatatggcggaggcattgcgggatgcgctcggcgaccgccgtcaggacaatccccgcgtagctgtgccccacaagcacaacgtctcgcagg

SEQ ID NO: 7502 - DNA, 516 bp, Unknown
  gut microbiota DNA sequence
agatgataagaaatagtcaactttttaggatatttttagtgtttaatggaaaatagccctatatttgcccattgaaaacgattgcagatgtagaaatttgctttgaaatgataataaaatcaaaagaattacagaaaagatgttataagacatgttttttaatttggttggtatcttgaaaagcggctatctttgcaacgttatcctgaaaacaatctttttaccttaaaaaaaactaatacctattgaaaactgaaaaaggaggctttgtgaaaagcttcctttttttcatttctatatgagaccctttttgtatctttgtcgcatccgcaatgcgggtaatatctaaatttaaattgtaacaagcttatgttttccggaatagtagaagaatgtgccacactggtggctatggtcagagaccaagaaaacgtgcactttactttcaagtgttcgttcgtaaatgaattaaaaatagaccagagcgtatctcataatggcgtatgccttacggtt

SEQ ID NO: 7503 - DNA, 2505 bp, Unknown
  gut microbiota DNA sequence
gaatgaaaataatactttcaaaagctctataaaaattaaccataacttttctgaaaatcttataatggcattgagagacaataatactcaatgcatttatcatgctgatgattctattcatagaaatttattttcaggattggttgaatatgagactttgcgtcaactccataataaaaataatcatatgttaggttgcctcttaatctcttgtgattctgcttattacgacctaatgcctgatagatttatatggactcttgatcgtaaaacaactcatacatctctgatagaatttatacaaaatatactgaatcttaactggctggatgctcttgctacgcttgctgatattcttggtatgaattatgagaatatttttttcttttcgtcggcagactctatcccagaaaccgttgcagcctctggggggataccggacacaattaaccttcctagccaaagaggcgaggctatatgtactgatttgactgagattatgagtccatcgggtcaggtcattggaggcgtcgttcaatacgtcattggagagcacttactttgcctccccgcaacctccatcaatggcgttttgtctattggcaaatgtaacccaccggcttttttttctgaatcaggacgaaatggatcgaaatcggagtgctatcatcattttttgtgcagatatccgtaccgctacagcgttgaataatgcattgaaagaatgtcgaagggacacaggagattttatcgtcactggacatctggggacagacttgtcccttctgccgtggaattatctatacggtcatcccgttgtattcgtacctgctcccagtacaaaaagtttcgcctctgtaaaagcttaccgtgagtacattttaggggcatctgtagaacgcttctctgttgctagcaattttctccttcacgctgctccgtcctgtgatctccagaatatggcagatgacttggataatgttgcggaagcagaattgctccgtacggcagtccatatcgacgacattgagcggccttctgtttttttgcggaatttggtcaacaacgcccgtggatatgaggagttcattcagtggggtaagaacgctggcttttttgccgtaccgaagcaggaactctccttacctccaaaaccaacctctgctatcacattcttcgatcctgatacggttgaggagaattctcagccaacggaacttgccgacgttaccgcagaacatatctttagcggaattacgatgcttcatggtcccaaaaatgtgggaaaaagtcatgttgtgcttagtgctgccaatagtttaatcacgcataattccctttggggtatatttcctgtaaatggtgtatctacaaaaactctgctcgttgatagcgaaagcacgccaaagaatttcaaggatcgtcttggaaaatatgaattgcagaaacaaaaatataatttcttttccatctgtaaacttgcatcacatcaagatgtaaatattctggatgaagggttccaagatactcttttggaaaaagcaaaagaagaaggtatccaaacgatcttttttgacaaccttacatcacttgtcccggatggccgtgtttataacgcaagttccgtaaatggcattttccgatatctggaagaaatgcagaaatgtaacatcgtgcctatactcgtccatcatagtcataattgtccagacaacgctcccgagaaggcaactatgcgtggaacgagtgagttctctatccgtgctcatacggagatcgtcattacctcacctaaaaacaaaggtgaaaactccctacctagttcgattcttgatgctgtgaaccaaggcgatttcatagtgggaattcatttcaaggtgtgcaaggctgcacgcattttggaagggaaaactttttggctacagatgcctttcagtgcgacaggattcaagcccctcaccataatcgatcgggacggcaaagaactccctttgagcttccttgcgggtggggactctgaggggagtgttgttccttctatggaaacagcagatgaactttctgatgaggaaagacgagtacttcaaaaagctggcagccagggtaaactgcgaaatgccgaggtccaaagccttttggggtgcggtgattcaaaggctggaagaattctcgctggactcgtggataaagggctgctgaaaaaacaaggagaaggccgaggctgccattacgtcataacggagtagctctccctatactcttttcaaaatgaaaggcgtttttccctgtgggagaacgccttcttttgcgcctttgcaatcattttttcacctcccaaattccttcaaaacacctcaaaaaagccgtaaaaggggattttgtcaaagttcactacaataatttcatgtagttaaactagttttactcaagctgcctttttaaattttaacgctgtgctatatgcgccttccaatccggctgaatatccatctggacttcgctctt

SEQ ID NO: 7504 - DNA, 694 bp, Unknown
  gut microbiota DNA sequence
gaaaaatagctgttcagttcgggatcggcgggccggagcttccacgccgcgtcgatgcgcaggaatgcttcggcggcgggggcggcaaggcgcaccttggtcttgccgccgaacagcgtacggacgattccccgttccacggaacgctggtccgccccgtacaaagccttgagcaggggataacagcggatgcgccccggctcctcatcgggcgcgaaatccgggcgttcgggttccagcgggtaaggctggcgcatggcgtcctcaatatccgcattttccagcagttccgcatggcttttcattttcccgtcatcatagaggagacgtccgccgttcttggtgaggaaccacacatgccccgcgtcgtcggtttccgtgcccgtaatgaatccggggtaggcttcttgcagacattcaagatccaattcgagatcgccggcacaggccgggatggcccagagcaggcaacagaggcagaaaatcagtttgcgcatcggtcgttccttgaggagcttttggctcggcagggcgttcttctctgatttccggaatggcgcccgagagcggttctactgcggaatgccggaaatgtcgaagcctgtatatctttttgccaaggacattggttttccggcatattcgaagcggtgcggcggattgttgagcgacgcgggggaacggaaaaatcttt

SEQ ID NO: 7505 - DNA, 694 bp, Unknown; identical to SEQ ID NO: 7504
  gut microbiota DNA sequence

SEQ ID NO: 7506 - DNA, 2568 bp, Unknown
  gut microbiota DNA sequence
ggtcgtttcacatgcggcaaagcccagtacgtcgtgaagggcttttaccgtatagcgtaaggcttcttccacgctggctacggagccctgaatgaccagtgcgccggtgaagcgatccacaaatccgatctggacggaagcggcttttgtagcgaagtcgcctgcgatcatagccgcttcacgagggctcagcgtcaagatccctaccgcttcagcgccgggaacgcccatttttttggcgagatcctcgtcagggtgggcgatcagatgagcaatcgtaacctgtttccctggtacgagttcctgaatgatacgtgctttttcttccatgagctcaattctcctgcgcacagtctggcgtgcatcagcgaaggacgttgaccgcacaacccgtgcgaatccgataaggataagtgaacccgctccatatttcaaggaggagttcggtgagaggcctgtggctcaatactctctttgcttcaaaagcaaagacagcgagcagacatctttcagcgatgtaatcttatttacccgtttcttctcgtattttttgttcaccaagcgcctgttgctcttcttttcccatcgggagccgctcgcaggcaatgcacctggcggcaatactccctaaaagcattcctccaacaatatctatggggtgatgctgccccaaccacactcgggaaaaacccatgagcgcgattactgccgagaggaaaagggaaaaaggacggtttctgaaccaaagtgccagaggcacggctgcggtgatgatagtcgccgtatgccctgaagggaacgaagcatattgattgataaagcccaaagggtatggaggccagggaaatcccggtctcggcatacccagcccgtatttcatgatctgcatgacgaagcacaaaaagaagacgctgaacaaaacgcaacgcagaacgaacattgtttcctgccagtcccgcttagtgagagcgacaagcagtaacacaagataaaacaagtagatgagcggattgccgatatgggtaacgatgctcatgaagcgagtaatgtgaatatcggctgtcgctagcggagaaaagaattggcggacgggttctccccaccagccgaggcagaggataacgaacgccattatggcaccaagcggtgccaacaggcaaagatgctccccccatcggtagtccggggacggagcaagaagcgttctgatagagggaactattggattcataaaaaattactaagtccggtggatggaatagacgcgttttgtcgtcttagctccctgatgagccacagacatgttctcttcaaaaggagagcttgcttcgggataagaagataaacgaataggttacttggtacaatgtattatttcccgccgtcgtcctgttccggcatgtccggatgagcatatgcctctgccttcatcgaaagggaaagatgtttcacctatgttttccatgacatattgcgcaacgctcccgttttgctatgctcaaagaaaaaacaggagaagcggcatggaaaaagtgcttcgtatcaatgtcggcgctgaaaacggccccgtggctactatagaggaactcggcgcgtacgcgggccttggagggcgcgctatgacgacgaccgtcgtatgcaacgaagtccccccgaattgccatcctcttggtcctgaaaacaagctcgttttttctcccggcctgatggctggttcggctgcggcgtcgtcgggccgtatctcggtcggatgcaaaagcccgcttacggggaccatcaaggaatccaactcgggcggcaccggcggccagttcatggcccgccttggctatgcggccattatcattgaaggcgaaaggaaaacagacgacctgtggaaaatcgtcatcacgaaagacgcggtaacgtttgaaaaatgtaatgaataccgtatgttttccaactatcctctagttgccgcccttcaggaaaaatacggcatggaacccggatatgtgaccatcgggactgccggggaaatgctcatgtgcaattccaccatctgctttaccgatcctgaaggccgggctacccgccatgccgggcgcggcggcattggagccgtcatgggctccaagggaatcaaggctatcgtgctggacccggcgggtactccggtaatccgcaaaccgaagaacgctgaagcgttcaaagcggcgagccgggccttcgcacaggggctttcgtcacatcccgtatgcggaacgggacttcccgcgtacggaaccaacgttctcgtcaatatcctgaatgaagcaggcggattgcccacaaaaaatttctcggtcggccgttttgaaggcgcggataagatttgtgccgagacgatggtggaaatccagaaacgtcgcggcggcaatcccactcatggctgtcaccgcggctgcattatgaaatgttccggtatttgcgtggatgaaaacggcgaattcgtgtccaagcagcctgagtatgaaaccgtctggtcgcacggtgcgcattgcggcgtggatgacttggacaaaatcatcctctgtgaccgtcttgagg

SEQ ID NO: 7507 - DNA, 877 bp, Unknown
  gut microbiota DNA sequence
tccaacagcaggatcctggaacatgtattgacagattttcacaagtatgtacagcttgcaaggacgatgtcgattgaagcaccggagcgtgccgaaaagtcaatagaagaacaccgagaaatactggaggcaatcaaggcaaaagatgcggcaaaagcagaacagcttgcaaacgaacatatattacatgtgatggaaaatctgcatctggaagaataatgaaagatgccgcgaacagatagaaaggagacaaacatcatggcaaaaattaaaatgacaacaccaatcgtagagatggacggggacgaaatgacaagaatcctctggaagatgatcaaagaagaccttctggagccatatattgaactgaacacagaatattatgatctgggtctggagcacagaaatgagacgaatgatcaggtgactatcgatgcagccaatgcgaccaagaaatataaagtagccgtaaaatgtgcaaccatcacaccaaatgcagcgcgtatgacagagtatgatctgaaagaaatgtggaagagcccgaacggaacgatccgtgcaatactggacggaacagtattccgtgcaccgatcgttgtaaaaggaattgagccatgtgtaaagaactggaaaaaaccaatcacgattgcaagacatgcatatggagatgtatataaaaatacagagatgaagattcccggacctggaaaagtagaactggtatacactgcagaagacggcacagagaccagagaactggtacacaattatgccggaccgggtgttgcacagggaatgcataatctatgcggatctattgaaagttttgcaagaagctgctttaattatgcattggatacaaagcaggatctgtggt

SEQ ID NO: 7508 - DNA, 331 bp, Unknown
  gut microbiota DNA sequence
agggagggaaaacctttctccagaaaggttttccctcccttcccccagacccccatccctccttttcccaagacttttgactttatcgaatccctgctcgcggatttcccgctttccgtgaaggcgtttttcatttcaaggaaaagcaacatgtggtgggtcggttcaataccaaccctactcctttttcccatttcaccaggggacgaaagccgtgccgaacttgtcttgtctcccccacccgccataaacccatacgaaagtctttgaagaggaaggggggaggtttggaggggggaaggagatactttctgaagaaagtatctccttc

SEQ ID NO: 7509 - DNA, 6195 bp, Unknown
  gut microbiota DNA sequence
aatagtattcttgtgccgaggtacagccttctttttatgcggatgcggcaagaggtcttgattcttttttcacggagtcctatacctcgtattgtctattatcgaatgtcgacaatagaacaaaatacaggcaacgcacaggcggataagaaggagtgcctcatgcaggaaaagaagcttgagatgtacggcggattgttcggcggcctgatccctctcatcgtactggtgggagggctcgtctggctgtcggttgcggagcggggcggcaccaagcccttttgggcttgcgcgtggatcgcgctgtgcgttgggatcttcttcgctaaaaacaaagaggaatactgcaaagcggcgatgcggggcatcggcgaccgcacgggcatcgtcattgttacggcgtggctgctggccggggtgttcggcaagctcatggccgcaggggggcttgtccaggggcttttgtggatgggcatgacgaccggggcgcagggcggcgtcttcgtggtgctggtctttcttgccgcgatgctgttcgccctcggcacgggcacgagcaccggcacctgcattgccctatcgccggtgttgtatccggcgggctatttcctcggggcggacccggccatgcttgggctggcgatcctgtccggcgcggctttcggggacaacctcgcgcccatctccgacaccaccatcgtctcggcctacacacagggggccgaaatgcgcgacgtggtgcgcagccgtttcccgctggccatttcagcggcgtccatttccgccgtggtgttccttgtgttcggcggaggcggcgaagtgcggccccttcccgaaatgcaggccagcctgaacccgtcaggcttgttcatgcttttggcgcttgggattgtcgtcgtctcggcgctcaaggggcggcacatcattgaatcgctcatttacggcaacgttgccgccgcgttcgttggcatgttgatcggaaccatccggcccgccgacatcttcagcgtccccgccgcgaagggaggctccacgggcctcattcaggccgggatagacaacgtggtcggcgcgatcatctttgcgatcctgattctggcggtgacgcagatattggtggaatgcggcatcatgcggcgcattctggacttcgcccagagcacgctggttgccaccgtccggcaggccgaactcttcatcgtcggcgtgaccattctggcctcgatccccatttccgccaatgccccggcggaactgttggtgggtccgagcatcgtgcggcctttgggcgagcgtttcggcctcgcggcggcgcggcgcgccaacctcatggactgcgcggtgtgcacgatcttctttgtcctgccgtggcatatcgcggtggcggcgtggtacggagcgctttacagcgcggcggaaacctatgccatccccgccccgcccatcagcgcggccctgtacaacccctattcatgggcactgctcgcggtgctgctgttctccgccttcaccggctggaaccgcaagtacgccaaggatgaagcgcccgccgcatgactttggcagggctttgccccggaaccaagccgagcggaggggagctacctccgcactccgcaaggggcgggccacccttccagcgctgctcgccccttgatccgacatgagcgcatcctgccgtgacaggatgcgctcagatctttttcactttcaaagaagttacgccggttatccggctgcgatttcgcggacggccctgacaagcagttccgcttcctcttcggtgttgtacggcgcgaatccgaccctgatccagccgccgatccggtctacgcccaccctgtgggcgagcgtttccgcgtaataatccccatcggcggcaaagatgccgtatcggtcgcagagtttccggcatacgtcgccgggctgctgcccttccagcgtaaaggcgacggtggcggtcttggggccttcggactggtacagcgtcaggccggggacatccgtgagcccttgccggatgatgccggcgagggcgttttcgtgccgttcgatgcgctcgaagccggagacgaggcgttcgcggcgcgtggaaccggtgccgatcccggcgatgaagtccacggcgggcacgatggacgcaatggcctcatggctctgcgtcccggtttcgagcttgccgggggccgtggagggagccggatgcaggcggtaggtgtcgagcgcctcaaacacgttctttcggattgctgcgatgccgatatgtcccccgaaaaacttgtagacggaacagaacagcatgtccgcgccgatggcgtccatgtcgatggccttgtgcggggcgatgtgcacggcgtccacggagagcagcgcgcctacctcgcggcagcgccgggagatgcgggcgacgtcgttgatggtcccgacggcattggaagcgtagcccacggcgacaagccttgttttcgcgttgacgatggcgtcaagatcggaaagatcgagcgtcagggctttgggatccaccggcagatggcgcaccacgatgccccggtcgcgggcggagagaatccacgtgtcgatgtgcgaatggtgatccatctccgagacgacgatttcgtcgccgggattccagcttcgggacagcgcccgggatacggcgaacatgtttgaggtggcgttggctccgaaggcgatttcgttgggcgcacaggccagcagatcccccagcgcggccttggcggattcgatgagggcttccgtctcttcgctgctcgggaacttgccgtgtgtgttggctacgccccggcgcatgtagttggtcatggccgtgatagccgtggcgacgacctgcgaaccgccggggccgtccagatagacggccttgttgccgttgtggagacggcacagggccgggaacaagcttctgatttcctgaatgggatagatgtagttcatgattgtgttccttttccgttcatggtcggcggggcgggacgtttcctttgacgaggcagtgaaagagggtgaatctgccggatttgcggggggtgcgggccatcctcccggcttacgccggaacgaactcctctcgcgccgcctccccatcagtcaaaagtcttgggacgggtggggtccgggggagggaaacctttcttcagaaaggtttccctcccccctgcacgtcgtgttccccaacgtcccgttacagcccgagaagccgggcggcgttgtcgtacaggttggctttcagggcgtcgggctcgaaaggctgtgcacaccagcccttgtagcactgctcgaagccgcgcagggggtaggcgctggcgtagagcgtgcggtacttcaggtagctgttggcggccttcacatagtcgcgggcatagggccagccggggatatacaggtagcagtcaggcatcaggtagacgttggggcagcgcatggcgacggcgagcatgctctgcacctgcggccagccgccgtgcgagatgcagattttcatgttagggtacttgttggcgacatgctggatagtgatcggatcggaatagctcagatccggtccgtagcaaaagctcagggaaatcagcgtgatgccgccaagctcattcaccttctcataaacgggatcgatgattggatcatcgggtttcagggacgggtcgcaccagcccacttcaaggctgatcccgcggaatccccagtcgcggatgcagcgggtcacttcatccacggcgtcgggcgcattgggatcgatgcccgcaaagccgaaaaagcggttcggatctttctggatgaactcgcggatgtcggcgttgtcgacgaagccgttgggcccgcagttgcgcccgatgatcccggccttgtcgatgccgttggcctccatttcctgaaagaacaagtccatgtcgcccttgtcggcggatgggatggggtctttgccggtctcgtagggatcgatataggcgggatcgtgggaaccgtcgtgtccgccgaacatgccgccggtggtaaggaagctcttgaaggggggacggatgcgaaagtcgaagagcatggtctttctcctcaggatgaagggttacagcgtgagcgccgcttcaaagccgctgtggacggcgtccatgattttcgccgtcttgcggcagtcgccaacggcaacgcaggggcagtccagcgcggcggagagtccgtcggacagggcgttgtcggggcggcagcccacggcgacgacgagggtgtcgaagccggagagggtttcctcccggcctttttcgttgcggacggtgacggcgttgcccgcgccgatggaaaggatttcgttgccggaccgcagtttgatgccaagggaggccatgcggcgcagcaggagcacgcgggcgcaccattccatatccttggcgagctgcggcagcatctcgaccacggtgacggagcggccctgcgccgcgaggtattcggcggtttcgcagccgatgagccctccgccgagcacgaggacgttcttgcccgcttcggctccgctcagaatgtcctgcgcggtgacggctccggcggcggaggcgcagaaacgggggacgacgggcagactgcccgtggccacgatcacggcgtcgggggacaggttgcggacgctttccggcgtggcctcgcacgagaagcggaacgtcacgcccgcgcgttgggccttgccatacaggtaatccgaaatgaggcgcagatcttccttgtgcggggggacggcggcaaggctgatctgcccgccgtgccgatccgagcgttcgagcaggatgacctcatgcccccgctcggcggcggtggcggcggccatgagcccggcgggtccggctcccacgacgaccacccggcccggcgtttccgccttcgggacggtgggcatggaggcttcccggcccgagagcgggttgagggcgcaggtgatggggatcatcttgtcggcgttgcccacgcagccctgcccgcaggccacgcaggggcagatctcgtccttgcgcccggcggcgtatttttccaccagatgcgaatccgcgatgagcgcgcggcccatgatggcgaagtccgctaggccgtcgcgtacgacccgttcggcggtgtcggcgtcggaaatccggcccgtgagcatgacccgcgccctgtccccgagcgcttccttgacagcggcgctggtggcggcgttccacgccttgggcatacaggtggggggcgtcatcagctcgaagcagcattgcatgcccgccgtgatgtcgaaggcgttgacgcccgcgtccgtgagggtgcggcacagctcgacggtggtgccgaggtcgataccgttcccggtgggcacgtcctccacggaggtatggcggtagaggatggggaaatccccgcccacggcggcgcggacggcgcggacaacctcggcgggaaagcgcaggcgcttggcgagcgatccgccgtagccgtcggcgcggcggttggtgaatgcggacacggcctgttcgagcaggtagccgctggccccgtggatttccacggcgtcgaacccggcggccttggcgcgcagggcggccttggcccacgcgtccgcgaggcgggcgaactcggcctcatcaagggtgatggcgttgtcgggctcaaacacgcccggaatgacgcccatgacccggcggggcatgtgggaatattcgggatgcgcgcggcccccgccgtgctggagctggatggcgacggcggccccgtgggagtggacgcgttccgcgagcaggcgcaggccggggatgaaacggtcatcgctgatgtccagcccgtgcaggaaagtcttgccggaaacgtcgatggaggtggcctccacgatgaccagccccacgccgcctttggccctctcctcataataggagagcagccgttccgtcacatagccgccgtccacggccatgtcggtcaccatccccggcaggacgaaacggttcctgaccgtcagggtatggatgttcatgggggtcagtgaaacaggggtatgcatctacgactccttcctttcattcggcagcttcttcggcatcgttttccacgcgcaaggcgacagccctacccataccggcaacacgcaaagtcggcatgagggaaaacacaaaaaatttaggggtatgggtgagggtttgggagggggaagggccccttttccaaaagggg

SEQ ID NO: 7510 - DNA, 1259 bp, Unknown
  gut microbiota DNA sequence
actcccttcgcgcggcctccccatcagtcaaaagcctttggaggggaaagggaggggtttggggatgggaaggggaccctctcttcaaaaagggtccccttcccatccccagttaacaacctaagccagcgccacatcaaggcacatcatcaccacaaaaccgatgatgacgccgaggctggccgcatcgccgtggccggaggcgtgggactcgggaatcacttcttcgacgaccacaaaaatcatggccccggcggcaaaagccagagcaaagggaagaatgggttcggcgatacccacgaccagcgccccgaaaacagcggctatgggctcgacgatgccggaaagctgcccaaagaagaaggcgcgatttttggaaaaaccctcccgaagcaacggcacggatacggccacgccctcgggtatgttttgcagccccataccgaacatcagggtcatggccccggcgatgctggcttcgggagcgcctgaggccgcagccccgaacgctacgcccacggcgagcccttccggaatgttgtgcagggtgatggcgaacacgagcagcgcactgcggggcagcttcgaaggcgggccgtcagggacattttccgtaggatggatatgcggcaggatgaggtcaaccaggcgcaatacccctgccccggcaagaaagcccagcgccacgggaacacaggccaaccggccgagatgtgaactcatctccagcgcgggggcgagcaacgaccagtaggaagcggcgatcatcacacccgccgcgaaaccgagcatcacgtcgagcgtccggcgggaaaacgatttcgcggtatagaccatgcccgccccgaatgcggtaaacgcccatgtacagcaccccgcaagcagagccatccccacgggtgaactgaaaaaatccgtcataaatgccgcctccgacaattgcgaaaaccatcctgtattcaatcccgacgcactcattccggcgcgtgcgaagggaatatccatcctcttccatgcttgaaatcccttccagaaaaaccataaagccggagaaaacaccagagctttagaggcgtccggaaaaaaagccgattacccctttgggcaaccggctctgcaaccatcccgcccagccgttcccctctcttcatatcagggaaaaccgccagcagggattcaataaagtcaaaagtcttgggagggagagaggagggggcttgggggagaggagagggaacctttcttcagaaaggttccct

SEQ ID NO: 7511 - DNA, 5230 bp, Unknown
  gut microbiota DNA sequence
gaacctttcttcagaaaggttccctccccctccccaaaccccaccccctctctcccaagacttttgtccttatcgaatccttattcgcaggttgtgcgccttatcgtatgccgttcgttggatttggttgcaggggctggagggatgctctggctgattgggaggttggggtgttgggtcactgtgaagcatggatcttaggcaggaattttttatcggtgtttcgtgaaaaagggagagtctgctggattggaaagccgcatgaaggggatttttcttttgaaatatttccgcatttttattatatctccttataatcattgattgaaggatgccgcagcgtattctgggcgaaaccaaagcttcttccgaggaggaatctctatgcgtggtttcatgaaatatgcgtgcgtgttggcccttcccctgctcgtagcggcgggtgcggcgcaggctcagacgtggcccgatggcggcaacccgtccgaaggtgccaccctgtatgatagctgtgtcccctgtcatacgctgaacggcaacggactcgccggaaagtcggtatccgatctgatggacaagatgaaggcgtaccagagcggcaccttcaccgacgccaaattgcttggtatgcagcaggtattgaagccgctgtccgacaagcagcttctggatcttgcggcctatatcaacaagatgtaattccgcgaaagaaaggtttcacctccccttgctcctgaaagcggcggccattacggccgccgctttttggcgtccggcgcggaggcgctccttgtccctgcccggggcttgtgttacagcaaaagtcccttgagtacctttctttttctgggatgcccatgtcttctttccgttctattcaggtcgtcaatgtccgctggttcaacgccacagcgtggtatgggctggaactcgcccgtttgctcaatgctgcggggcatgaaagccgcgtcgtggcgctggccgatacggaaaccttcgccaaggccgaggaaatgggattgcgcccgttggctatgccgctgaatgccaagaatccgctggaattccccggactcatccgtgacatggggcgtcttgtccgcgcattccggcccgatgtggtgaactgccaccggggagaatcctttttgttctgggggctgctcaagggcatgggcggatacgcgcttgtccgcacgcgaggggatcagcggctgcccaaggggaacctccccaaccgaattttacatacgcgggtggctgacgcggttgttgccaccaactcggtgatggcccggcattttgcggaaaagatgcatgtacccgctgagcggctgcatatgatcttgggcggcgtggacacggagcgtttccggtttgatcccgaaggcagggcggaagtccgtgcccggtatggctttacggatgacgaatgcgtcgtcggcctgctcggacggtttgacctcgtgaaggggcaaagggaaagcatcgcggcgctggcaaagcttgtgggcgaaggcgtgcgaaacatccggctgctgcttctcggcttttccacggcgacgcttcaggaagaggttgaggcgtggatccgtgaggcgggcatggagcggtatgtgaccatcactggaaaagtcccggatgtgacggcctgcctgtccgcgctggacgtgggcgtggtcgcctcgttgtggtccgaaaccatcgccagggctgcgcttgagatcatggcctgcgggcggccgctcgtatccacttcagtgggggtcatgccggatctgcttcccgcgtcggcactggttgcgccgggggatgtggacgcgctggctggcgtgctgcggcgggcggcgacggatgaggcttggcggcggggcttggccgggcattgctccgagcggattatgtccctccgggacaaggattttctcgaacagacgttggctgtctacgcggaagcgtaccgtcggcggtgttcatcctagggccgttcaactttaggatggtaccgctttcaaggcagtctgccccaaggaacgctgcggacagggattcgacaaacacaaaagtctttgaagggaagggggtgaggggggaggagaaatgcgggaggtgctctcccattctccagaaagtttctcctcccctccccaacgcctccatgcctttccaaagctcatctgcctaaaggaggctgcgagatggattgcacttttgccagcgacaataccagtggcgtgcacccgaaagtgatggaggccctgaacaaggccaacgtgggcgcggcggagccttatggcgacgacccgtggaccgccgaagccgaaggctgcttcaaggcgctgttcggcgatgacgtcgacgtgttcctcgtcccgctcggcacgggcgcgaacgtgctcgggttcaaccgcatgatacgctcgtggcactccattctgtgcagcgacatggcccacacgcacacctcggaaagcggggcggtcgaggccgtcgtgggctgcaagatgacccccatcccctccgtgcacggcaagatttccgcaggggctctttccgcatacctgacagatatgggcagcccgcaccacagccagcccggtctggtggcgctcacgcagtccacggaagtggccacggtgtacacgccggaagagattaaggccattgtcgacgtggcacacgcgaacggcttgttcgtgcacatggacggtgcgcgcatcgccaacgccgcggttgcgctcggctgtgacgtgcgttcctttaccaaggatctcggcgtggatatgatgtccttcggcggcacgaagaacggcatgatgatggccgaatccgtcgtcgtttttaataaggatttcgtgcgggacttcgtgaccctccgcaagcagaacctccagcttgcctccaagatgcggttccttgcggcccagtacatagcgtatttcaaggacgggttgtggctggaaaacgcccggcacgccaacaatatggcccgtctgcttgcggatctcatttccggtatgccgcacgtggagctggctcatcctgtggaaagcaatggcgtgttcgtcaatatgaagccggagcacatagccgcattgcagcggcagtacatgttccatgaggttgagccgtccgcgcataccgtgcgctggatgctcagcttcaatacctctgaagagcaggtacgcgcgttcgccaaggcgatcggcgcattggcatagaatccgtttaccggttccctacggaagcctttcggaacctctccgaaaggcttttcgttttgcggaagagcggaagaagagccgccgcgcgagccagtacggttttggtggtcagccctgcgctgcgtcggaagaggaaaaacttgcagggatcagggaaacttgtttttgaaaggcatggaggcattgggggagaacttttggggagaagagcttccttttcgcaagcctgtcggcgtggagctccccctctatttctaaacttttacttttatcgaaagccctgtccgcagccttttgaagaaccggataccatctgaagcgatatgttttcaaagaaagacatgctacggtgtttccggtggcatggtgccgtcatcaagccgtgtgatgagcactgccccgtccgtgagttccgtcagcgcggtttcgagggccgggatgttttgatcgggaagcagcagttcgtaggtggcgtccacgccgaagttttccgaggcgacggtggcccggtagtccggcagcaggcggcgaaagaccgtaatatgcggatagtcgaggaccacctcgacgcgcgcggggatcatatgttcgcgtgtgggcagggtttcgaggcccagtttgaccatgccctgatatgccctgacgaggccccctgttccgagcttgatgccgccgaaatagcgggtcacgaccgcggaaagctcaccgaccccgccgtgcagcagcatggtgagcatggggcggcccgccgtgccgtgcggttcgccgtcgtcactgtagccgaccttgctggtttggccgggcgctccggcggcgtaagcccagcaattgtgggtcgcgtcggggaattcctgtttgatccgctcgatgaaggatttggccgcctccggggtcggcgtatgggcaaggctgacgatgaaccggctgcggcggacgatttcttcgcagcggtgcaggtcttctggggccagatccgggatgaaataggagacagacatgggaacaaggtgtagcgtctgacgggcggcgggtcaagcttgcgtgccgtcatcaccgtatttcttgtactttttccgggacgatatttttttctgaaaaaagtacagataaggctttacaagagggctggattcttataaacaggaatcgttcctgattgagaacgtaagcaacacactctacataacctaactatccccaaaggagacttcccatgagcaagaccgaaaagaatctgatggacgctttcgctggagaatctcaggctaaccgcaagtacctcgctttcgccaaacaggctgacaaggaaggcctgcctcaggttgccaagctgttccgcgccgccgccgaagctgaaaccatccatgcccatgcccacctccgcaatgccggaaagatcggcgacaccaccgccaacctcaaggccgccatcgaaggcgaaacctacgagttcaccaagatgtatcctgagatgatcgccgacgccaaggaagaaggccaggatcgcatcgccaagtatttcgatatggtcaacaaggttgaagaagtgcacgccaacctctacaagaaggcccttgccgatccttcctccatcaccggcgacctctatgtctgtaccgtgtgcggctacacgcaggaaggcccctgcgacaagtgccccatctgtggcgccgtggctgccgctttcgccaagatcgactagttttttgcgcctaaggtgagcaaggaaagggggccaagaaaacagcttttcgactcccttcccaacgttttgactgacagggtggcctgaccacaacgctagtgcgcaagatcgtcaagcatagcccccactcagtctggaaaaggcatctctcccgtaaggaagagatgcctttttctttacgatgttaaccgattgaaacagcgtggtttccacccatcacccttttccatgcattgctgaaaggggaaagcggcgaagagggattcgataaggtcaaaagtctttgaaaaaggaggggagg

SEQ ID NO: 7512 - DNA, 180 bp, Unknown
  gut microbiota DNA sequence
ggtcacttgcgcgccctcggcgtccgcgccgggcgtgaagctcagggtgcccgtgagcgcggcctcgctgtcggcaaccgtcgtctgcgtggtgtccagcgtgctcagcacgggcgcgtcgtcaagcgcgtccacggtgatttggccggtcgccgtgccgcccgtggtcgtgatgctcac

SEQ ID NO: 7513 - DNA, 1089 bp, Unknown
  gut microbiota DNA sequence
gggaacctttctggagaaaggttccccttccccctccaaacctcccccttcctctccaaagactttcgactgatggggaggccacgcggaaggagttcgttcccgcgaaagacgttgaagaggggagcaggcgagggacacggaaaagccgcaatgctggagcaacaatgaaactggattattggaccagcggcatacgaaaaagcgaaactcttgttgccggaggcggcatgaacatacgttggaatttgagcggaatggaaatcgagcgggagagcttccgtgtcatcgagtcggagtgcgatctccacaagcggatgcccgcaccggaatggcgtgtggcgcgccgcctgatccataccacggcggacatgtccatcgcggacacgctggttttccggcatgacgccatcggctcgggtctgtgcgcgttacgggctggagcgccgatattctgcgattccaagatgatccgcgccgggctttccatcgagcggttgaagaggctgaatcccggttacggtcccgaaagcctgcactgccatatcagcgatcaggacgtcatcgatcgcgccaaactcgaaggccacacccgtgccctgtgcagcgcggagaaggcgcggcccatgcttgacggggccatcgtgctcatcggcaacgctccgctggcgctggcccgcattgcccggtacgcgcttgaggaaggcgtgcggcccgcccttgtcgtcgggatgcccgtcggatttgtcaacgtggtggagtcaaaggaacttcttgcccagtgcgatgtcccccagatcgtccttgaaggacggcgcggcggcagcgccctcgccgtcaccacgcttcacgccgttatggagagcgcgtagggatatggaacttggggaggctctgcgagaggagttcgttccggcaggaaacagaatatcaagaatataaataagttaaatatattaaacaaacaatcttcacattgccttttcagaaagatgatgcaacggacgctcggcaacatcccgtaaaaccgcagaacagggattcgataaacgcgaaagtctttggaaaaggagaggagggggtctgggg

SEQ ID NO: 7514 - DNA, 5294 bp, Unknown
  gut microbiota DNA sequence
ggagggctttctccagaaagccctccccgccccctccaatctttttccttccctacatcagccgccgcacttggtgtaggcgcagttggggcagcgatggcagccttcctgaaaaacgagctcgccgccgcagtcggggcaaagctgacggtcgaaggccgaaacggtgtgcgtgggtacggggttcctgcccttgagataacggttttcgagtacccacgcgatggcgtcgggaatcgagagcaggagccccttcttttggaatatgggatgctcgccgccaatgcccttgagctgacccaccacgtcggcaacgtcgatgccggatcggaaggccagagaaacgagcctcccgatggcctcggccttggcggtcacggaatgcccggacttgccgatggtcgcgaaaatctcgaaaggcttgccgtccacctcgttcaccgtaagatacatgccgccgaggccggtctgcaccttttgcgtgaacccggttacgaagtcggggcgcttgcgcacgcgcacttgcgactcttcggacggtttcgcggcaggggcgctcgtggtcagcacctgcgtggatttgctgccgtcgcggtaaacggtgacgcccttgcagccttcctcgtaggccatccagtaaatggcgaaaatgtcgtcgcgcgtggccgagttgggcagatttacggttttggacacggcgttgtccgtgtggcgctggaaagccgcctgcatacggagatgccactcgggcgcgatgtccatcgcggtcacgaacacccggcgcagatcttcaggaagctggtcgaggctctggatggacccgagctccgccacgccttccagaagcggctggctgtagcagtcgatttcgcgcaaggcttcctcgaaatgcgggttcacttccataaggcgttcgccgtccatgacgttgcgggcgaagctcagggcgaacagcggttccacgccggacgagcagcccgcgaggatcgacagcgtgcccgtgggcgcgatggtcgtgatggtcgcattacgcaggggcgggatgcctttggtgggatagacggacgtttcgtaggccgggaagggcccgcgttccgccgcgagctggatggaagccgcccggccgcgcgtttcgatgaagtccataatccgttcggccagcgtgatggcgtccgccgagtcgtaggggatgcggagctggtacagaagatcggcccagcccataaccccaaggccgatcttgcggttgcggcgcacctgttcggcaatgcgttcgagggggaattgcgaggcgtccaccacgttgtcgaggaagcggacggccagcgcgatggtccgttcgagccccgcccagtcgatgccccggtcggcggggttggtttcgtcgaggtgccccggcacgaagaagctggaaaggttcagcgagccgaggttgcaggcttcatagggcagcaggggctgttcgccgcaggggttggtgctttcgatctcgccttgcgccggagtggggttgtcgcggttgatgcggtcaaggaagatgatgccgggatcgccgctttgccacgccttgtccaccagcaggttgaacacttcgcgggcgttgaggcgcccctgctccttgccgctggcggggttgacgagggcgtagtcccgatcctgttccacggcctgcatgaaggcttcggtaatgcctacggagaggttgaagttgttgaattcgccttcctgctctttggcccggatgaattcgaggatgtccgggtgatcgatgcgcaggatgcccatgttcgcgccgcgccgggtgccgccctgcttgatctgctcggtggcggtgttgaagatgcgcaggaaggacaccgggccggaggccacgccgccggtcgtgcccacgcgggagttcttgggccgcagacgggaaaaggagaagcccgtgccgccgccggacttgtggatcatggcggcgaattttacggcgtcgaaaatttcttcgatggagtcgccgacggggagcacgaagcaggccgaaagctggccgagctcggagcccgcgttcatcagcgtgggcgaattgggcaggaagcgccaatcggtcatcatgtcgtagaaggcgcgggccagcgcgtcgggtttccacggggactgttcgtatttggcttcctcggcggctatggaggacgctacgcgccagaagagcccggtcgcgtcctcgacgcattggccgttctcgtccttgcggtaatagcgtttggaaaggactttttccgcattgggattgatgacggggggagtgagattgagaggcatattcatcatggtggcaccagcgttgtttggggtcttaacgggttctccacgatacgcggtcgggaaggaaaaggctatctcgggaaatggggccggaacgggaaccaccgcgcatttttggaaaaatcggcaggagaaaaatttttatggaaaaacgccatgttagattctcgtcttccacaacgccaaaagccccctgaggcgaccctcagggggtggaagcgagaagttgttgacggggagggctactcggccggagcgtagtagcaacgcttcggggacatgatcttgcctgatttcttcagttcgtcgatggccttggacacttctttggaatcggcatcaagggctttggcgacgtcgccgggacggacgggcttgcccgcatcctgcatggccttgagaacctgttcagctgtaactgccataatggacctccgtgaagcggctctgccgccggtattttttaggaacaattcctgataatcaaattcctctgttcctgtcaaggattttatgtgccgaacgccggagaagtggggcggcaatcgtctggatttttgcgggaaaaggcgctacgttccgaggaaaaggatagcggtatgaaatatctcatcatggaagattttgcgggtcagccggtcagcttcgtgttcccccgccgcgtggaccacggcgacatgcgcgaacagctcccctacgggcgggtgctcggggccggttatgtggaattgcgcgacggcgcgtttcgttgccacggcggatatgccgaactggatattgtggcccgtcccgaggatgaggccattttgatggaagccttccagaaagccgagtagggcttgccgctggccggaccgtgcgcctcggaatttccctgacaaggcttttccattggcgaacgagtggatgcggcctgtttcagccctcggagatcccatgcctgaattgcccgaagtcgaaaccatcgcccgcaccctcgctccgcaagtcgaggggcggcgcattgtggcttgcgagctgctcaacccttccacttttgaggggacgattccgctcggcaaggttgtgggcggcgtcatcggccgtccgggacgccgcggcaagctgttgctgttgcctcttgcattcggctcggagccgttgcctcctgtggacgaggcttgtccgtccggttcgcttgcccggtgccttgcctgcggggatgaacgcattaccgggcttgggttccatctcaaaatgacgggccgcctgttcgtgtatcctgcgggcacacctccggaaaaacatacccggctcctcttcgaccttgacgacggttctcgcctctttttcgacgatacgcgcaaattcggctatgtgcgggttctgtcgccttcctccgtttcctgctggccgttctggaacagccttggcccggagccgctggagatggacgccgatgccttcgcggcttgttttgccgggcggcggggcaagatcaaggcgctgctccttgatcagtccgtgttggcggggtgcgggaatatttacgcggacgaaagcctgttccgcgcgggcatccggcccgacgcgcagctcgtgtccgccgaccgcctgaaacagcttcacgcggccttgcgggaagtcctgctcgaatccattgacgcgtgcggcagttccatccgggattaccgcacggcgcggggcgacgccggggcttttcagaacgctttccgggtgtacggccgttccggcgagacctgccttgagtgtgggaccccgctggaaagctgccgcatcgcggggcgggccaccgttttttgcccgaactgtcagcttgcctgacattcgttcatacaacccttttactagaccgcaaggattgaagaatgcagaagacgatctgcctgttgccgggtgacggcattggccccgagattgttgccgaagccgtgaaagtgcttcgcgccgtggaaaagaaattcggtcactcgttcaccatgacggaagccctgctcggcggcgccgccatcgacgccgtgggcgtgccgctgcccgacgccaccgtggaggcctgcaaggccgccgatgcggtgttcctcggcgcggtgggcggccccaagtgggacaccatcgatcccgccatccgtcccgaacgtggtttgctcggcatccgtaaggccctcggcctgttcgccaacctgcgtcccgcgaccctgttccccgaacttgccggcgcgtgcctgctgcgtcccgacatttccgccaagggccttgatctcatcgtcgtgcgcgaactgacgggcgggatctatttcggccagcccgccggcaccgaagtgcgcgacggcctgcgtaccggattcaacaccatgatttacaacgaagaggaaattgcccgcatcggccgggtggccttctccacggcccgcaagcgccgcaagaaggtgtgctccgtggataaggccaacgtgcttgccgtgtcccgcgtttggcgcgaagtgatgatcgaagtgggcaaggaattccctgatgtggaactgacccatctctatgtggacaatgccgccatgcagttggtgcgcgatccttcgcagttcgacgtcatcgtgaccggcaacctcttcggtgacatcctctccgacgaagcttccgtcatcaccggttccatcggtatgctgccttccgcctccctcggcacgggcaatcccggcctgttcgagcccatccacggctccgcgcccgacatcgccgggcagggcaaggccaatccgctggcgacgatcctgtccgccgcgatgatgctccgccttgccttcgatatggatgccgaagccgccgccattgaaggtgccgtgcacaaggtgctcagcgacggtttccgcaccggcgacatcatggaagccgggaagacgcagctttccaccaccgccatgggcgataaggttgttgaaactatgtagaatattgggggaggggagagggaacctttctgaagaaaggttccc

SEQ ID NO: 7515 - DNA, 12646 bp, Unknown
  gut microbiota DNA sequence
agagtggcacgagcacgttggcaattctggggagggcagaaacgtggggtgttcccctctcttctctagaaagtttcccctccccgatgcctctatagtcttttcaaacacatccaaaccgtctccggaggaaacccgccgaaaagcggagccgcctcagggcgggcttccctcccggggacgcgtccgattggggaacagagccggatgtcagcctgccaagacgtccgtgcggccctgccccccttccagaaaaccgggatttcccgctttcctagaacttgtagccgatgctgaaggtgcccttgaagttgttttccttcgcttcgtagcccacgcccttccacagatccttatccagatcgaggcggatgtagccgagttccacgaacagggagaggttcttgtacagcttgtattccgtgtcgaagttcacttccacggccttgtcgcccgtggtcaggtacatcatgctggccacgctgtcctgcgggttcgagatcatcttgctgcggaccatttccttgttgttcgtgccctgatagtacacgacgcgcaggacgtgggagagatcttccatgaacgagatgtccttcacacgagccatgacagcccacgtgccggaaatgccgtaaccaagcgtctgggccgcgccgccgtagttcgtgccgtcgaagccgtaggaggtcacgtacacgtcggggtcgatggagggcagacgttcggaaccgttgtaagggttggcgtcgtcgcccgaggaataccagaacagcaggccgggggtgcaggattccagcttgtattcggcgaggaacgcggcgtaccagccggagcgcttcacgtcgaagttcttgtccttgtatttgctggttcccatatccacgctgccgtaggcggcgtcgagggcaaagcggaaaggctcaaaataggtcacgtccgcggcgatgccgccgtaccagatgctgccgtgatccttgtcggaggaagcggctatggccgcgtcgccgccgagaggcaacatgccgggcatggcgatgccggtcatgtcaggaccgctgcccttgaagctgtcctgcccgatgatgccgcccatgccccacggggttaccttcacgccgtcaaaggtcagcggtacggtcaggccgatgaagtccagcgcgtcgtgggcgtcgtgcttcgtcatttcgggatcattgtcgttcgcggcgcgcagccagaacaggttcgtacccacgttttcagtgaactggttgctgatggtgatgcccgcgccgtcagcgtcgaggatcggggaaccgatgccggtaaagttcggcagcgtatacttctggaggcccatgcgaaccttgacgtcggtctgcgggacaacccagtccacatagctgtaacggaccttcacttccttgccgtccgtgccaagggccgcgccctgagcggacttgccccagttctggtggccgatttcgaagaacatcacgcccttcagggattccgaagcgatcacgtcgatctgggtacgcagacggctggccgcccgcaatttgtcatcgccgttgtgtttttcgaaattacggtcagcgaacgatacacggtgctgccacaagcccgaaaccttgaaatcgaccgcctgagcggcggaggttgcgccaagaatcaggccagcggcgagaatcagggttacaatgcgcttcatacgttccttccttccgttagagggttaagaccggacaactccggccgttgtttgccgttatgggaaaagcgccgtgaggcgcacattcgctttgggaagggggcggccctccccaggccgccccagatgccttagaaggcgggctttctgatcatcttgaggaagtacatgacgatgggggtcacgaccgtcacggctacgaatatccacaacatggggaagccttccactgggacgaacggcattgaccatgatatcggcttaaagaggatagtggcgaacacgttcatgaggcccacttcaacggcaaccggagtatcgaattcggggtcgacgatgcggagcagaagcaggccggaggccgccgttccggtgcagtagccgaacagggtcaggccgcgttcgaagccgtgttcaggggaacggcggccaaaccacaggcagatgaacagggtggcgatggtaccgagcacgacagcaatgaggaacggcatggccacttcttggagctggcggacctgaatacccatgaacacggcgcagatcatgaagtccacggtggcgccggtcaggcggcgggtcgtctcgccgtcgaggaggtggatgaggtcgaacttggccatcagcttacgggcgatcatggcgaagaacataccccacgcgaagatcatgccgatgccgaggccgttgatgcccttgggcatcgtgcacagccaccacacgccgaaggcataggcgagggcgtacagagtggccatgattgcgaggtggaaggccacgctgtcaatgttggcggggtgggtcgtggagcgggcgcaggtggggttgtcgcccttgtccatgaggccgcgcaggaagcattggggaagctttccgccttcgatggaaacccagcccttcttgatgccgtagaaggccagcggcacgcccacaaggcccgcgacaaggaagccgacggcggcgaaggcaagccccacgttcagcgagttgctgatcttatacgtggtttcccaaatgctggcgtacgcctgcgtctggccggggccctgcgtaaagccggcgccgagcagatagccgttgccggtgaaaaaatcgccgccaaagagcagcttccacacatcgaacgtccccttgccgaccatcgcctgcaccgagaagagcagcccgaagatgagcgcgatccacaacgcgcctcgggccacgaccttaccgctggtgccgctcttggcctgcaaaagcccaatgcccacaaaaccgaaggcgaacaggtggaaggtgatcgtgctgaacgtcaccggggtgatcgtcttccagccggtggaactggggatgccgagccagcccgcgttcaggacgaaaaacccgatgatgccgccgataagcgaggcggggaagagaaaggtctggaaaaactttacctttgcgcggatgattgtgccgatcaggagaaagaggccagtccaaccgagtgcgcccagataaggataaaatgtgctttccatactcgttccttgcttttgttacagtatacccgtcagggtttgcgttttatggaaacgccggagcggaggggaggaagggttgcccgccaccccggcggcgagggaggagcgttttaatccagcgagccgtagacgacttcgtcgcccacgatggtcgccgaaatcctgatatccttgatggtttccttggcaaccgtcagaggattggcttcgaggatcacgaagtcggccagcttgccgggttcaaggctgcccttgatgcgttcttcgcaagcctgataggcggcccacgaggtcacgctgcgcaacgcatccatgaccgggatggtctggttttcgccgaggatgcgcccgccgctggtgcgcctgttgacggcggaccagacggaaagcagaggatcgatgggagtcacgaacgtgtcgttgtggttgctgaacgggataccgcgcttcagggcgctgcggagcgggctgatgcgttcggcgcggtcctggccgaggaacatttcataatggcggtcgccccagaaataggtgtggaccacaaagaacgagggcaccacgccaagccgcttgatgcggtcgagctgatcctcgcgcacggtctggcagtggatgacgatgtgccgggcgtcggcgcggggatagcgcttctgcgcctcttcgtaggcgttgaggatcatctggatggcgtcgtcgccgttgccgtggatggcgagctgccagccctgccggtgcaggcccacgaccttttcgatgaactgctgttccggttccataggatagccgcgccacatggggccgtcgggcagatcatagatgaccttgtggtacggattgctcaggtagccggtgtagcactggaggctgccgtccgcgaggagcttcgccgcgccgaggctgatcttgccgtcggcggtgagctgcgtaccggaaacgtgcgtgttgaacgtgttgatgtccatgcgcgacacgccgggcaggatctgcacgcggttgcggagcagcccgagttcgtgcgcccgcttcagcgcgccccagtcgcccgtggcggtgaagccgtcctgcgccgtggtcacgcccttcgccgtatacgcggcgcaagcggctttgatgccttccatccagtcggcttccgtgggagcggggatatggcggaacacgggttcgcgtgccgggggttcttccagcacgccgttggggttgccgtgctcgtcgcggcggatcacgccgcccaccgggtcgggggtatctttcgtataattggccttcgccagcgcgaggctgttgcaggcggagaggtggccggacacgtggcgcaggagcacgggatgctctggggcgacttcatcaatgtccgaggccagcgggtggcgcttgtcctcaaggccggtgtcgtcgtaaccgaaaccgagaatccattcgcccttcggggtttctgcggccttcgcgcggatcagtcccttgatctcggcgatgttcttcacaccgcccaccgggggcgaggaaagatcgagctgcgtggccgccatgaggccggcggagacgaagtggctgtgcccgtcgatgaaaccggggagcatggtccgcccgcgcaaatccgtaaccaccgtatgcggatcggcaagagccatgatttccgcgtcggagccgacggcgaggatggtttccccgcgtaccgcgagcgcctgcgcctgactccctccagaatccatagtcaggatggtcccgttgcgatatacgtgtgttgcagatgccatctgaaagtctcctctctcagttacaagttgaaaacacgtttccttccgccgcctcatgttcccggatggtcgacgtcgcggcaaaagccgccagcaacaggatgaccatccccatatatgccatgttgtagttgcccgtgaggctgtgggagagcccgacagcggcgtaaccgagggacttcacagccacgaacagggaaatatacttatagacgtgggggaactgcttcttgccgtagagataggcgaccacggaggggaataccgtccagatgccgcccatgcacacgccgtaccccaccacgaacaggatgacgttgaacaaggtatggggcaggaagatgcaggccaacgacaacgcattgcacaggaacagcagcttcgtggcgaacagcggagtggtgcggtcacagacccagccccatgcgtacttgcccacggccccgagcagcgcggtcaggcacatgaaccccatcgccacatacgaactcatgccggtatccacaaagcggggcttgagctggctgagcacgccccccacggccatcaggccgatgccgaacgatacgccgatgatccacatctggcggctggccaccagctcccgccaattcatgggaatcaccttttcctcttcccgtgccgctgcgaaagggttcgccgccacgccgtcgacggccaggccgatatcttcgggcgtattgcggataatccgccagcaaaggggaaaaagcaggaaggcgaggccgccgagtatcgaaaacgcccatgaaacgcccagcgtatccaccagtacgagggccacgaacggcaggaacgccccggacagggaagtccccatgttgaccagcccgaaagcacggccccggtaggcggcgaaccagcggttcataagcatggtggcgaccaccccgccgcagatctgcccgcacacccatacgatggcgaacagcgccgcgaacaaccgaatgtcgtcaacgtagccgagcccgacatagctcagcccgccgatgaaagccccgagcgtcatcagaagccggatgctcatcttgtttgtgagcataatccctatcggcatactcaacgtcatcatggccgatgcgaaagtcatgctcagaccgatcccggcccggctccaaccgtgcagttcgaccaagggttcgataaaggcgttcatggtatagaacacgcttccctgaaggagcagattcccgcaggaacctatggtcgccaacttccatccgtagaacacgaggagcctcctcaacgagtgatgccttatgaagagcaagctccatgccatgttacggaaaaaagattttactagtgaaaaaatagacttgttggcattcggcacgggaaagggcaggaaagcgtttgtccagattctggacttgtccagtttttagacttgttttgtccaaaatttataatggacaatgcctgatgccattgacgcaccgtaggcggcacgctactttgagacaaatttccgcagggggagcgcgggtatgcaagaatcaacatctctcttgattctctggcttttgtcgtctctgaaacaggaacgctcgacgctgtgcctcatccagatgctcgaatgtcccgccgcgcaggcggaaatagccctgcacagagtgaccgccgacggcctcgcggaacagcgggacgaaacatggaacctgacgcaagccggggccgaccatttgagggaggctttgccggccctcctgttccgcgacacgggctcgccgctcgaagaactcatctccgcctgcgaatccaaaatgccggaaacggcctgcgagatctgcacgaagcgtatgcgcgtcctgcggcgcagagccgacacggccggaagtgccggatatctcgagctgctcctcaatcagctcgcgcagtggcaaaaccgcaggctcaccgccccggaagcccgttccttcgtccattatgcctttgccgcccacgacgcctccctctattatatgaagaacgcggcccgctcctccgccttcatgaaaaaggccgccgaatacgccgcctccgcaggggataaacgtaccctcgtgctcatccggttcgcgcaggcttccgccacattcttcacgggcaccatccatttcgaacgggcccatgaaacgttccactccgccatggagctgctcaagacgctggacgacaaggagctgtatacccggatcacgcccttcctcatcctgatgcacttcatccgggggaacttccagcaggcgctcgaatgctacgaaatgctccaaaagagcacccataagcccgtactgcccctcttcgaatcgcagctcgtgctccaggcggcatcctccgccgcctactccggccacttcgcccacgccctcggcatgatcaaatccgccatcagcacggcggaactggaagggaacatcatgtccgcccagatcttccgccagcacctcggcgtcctctacgcttacatgcgccgcgaggatgacgccctggaaaccctccagaccgtcgtctcccgttcgacgatggccgccaaccccaagctgatgctccgggctttcgccgccatcgcgctctgctattcccgcatgggccgggccgaaatgtcctataacctgctctccgataccctgcggcaagccgagcgccacccttccttctccctgtcctacaactacctctggatcctcgaactcgcggtgttctatgccgaacacggcttcccgcccctgcccggcatcgatctcgataccctgttccgcgaggccgagatcagcccgagccccatgatgagggggcacgcactgcggctgaaggcgatcctcctccgcaaaaaatcgccgcaggacgcgcttgacctgctcgacaaaagccttgaaatcctcaaagatgccaacatgcccatcgagtatgggttcaccgaacggcggcgctccgagctcctgaataccctcgggcgcgaagccgaagccgaggccgccgaggaaacctccctcatgctcctcagccgtatcgggctgggcaggaaacgttccccgtggccttctccggagcagaaagaagcgtccttcgatgtctgctgccgcgaagtcggctcgatccatgaatgggaaactcttgaagaatattgctaccagctcgcggcctgcctgcgtaaggtcttccgcgccgaacgcacagcccttttcagtatggacggtgaaaccctgctctgccgcggctcctgtaacctctccggctctgaaatcgcctccgggatgttcgtgccgagccgcgatctgatccgggaacgcatccgtgaggaagcccctttctcggcccagcagaacgggctggatctcctctgcctgcctttccggcttcccgacgggaacccgtggctgctctatgcggacagttccgtgcactccagccggatgctccattgcgcccaagaggatctgagccgcgtcgggctcctctgcgcttcggaactcaaaaatgtcctccgcctgctcgaagcccgcaacatgcgcgccgaagtgcggcagatccatgccgtcaccaagatggcgcaggaggaacggctcgagctgtggggcaagagcctttcattccgcatgtgccttgaacgcgccaaagtcgtctccgccacggacgccgccgtgctcctgctcggggaaacgggcgtgggcaaggaggtcatggccaactacgtgcaccggcacagcggctgcaaagggccgttcgtcgccgtacacccggcctcggtttccgagcatctcttcgaaaacgagttcttcgggcatgaaaaaggcgccttcacaggcgccacgggacaaaagatcggcttttttgaactggcggacaacggcacgctgttcatcgacgaagtgggcgatatccccatgaacatgcagatcaaactcttgcgcgtgctgcaggagcaccgcttcatgcgcgtgggcgggaccaaggagatccattcctccttccggctcatcgccgccaccaaccgtgacctgccccgcgccgtgcgtgaggggaccttccgcgaggacctctattaccgcatctcggtcatccccgtgaccatcccgccgctgcgcgaacgccttgaggacctggaagaactcatcatggcgttcaccgaccatttctcccgtcgctacggcaaaaagctcccctatccggatgaggaaaccttgcgccgcctctccgagtatcagtggccgggcaatatccgggaactgcgcaacgcagtggaacgcgccgtcatcttgtacacgggcggcccctttgatctagctgtcggagggcagcacgaagcacgggatcactgccaacgcgctgaaacctccctctatgcggacacccccactctcctggaactccaaaagcggtacatccaatatatcctcaacaaaaccggagggcgcatcagcggcgaaaacggcgctgaaaaactgctcggtatgaagcgatccacattgtacctcaagcttcggcagtacggtatcaagccaggagagagagagagagagagagagagagagagagagagagagagagagagagaacaacgcgggtatagcggagaaaaaaacgaacgcgcaccgggaagcccccctcctgccgtcgcaaaacgcttccgtggaagcgttttgccgatgccttcgggtatatccagaacagatgggcttcgaaatgatctagttttcagaaatgtaccgtgcgatcacggcaaggaaggcgtcgccgtattgcgccagcttcctttccccgaccccggcgatgccgagcatggcctcgcggctggccggctttcccgccgccatttcccgcagggcgcggtcatggaacaccacatacggcggcacctgcgcggcttccgccagcctgcggcgttccgcgcgcaagagctggaacagcgtatcatccacatccatgtcctgtgacgctccgtcgcgctccgcccggtttcggcgggcgcgcgtttccacgatccgcagggcacggaacggagccccccgcagcgtctcccatccggtttcggtaacgcgcagatatggatactcttcaccttctatggcagccagcccctgacgggtcagggcatcgatcagatacttccaaaaacggcgtgtccgatccttgcccacgccgtaggtgggcagatgctgaaagccggtttcccggatgcggcggttatccgcacccatcaaaatgtccatgatgagcacccgcccgaagcggcacccgctccgcaccattgcggagagcgctttctgcgcctcaatggtgtaatcttcctcctgtatctccccggtgcatacgtcgcatccgccgcaattgggctcctcgaaatcttccccgaaatacgacagcaacgccttgcggcggcactggttgcgttccgcatactccagcatggcgtaggcgtgcttttccgcaatactcctctgctcttcgtcctccgtctgacgcgcgaaatagagcagctgcgccatatccgccgcgctgtaaagcaacagacagtgcgcgggatcgccatcacgtccggcccggcccgtttcctgataatagccctccacgtttttcggcaaatcaaggtgtgccacaaaacgcacgtcgggcttgtcgatgcccatgccgaaagccaccgtcgccaccacgacggggcattcgtcccgccggaaggcctcctgcacgcgcatacgctccgcatcgggcaagcctgcatggtaggcttcggccttcacgccttttttctgaaggaatgcggcggtctcttcgacttttcggcgcgtggaccggtagacgatgcccgattccccctcatggccgccgagaaacgaaagcagctgggcatgaggttcctctttgggcaggacatgatagaacaggttcggacggtcgaacgaagcccggatcagccggggctcccgcaggccgagccgggaaaggatgtcttgctccacctcgggcgtggccgtagccgtgaacgccgccaccgggcattgggggaaccgctcgacaagcccggaaagcgccagataatccgggcggaaatcatgtccccattgggaaatgcagtgcgcctcgtcgacggcgaagaaagagaccggccatgaggccagcgcgtcccagaagccgggcgcgctcaggcgttcgggcgaaatgtacagcaagtccagttcaccggaggccagcgcctcccgcacggccctgtgctcgccgggggacaacgaactgttgagcgcggcggcccgcagcccgttggcgcaggcggcatccacctgatccttcatcagcgaaatcaacgggctgatcaccacgcacacgccatccatcaaatgtgatggcagctgaaagcacaggcttttccctccgcccgtgggcatgatggagagcgaatcatgtccgccgagaatcccctttacgatctcaatctgatgcgggcggaacgccgtatagccgaacacccgggccagcgccccgtgcagttcggcatcgctccatcttcctgctccgccctgttccatcatgcctctccttgcgatcatcacaaaaaatttccatcaatcttaatataataaagaaaacgtatcggtcaggctacccccgatcccccctacacccgttccctcaacatctggccgacgctcaaaaagacagaggacgcggcgtcccgaacctccggcgcggcattggccacggcgtggccgttgaaatggcggatcatgggaaggtcgttcatatcgtcgccgatgacgagcacttccttggcttcgccccagcgccgcagctcgagcaggtgcgtcatgcccgcggccttgctcacgtccggggcggtgatgtcgatacagatgttgctgaaatgcacgcccgcattctcgccgcaaccttccgtaaaagcttctgaccacgccgccgattcgccgggctcggcgtaggcgaggctgatctgatgcaggccgggcatgtgcagagcctcaacgggagaaagccgggggagcacatgctctttaaggatccaatagtccgtcttgcccgcgtgggtgaaaatggcagttcccgcgaagaacgcgcactgtgagcttgcccgcatacccggatgatccatgatttcagcgcgcaccggctcgggcagaaccgcacaatacacgtcctgcgcctgctcgtcgcagatcatcgcgccgttattgcagatcaaaaagtcgtaagggatgctgaaccgcttcacgtcgcgcaacagtgtgttccggcctcggcccgtcacgatcccgaaagcgttccccgaacgcctccagtccgctatggcctcaaggtccgcttcgctcaccacaccatcgcggaacagggttccgtcaaaatcgcaggccgctatcttcatgccgcttcctcctcgtctacctctatagccgaaccccatcccgcgcaaccccaggggctccgcccctggaatcctggcagaggcgctgcctccgcactccgcaaggcgcgagccgcgctgacaggggcgagccgccccttgacccggcggcgcgtttgcttcggcggcaagacgccgaagcaaacgcttgatgtggtaatggaggttacggggatatccctcttttgtacggcgcaaaggaactctttcaaaaccaagccggaacggactccctgcgcgccgcctccccaccagtcgaaagtcttgggaaggt

SEQ ID NO: 7516 - DNA, 781 bp, Unknown
  gut microbiota DNA sequence
cgcctttgtctttaagatccaggccaacatgaacaaggcccaccgggaccgcatcgccttcatgcgggtggtctccggcaagttcgaggcggacaaagaggtctatcacatgcagggcggcaagaagatccgcctctcccgcccccagcagttgatggccgccgagcgggagatcatcgaggaggcctatgccggagatatcatcggcgtgttcgacccgggcatcttctccatcggcgacaccctgtgcgccccggggaagaagttcaagttcgaccccatccccacctttgccccggaacacttccagcgcatccgctccatcgacaccatgaagcgcaagcagttcttaaagggtgtggagcagatcgcccaggagggtgccatccagattttcaagaccccctacaccggcatggaggaggtcatcgtgggcgtggtgggcaccctgcagttcgacgtgctggagtaccgcctgcgcagcgagtataacgtggagctgtataaagagggcctgccctacgagtatctgcgctggatcgtgcgggacgacccggatgccccgcccctgaaggaggaggacctgctgctgcccaacgacgccaagctggtggaggactacaagggcaaccagctgctcctcttcgccgcccagtggtccatccagtgggtgcaggacaagaacaaagacctgaaactggccgaattcggcggtgcgaagttctgataaacaaaagtcgatcccccggcgggggattgactgagactgtcaaaaaagcct

SEQ ID NO: 7517 - DNA, 640 bp, Unknown
  gut microbiota DNA sequence
acatcttttttgttgtataagtaaggtataaataaggtgaaaaagtttcggcatgttagtgttgtaataaataatttgtcgtaactttgcaacccaaatctgtattataagaatgagacaactaaaaattaccaaaagtatcactaacagagagagcgcttctcttgacaagtatttgcaggaaatcggtcgcgaagacctcattacagtcgaagaagaggtagagctcgctcagcgcatccgcaagggtgaccgtgttgcactggagaaattgacacgtgccaatctgcgtttcgttgtatctgtagccaaacagtaccagaaccaaggtttgagtttgcccgacttgattaacgagggtaatttaggactgattaaggctgccgaaaagttcgatgagacacgtggtttcaagttcatcagttatgcagtatggtggatacgtcagtccattttgcaggctttggcagagcagtcgcgtattgtgcgtcttcccttgaaccaggtaggctcgctgaataaaatcagcaaggctttctccaagttcgagcaggaaaacgaacgccgcccgtcgcccgaagaacttgccgatgaactggaaatccctgttgacaaaatctccgatacgctgaaggtttcc

SEQ ID NO: 7518 - DNA, 7358 bp, Unknown
  gut microbiota DNA sequence
tctctctctctctctctctctctctctctctctctctctctctctctctcggcgcgctatcccttgacgtcaggttggaactttgggatggagggaggcatatttccccatttgcgcccggttgtgtcccgccaaagatgtttggttgaggttgccgggcaaggtgtttttttatggaagatttttccaagtccctgttgctccgcgattatgatgccgtcttcgttttcaatcgtgagaatgggcagtatcatacgctcgtgctgagtaagaaattgttcaatgtggtcccctccgaagggacgtatgaagagggcatggaggttcttgcaaggtacgtattgccagaggagcgcgagttcttccggcgccatacggagcgtgatcgcattttgaagctggtcgattcggtggagaaggccgttgtccagtaccgcatccggcgcgacgacgggatttgtctgtgccggaacctcaaatttctgccgggtgacgaaaagcatattcttgcggcgttgcgggatgaaaccgatgaggtgatggaacaaatccgcgacgccaacatccttgcgctcaagaacagctgcatcaattttattgtgtccaacctgtgcgagaatttcatgactgtggatgttcggacaggcatgagcacaaccgtcatcggcgcgggcaacggggagatgctgccgcagcagaccttcaaggaacagattctctggtttgcggaaaatgtggtcgtcccggaggagcgggaaaactacatacagtattttgcccttgataacctggtggcgcgtatcaaggagaacggtggcgggaccgtctccatgttctgcaatgtcatctatgaggacggccggcacgagctgctcatcaggagcaccctggtcaaggatactcttgatctgcggggcgaatacgtgctgctcttcgcacaggacatgacctccatccgcaagattgaggaagcgaaccgccagctcatgctcaccagccgccacgacaagcttaccgggttgctcaaccgggctgcggcggaaaagctcatttccgagcatttggatttggtgggggcttcctccagctattgttttctgttgctcgacatcgactatttcaagagcgtgaacgatcgcttcgggcacctcgcgggggactcggtcctgcaatacatgggcagttccatgcggaaatccttccggtccggcgatgtgctctgccgttggggtggggacgagtttgtgatttttcttcgcggcgtcagatcacgcgaaatcgtgcgtgaaaggttggatgccctgcgcgtccggttgcttgattgccgtgcgggtgaagagcctttgtccgtgaccctgagcattggcggcgcgttcggaaacggcccatcctcgcttgcggatctctacagcaaggcggacaaggccctctatcaggtcaagcagcaaggccggaacggaaccgtgctggaataattgcgtagaagccttcggaaatgggctgaaaactccatttttcggcgaacgaatcctcatcaaccatccaatggacgatttatgaatggcctctaaaaagcttccttatgcaaagaaggaaaggccggagaagcagttctccggcctttttgtttgctgttctgttttggaaatggcggcttcgtctgagcgggatgtggaaactcttcatcaatgtttctttgccgtaaagcgtacccgcgctattttgttcagcggctgagctgtagcagggaaggttgtagtcggtatggctctgtatgggacacttatttttctatatgcagtatactgcgtatcaaagcggaaggcagcgcatgaagccgttcgcgtacggcttcgccgccttcgatgcggaaacgtgtccgcagccgggtgatgccaagattttccagttgttgctggacagtaggaaaatcgcttggcgtaaattccatgattccggcggctgcctgatccacgaagcgcgcaaatccaagcgggctgtcatagaccttctccgccgtgaagccgtcaaacaggatcgccaatgtcaggttgccgcattgttccggcgaccagtcgaacagggcggttccttggtaattgtaggcatccgcccggagaggttcgccgccgcaatccatgcgcaaggacaggccgcggggataggcccgtgcttttgggttgaccgtgactggtgagaaccccacccgcacagggtaggatgccggatagaccgcgatgtgttgcggcgtttcggaaagcaggctgaggaaagccggggaaaggggaaagcgcatcccgagggctgaggccggcgcatatcccgaggctgcggggcgcaggaaaggttgcgccgcgtccgccacgaatgtccataggaggccgccctcgccgatgagggcctgttggagcgcttcgtcctgtaacccttccacagggccgaccacttcggttgaccagcgctgctgaagattgcgggcggcttcggctgtggcggttccggcggcgaacagcaacggtgcgcgcatgagcgagaggggcagcggatagtttcgcaggtccgggtttcgtgcttcgagggcggcggccagcccttgccatgcgtcgtcggcggcccggagggcgccgttcagttccccgccgtataaggagcgcgccagccgtacaaggccgtcggaggttcccgtttcggaggacagtgcggcaagggcgctgcggtagtccgtccacgcggtgcgggcccggaacagtgtttccagattgccgagtgtttggcgggcgccttcggaaggctccccgaggagttccgccgtttcggacagcggggttccgcttccgggcagccgcgtaagcagccggacagagcgcatatcccgcaatgaggctacccatacgggcaacgggccctcggcggaacgcagttcgcgttcggctgcggcaaggaaggcggagcagggatcgttcggaccaagcagatcgcgcggcgtcagtgggacatggcgcgtcggcaacagcgtccggggctctatgcccggggcttgcacggcgtccagcaggcactgccccgccgcataccatgccgcgaatgtcgaggcgcggtaacgcagacgcagcgcctccacgcgctccgtgatcgagtccgaggccccggtgtgctgcggcgtatcctgttctggcaagatgtttgattgggaggcgaatgcggacacgttgtcgaggaaccgggccgccgccttccgccccgaggctgtcgcggcgccatcgacgctggcaaggacggttccgtccggggcccggaaccggagcgtctccacgccgggccgggccgccgcccagatcatcagatcgttgatccagcggtcggtatcaccggattccggcagggatgcggtgaggcgttcgcggagtgcggcacggagccgttcgagccgttttttgggggcgccgtagagccggacggtcccggagcagccgcgttccagtttgtggaactcggcgatcaggccgtcgagttccgctatggaagcggctcggggaaggtggtcctcaaaccggatcatgtccggcagaagggtttgggaacgttccccgccacggtacagcgcaaccccggcggtgacggcaaagaggattgcggcggtccagcagacggcccgctgccgtgcccgccgtccggtggctggaagggcagaggctggcaatgtttcgaggaggagctcccgtacgaacaggggatgtgccgcaatcccggatgagggcgtgaaccgggagccggctggaacggtcgcggagggctggctggcccgagaagttgcaagaggtgcaccgccgggaaccgaaaaggatgcggatgccgagaagcggagagcggtagggggggcatccttcataaccggggaaaggcgcgtagcctgttgaaaggcagagggcgcgggaggcgatgcggcccagaaaatgccgccgagcccgtccccgagggccgccgcgaacgaggccaacggagaggcaagctggcggagggctccttcgagaaggaatgcgggaccgcccggcgcggggattccggattcggaacatcggacaaggctgtccagcgcggcggtgaggccgttcatgccttcccgtacgccgtcagcggcccatcggggcatgggcgtccacggtctgcggacgggcatgaaccatccgagcggcgcgtgcagcgcattgcgcccgatgctgatttccgccgtaaaatgccgtgcgaggcgcgacaggccgggagcgtgctcaagcccggtgacgagaaggcacacgggcgcgttgccgagccgattccggacggtcagcagccgctggcgcatgaaggcggcggtatcgtccccgtgccctgagaggctctccgcgccgatgcacaggacgactcccgcgggcggggacagccaacggcgtacggccttgtcgtcgaggagttgatcccacaacggaagggaaggagccttgtcgggcgtgttgccttcgcctccgtcgcctttacgttcgccggacaggtgcggcgcggaaaaatcaacggcgatccaatgggcgtgcgccgtgctccataatccgacagatcccgcgttttccgccgcgccatcggaaagaagcgggcggcccgcgttttccaaaatgccgggcaagtgcggaaacaatcccccgccgtcgagtaggagccagcgggggaggcgctccgaaggcagctccacgggcaggggagcggcgggttcatgcgtatcgtcgcgcattgtgcggaacagaaaaatgatcagcgccacgcccgccccggccccggcaatggccgccagccaccagacggacgggagggaccagccccacaggagcgccaagccgtacgcgcccgccgtcagcaacagacaaagcaaggccacaagcagccagccaaggactttccacggactcatgaagacctccccggcgttgtgttacggttgttcgcaccggggtgtccggggtcatgcgacgcgggggcaggcgtccgccctgccagacgattccgcaattccccgtacacgtcgggaatgggttgtttctttgagccgacagcctcccgtcctttttgtataatggtgctgggtcggggcgaaagcgatacggcggatcgcgcgtcgcccgttcgcgggctatcgcttgcgggatgtaccgcactcacggcgggaacttgtgggctctcggtatactcccggttcagccgatgttgccatatgccccaaaagatcagcagcaatacggcgaaaagccccgtcagcagaggcccgacatgccggatcaggcggttttcccttggcagatatggagcgggtgggaaaggaagcggaaccgccgtacagccgaaccgctcggcaagcgctcggtgctcgaggccgagcccattgggatcgttataaaaatgtcctcggaatccgaatccgagacaacgcagggcgacctcggccagctcggcatcttcggccctgtgcggagacaggcggcggatttcgtcgaaaaaccagtccccaccgcgccgtcccgtcctccagcggcgttgcagtggattgcccagccaggcggcgcggccttcccatgcgatgccaagggcggtttcgtccatccaggcttcgaccatgcgccgggccgtttccactgtcgccgcttcgcgcccgtgcagcgcaagacgcccagcctcttcaagcagccgttccgcctcccggcgcacgtccgtccttccggttggcgggctatccggcaaacggagcatcaggcggaaacacgggccgaagcagtcgcgcagcatggtttaattcctcaagtaaagcaggcgaaggtgaccgggtagggcagggccgcacagggggaagaaggcaacgccgagggctccggaacgcagcgccgcctgccagcgctccgaacgggcgtcgggctccagatagtggatgccatcccgttgcggcagacccggcggagcggggatttcgcgcagcgggactccggcgatggcctgggccagcgtggcggggagggtgtccggagcatcggccacaaggcgtccctcattgagcaaggaggaaacggtttcttcggtttggagtacgagtagggcctgtgtccggcccaaaccttcggggagttcggcgcgcaggaattcgccgtccgcacggaagcggaccaccgccgccgtttccgggagcaggccgcgcaggatctcccgcaacagactgtcgaggctgcggaaactttcagccggatcgtcatggcggtagaggggcatggcgtccgccgttgcaatcccgacgcaggccgctgccgccgcaaagccgttccggagcagcccgaacagcttatggggggcggttccgggccatgccagcgcgtggcgcagctcggagagcgtccgcgccgcattcacgagcagaagctgtctggaggttgcgggctcatcgagtccgcgccgccgggctggctcaaggcgccggatggctgcggcaagccgggcttcgagtccgcgcgcgagcccgcgcagcacggggttggcctccacatagagggaaggcggcgcataggcgggatcagggcgcggtccggagccttcgtccgtgaggcgcaacaacggcagaaacagccaatccgggcggtcggtggtttcgttttcccagaagaggcggggataaagatagagcgtgcgcacgggcatgtccctccggctttccgtggcaaggggcagggcgtaacgatcggcgatgctgtcgtcgctgttcggacaaagataacggcccggcgcttcgggcaaggtgtccgcatcgcatccgatcagcctgcctccgtcccgcatgcacgatggaatcccggcgacgttgccatagggtttcaacggcgggaggccggcaaacaccgtaaacggcatatgtgggtccgtccatgcttcgcggaaactccggcttggcaggatggcgttgccgtcttccggcacggcggcgattacaacctcggtgccatcctgaaaacgcattatcccgctgcggacgagaatccgcccctcggcaagcgccgcttcgtccacatccaggttgcccacgccccagaagcacggctgcgccgactggagcagcgacgcccgttccgaggcatgaaaggcatcagcctgctggaagtgctgcggttcgaggaattgtcccgaataccagtataccggacgttgaggctgcatgtcggccttcccaatatggtttgcgcggtgccttcggatgcccggagcggttctgctccgtcctatgcccgggaacccgcgtcaatcaaaacggatggtaaaacgtctctctctctctctctctctctctctctctctct

SEQ ID NO: 7519 - DNA, 8073 bp, Unknown
  gut microbiota DNA sequence
gcggagtcctcttaaaggcatacgttcagccagcgctcaagaggactgccgtcccgcttgggcctgcgggggttctcctcccatcagttccgccgggccgaggcgtatggggatgatcgtctgtcctggttcatggcgggtgtctttgaagaacggcacccagccttcgacgattttccgcacgggcacggcgacaatccgggcgctgtgggcgggggtcccgtggaagtacccggcgatcaccgcgatccagcggacgccctcttcccggtccagagaaaggttttgtgcctgaccgggatccgaaaagagcctccggctcgtcaccacggaatcgtcgaaacgcccgcaggccaacagctcggcgaatccctccgggctggcgagccttttgtccactccctctcgggtcgccagttcgtagacgcacagcatcaggctggacggttcgccctcatgctcgttgagccgctcgtcggcggagatgcgcaataccacagcgtcgggttcgtagacccacggcacatcattttcgggcggcgtcggaggagggggctccggcgcggaacagccgctgcacagcgcaatgacgcccaataagacggcaatatggaattttaagaatcgaatcatactgttatagccatgagaaagacaaaaatggaataaagtgttgactctatgtttttctttatattagaagctaatttataacgaagggtttattatgtccagagcaaagtcagattttgtcgactgggcgtcatgtctgcatccgtttggcgaagatccgtacggtccggcattgccgcatgatcccgtttgcgccgccatcagagaggcgcgccgggaggatgaccccggccttccgcagggggtctgggaacgggaactcaagcgggcagactgggataaggccttgtcgttgtccctcggggtgctccgggagcgctccaaggatatgcaggttgccggatgggcctgcgaggccgcgctcatgcggtatggctttgcctccctgccgggcgggctcaggatgatcgccggattgtgttccggctttggggacgggctgcacccgcagccggaaggaagcgatcaggaggcacggctggcgcggctggcatggcttgactccacccttgccgagcgggccgcctctctgcccatcacggaagcctctccggacgtccctgccgccacctatgcggactggatggcgatggagcaccgcgagcgcatccagaacggcaacggcaagaacggcgtagctggcgatgcccggcgtatgctgaaccttgccgggacacagacttccccggccttccacgcctccctgcacgggcagttgcgtgaagcgctgctggcgctggacgaactcgcccgcgccgccgacgcgctttgcggcgggcaggcgccaagctttcatgccttgcgggacaggctggagcacatcgacgcgcgggtgctcgcgtggcatccctccgccgggacggatcccctcgtatccccaccttcctctcccgcctctttgtcttcgccgccaccgccatcgttctcctcgcgggaacaggcgtatgcctccctttccgccatcgccgattacctcatgcgcacagagccgcacagccccgccccttggctggtgaaacgggccgtctcgtggggcggcatgacgctgtcggaactgctcgacgagttgctggggcagggggagaacctcgcctccatcaaaaaattgctcggaatgaccaaagaatagccttttttcggcccacgccgcgaaaaagcgtcaaggagcgtatctatgggagaatcgatccagaagcggctcggcagggtacgcccgccgcgcgtacagattacctatgacgtggaagtgggcgatgccatcgtcaagaaggaacttccctttgtcatgggcattatggcggatctcgcgggtgacaggaccgtccgggaagatctggggcttccgccggtgcccgagtacaagctgcgtacttttgccgccgtcgaccgggacaattttgacgacatcatgaaaaccgttgcccccgcgctcaagctttccgggctggaccgcttcattaccgaagacgcgagtgctgcgtggcgggaaggaggcgttgagcctgagaaggcggcgttctcctgtgcgctgcggtttgagaagctggacgatttcaggcccgagtgtttggtgaaaaacgtcgagacgctggcagcgtttttcgagcgccgcaatctgttgcaggatcttgccgccaagttggacggcaacgacgctttacaggccagcctgcagaagatgctgttccctaccggtgactctgtctcggaattggacgcgttgcggaaggcgtacaaggaggcgttggcttctgtggacgccgcccgtgatgccgtgagcaaggccggagaggaccaagaaaagcaaaaggccgctgaagaaggcgttcagcaagccgaaacggcggcgtcagaggccaagaagaagctggacgagaagcggaaggcgaaaaccgagtccttcgccgccgcgatggtccgcaattccggagaccccgatgaggataagcgccagcgggaagtcgctgatgcgcgtttggcggcgtgccttgccgaacatgaagacaatccgttcacgctgcccgcaagcgggagtatgctggggatgctgacggaacgggtggcctgcaaggacaagctccttgcgtgccagctcgacgccattctacatgccgaggcattccaggagcttgaagccgtctggcgtggccttcattatctggtgttcaacacggagacgagcgatcggctcaagctgcggctgttcaacgcctccttcaaggaactgcgtacggatctggaacgggccgtggagttcgaccagagcctgctgttcaagcgggtctatgaggaggagtacggcacgttcggcggagagccctacagttgcctgctccatgtccacgaatacggcctgtcggcggtggacctcggcgtgctccagaagatggcggaagtagccgccgcagcgcacacccccctgctcagtgccgcgtcgccgcagcttttcgggctggggagcttcaccgatctgcccttgccacgcgatctgcacaagattttccagagcgcggactatatcgaatggcgttcgttccgcgagaaggacgattcccgctatgtgaccctttgccttccgcatctgctgatgcgcctgccctatggcaacgacaccgatcccgtggaaaccttcgtttatgaggaggatgtcgccgggccgtccccagaccgttacctttggggcaacgcggctttcgcccttgccgcgtgcatcacggcggcctttgccaagtacggctggacggcggcgatccggggctatgagggcggcggggccgtggaaaacctcaacgtctacaagtatcgccagaccaatggcgagacggtggcgctgtgccccaccgaggtgagcatcaccgaccgccgcgaaaaggagctttcggatctcggattcatcgccctgatttaccgcaagaattcggacaaggcggctttcttcagcggccagacggtccacaagccgccggtttacacttccgacacggccaacgccaacgcccggatctcggcgcggctgccctatctgctgaacgcatcgcggttcgcgcattatgtcaaggcgaacatgcgggacaaggtggggtcgttcatgacggcggataacgtgtcaaagtatctgaataactggatcagccagtatgtcctgctctccgacgacgccggagacgacatcaaggcgcgctatccgctgcgtgaggcccgcgtggacgtgagcgaggatcccgggaatccgggcgcgtacaagtgtgtgatcttcctgaggccgcatttccagcttgaggaactgaccgcaagtatccggcttgtggcggaattgccgccgcccgcggtgtaaaaaacgatgtgcctccggcggcgaggggccgcgaatccctttgcccgccggaggagatctgtggtgccctcgacccgtacggctcgaaggctcgcccggtgcccggcctttttgaaaccgccctttggaccggccccggacttccgcatgaatgaggatgccggagctggagcgatattccaaggagggggaaatggtttccgtctttgatgccttccactgcgacgttgccgcggcataaaacgcaactgcccaatgtctgtgaatcccatccgccctgtgcgccgggcaggagggaaaccggaagttccacgggcacgagccatttctccggatgggggcaagagggcggcagcccttgccgccggagcatacaactcttgaggagcagaatccatgtccacgaatacctttctcaagctcggtgatattgagggcgaatcgaccatcagcggctttgagaagcagatggaactcatcaatttcaccaacgggtttcatcagccgacctcgccgatccgcagcagtaccggccccaccacggggcaggccgtccattcgatgatgaacgtgaccaaatatctcgacagttcctcgcccaatatctgcaaggccctgtggagcgccaaggtcctggattccgtggtgctcacctgctgccgtatggacaacgacgccgcgatcaagttccttgaaatcacgatggagaacgtggtggtggcctcttacaacctgcgtggcggcggggatctgccgtatgaggagatcgcgctgaattacgcgaccatcaagtacacctatatccgccagaaggaagagggcggatccgacggcaacattgccgccagccacgatctcaagacgaataaggtttcgtaatgaaggaggaaaggcgcattccgctgttgtcccgccttgctgggaaagcttcggggcgcggattgtcccggagcgaatacctgtcggccgtggcggaagacgtcgaggaactgctcaacacccgtgccccctgtgggaatggggatgcggcggatctggtgatggggtacggcctggcggactggagttcggccccgctggacgggcgagaggtggcccgtgccgtttcggctgcgctggagcgtttcgagccgcgcctgaaaaagataagggtgagcccgcttggatttgaggacggtcggctgcatttgcgggtggatgcggcgtccgaagaggaaccggtgacgtttttgctccaatgcgacggaggcgtgttctccgctggagcggccgcggagggctgatgcacgcctttgaggacatcgccgggctgtaccgggaggaattgcgttccttgcgtgaggacgcggtgcgcttcgccgtgcggaatcccggcatggcgcgccagctcgggctggcgtccgatacgcagcccgatcctttggttaatctgctgctggagtcgttcgcatggcttgccgcccgggtgagggcggacgcggaatcccggctgccgctggtctcgcacagcctgctcgggctgctttatccgcagttcgtctgcccgattccgtccgtgggcgtggcggaattcatccccaatccggcgggcgtggccgggctgccggacggattcggcattccggcgcacaccccgatccacaaccgtgacgagcgcggcggcgtgctgcgctggcggacggcccggcctctgacgttgcatcccgcgaaggttgtacgggcttccatcatccctccggcgtcttggatgcccgctgcggcgcagggcgtgcccggtgtcctgtgcctgcggatcgagggtatcgcggggctttcgctggcaaagttcggattgccctcgttatctctccaccttggcggtgatcggtttgcgacttttcccatgcacgaatgggtgcacggcgcgtgtaaggatgtctttctcgcggacgacgccggggccgcaaagcccagggcactctccctcggccgggaggccctgtgtcatgcgggcttggagccgggcgggcgtctgttccccgaatccgcctacgctctgcccggataccagttgctgcaggagtattttgcctatcccgaacacctgctgttctgggaggtgggagggctggagcgtcggcgggaactcggggatttgccaggcttcgatctcctgttccccgtggacgcgccgccgccgaaaacggtttcctcaagattgttccgcacctgcgccgtacctgtggtcaacttgttcgagcgcatggcggaacccatccgggtggatcacgagcgctcgggacacctgctcgtgccggatctgcggcaccgggacagtacggaagtccattccgtgatcgctgtggacgctttggagggaggggaacgttcttcggttatgccgtatttctctctttcaggagaaggggatgcgccgccgtccctgatgtggttcctgcgcaggaaaccatctttggacggcatagggacggacgtgtttctgcatttcaaggaagcggcgttccgcccggagacggctcggccttgggtggcttccgcgcgggtattgtgcacgaaccgccatcgtgccgccgagcgctggcgtcagggcgaactgacgcgggatacggacatgcccacggcggctatccgcttctgcggccctccttcgcaacagcacgatccgcccatgttcggcggcgaactgtggaagctcgtttcccatctcagcctccatcaactttctttgagcgggccggatgccgacaatgtcctgcgtgaactgctccgcctgtacgcgcctccgcgcgacgcttttgcgcagcgccagatcgccggcgtgaacgggttgtgtgccaagccgctcattcgccccttgcgctccgctccgggctgtgcggcgaggggaacccggctgacgctcacgctcgacgaggacgccttcaccggaggcagcgcgtttctgttcgcggaggtcctcgacgtgttcttcgggctgtacgccggaatcaacacgtttacgcagcttgtgctgaaaacctgtaaccgtaaagggacgtggcacagatggcctctgcgatccggcgcgcttccgctgatctagacggcgatgccctgtcgcgcttccggtccgcgccgtggcgtttcgacgtctggcaggcgggtgcgattcttgaggcatggaaaggccgcatggactggggcgtcccggcttcggacatcatccctgctggggaggtccgcggcgtggccttcccggagggcggggctccgcgccttgatgtgaatctgcttgggctggcgggcatggatgggccgttgccgccgcatgtggccttgctggtgcgggagcggatgcgggccggggacccggcatttcaggagtttctggatctgttccacaacaggatcctgcatctgtggcgggatatggcgtcgtcgttgtgcccggaactgcgggctgacggcctgccggaggatcaccccttcgccgcgttcctggaggcggtttccggccttcccaatacgggagagcgggcgcgggatgtgcccatgcccggcccggtggctgggaggggggacgtgcccgccgcgctgttccggtcctgcgcggccgtatgggcccggcagccgcgatccgcggcggggctggaaaagctggtgaaagcggcctttggggttgaagcccgcgtggaaccgttccacggcgcatgggtcgatctgcccgaggaggatctcacccgccttggcggaagggatgcgggcaatgcgcggctcggaagcacggccctgctcggaagccgggtttttgacgcttcggcggggatcaccctgcgcctcggcccgctgacggaggcacagcgtcggatgtttctaccccctcccgccggaacgtgccgcgccgacctgcttgcactggtccgctggtatctgggggacgtggggtgtgaaatcgtgctggaaaggcaagggggcacagggagaacgtatgggtgttgagcagatcgtcatgaagtttgcacaatattctcaaagtatttgctcttttgatcaaggttttcttttgaaactcgatgcggcgcacgcgggcagcaaaggcatctgctatgccctgtcgtcatgtttta

SEQ ID NO: 7520 - DNA, 9285 bp, Unknown
  gut microbiota DNA sequence
agggaactttctgaagaaagttcccttctcccatcccccgcgccccctcctctcatccctcaaagactttcgcgtttatcgaatccctgttcggggttcgggtggcgcggcgggctgttgaggatggaagggaaacgggaaggaatggagagcaaggctccggtgtggtcctgaatcgtttcgggccaagacgcttcgcggcaatggtgatagtataagaggttattggagattgttaaggggagtggcaggttatagccctttggcgggcgcgttgaagaagcgccgggtgttgtcgccgcagagcgtccagagttcggcgggggccatgccgcgctcaagggccacggtttcggcggtgaaggcgacgagtgccggttcattgggcttgccccgccacggcacgggcgagagataggggcagtcggtttcgaccatcaagcggtccggcgggatgcgtttcacggcttcgcgcaggtcgtggttggcgggataggtcacggggccggggatggaaatgtgccagccgttggcaaggaaacgatcaagaaaatccacggcgtcgccgctgaagcagtgccacagcacggggcgtcctgagaaaccttcggcttccagaatccgcagggtgtcctttgccgcgtcgcgcgaatggatgaccacagggcgatccgtttccttggcgagggcgagctggacgcggaaggcttcctcctggataaagggcgggcagtccttccagtaaaaatcgaggccgatttcaccgacggcccgcagccggggatcttcggcaaaggcttcgcgcatggccttgagggtggctccggtacactcctgtccgtcgcagggatggatgcccatcaggaagaagacgccgggatagccggcgaacgtgcccttgttggcgtggtatgcggcggggccgaggaacacttgcccaatggaggcaaggcccgtgctccgggcccgtcccataacctcggggagccgttcgatgatcccctcggagtcgaggtgggcatgggagtcggcccctgtggggggaaggccgagcgtatcgggaagcggacgcggcgtatcttttttcttgctcatggaaaaagtcccttgcgggcatttttttgggccttgccgccatatatcgcgtcaaagcccgtggggattacggcttgttgccgtcgcgctgcacgggaaagcgcctgctccggccttggcttcagcgcggcaaagccgggcaggggctttcctggacaaacctattcggtgaattcctgtttgatgacggcttcggccttgatgcggtcgaggagttccgagaacgtcgccttgacgtgttcgcggatgtccccggccacgacgaggaacagcacgtcgtcgccgggcttcagttcgccttccacggcttcggcatggatgcagaagatgccgggctgctgttccatctcgcggcagatggcgtccatcttggcgcggtcatgcgagactttcatggatttcacgggcgcatggtcggcccgtgcccacccgcgcacgacgccgttgtgcaccagcaccatgcccacgttttcggtaaagccgggacgcttcttgaggtcagccagaatctttgtggtatccatcgtttttctcctgtggtcggggtctgctcgggggaatgtccctggtgaactctgacggaaagagcccgtgccgaaaatgagaaccggcattgcgcgggggggggctgtacggccctgccatacgggcggaggagcccctgttgcgcaaccttcccgatttttctttcgctattccgcttctctgcggatgcgcgcacctacggcgttgagcttgttttcgatgtgctcataaccgcgatcgaggtggtagatgcgctggacggtcgtggtccccttggcggcgagcccggcgagcacgagagaggcgctggcgcggagatccgaggccatgaccggagccccggcaaggcgctggacgccgcgtatgatggctgtatgcccggaaaggcggatatccgcgcccatgcggacgagctcctgcacgtgcatgaaccggttttcaaaaatggtttcgctgatgaccccggaaccttcggaaaggcacatgagggacatgatctgcgcctgcatgtccgtcgggaagccggggaagggctgcgtggtcacgtccaccccgcgcagggcgcaggagcggcgggccagcaccccgtcggcggtgggttcgatttccatgcccatctggcgcattttggcgatcacggcgtcaagctcctcaaaggggcagtccgtgagcagcaactcgccgtcggtgatcccggcggcggcgaggagggttcccgcctcgatgcggtcgggcatgatgcggtaggtgcagcctccgaggcgcgggacgccctgaatgcggatgacgctggtgccgtggccttcgatgcgcgcgccgcaggcgatgaggaagcgggcaagatcgacgacttcgggctcgcgggcggcgttctcaaggatggtttctccatcggccagcgcggctgccatgagcaggttttccgtaccgccgacggtgggaaagtcgaaatggatgtgcgcgccgttgagcttgcggcagcggccgagaatatacccgtcctcaagatcgaaccgcgcccccatcttttcgagggctgacaggtgcagatccacagggcgggccccgatggcgcagccgccgggcatggctacgcgggcttcgccgagccgggccagcagcgggccgagcacgagcaccgaggcgcgcatggttttgaccagttcatagggggcttccgggctgagcgcgccgggggtcacggtgacctgcccgttttcaaaggcgttcgggcagccgagcagttcaaggagcttgaaggtggtacggatatcccgcagatccgggacattggtgtaggtcacgggttcgtcgagcaggatgctgcccatgaggatggggagagccgcgtttttggagccgctcacatgcacgacgccggtcagcggaacgccgccttcgatgatcagtttgtccatgaactgtccctgtatgtgggcccggaaaagccgggcgttgccggttggatggagaatgccccgcgcgagggcggaacgctggcgcgatccgtttgcggaagctgaggaaaggatacaagatactatcgggttccttggctggtcaaggagcatcttcgggcttccccgggtggcctcgggatgcggaaatcggaaaaatattgcggaaaggcttgacgttaatatggctctgatataaagaccacagctgcatgtggcggatgtagctcagttggcagagcatctggttgtggcccagagggccgtgggttcaagtcccatcattcgccccactcacttgtcttgaaagaccctgcttcggcagggttttttcgtttccatccccttcctttccccgccatgccttccggctttccttctgaagaggaacggagccgccgccccgttgtctatccggtggcgcggcggctccgcattccgttttttatcatgcgcaagtttttgctctccgcatatggatgcggaaggtccgccatctgcgcgctatgctatggccaattccagccccacggggcagtgatccgaaccatggacattgttttctatccatgcgtcccggatggccggggccaactcctccgaaacgaagaagtagtcgatgcgccacccgacgttgttgacgcgggcgcgctgcttgtaggaccaccacgagtactggtgcggctcgtcgccgtggatgtggcggaaggtgtccacgtacccggcggcgatgaagcggtccacccaggcgcgttcgatgggcaggaagccggagttttcctcgttggccttgggccgggcgaggtcgatggggcggtgggccgtgttgaagtccccgcagaccacgatgggcttggtgcggcgcagctcttcggcatgggcgaggaacgcgtcgtaatagcccattttataggccagccgcccgtcgtccttggttccgttgggaaagtagacattgaaaaaatggaaggcggggtattcgatgtgcaaaaggcggccttccccctgataacggggatcggggagttcgcggtgcacggcgagcggctcgagggcggccttttggcgcgagaagaccgcgacgcccgaatagcctttcttgacctgcgcggccagccattcggcattccagccctcggggctgcggtgttcttcggcgatctgcgccggctcggccttggtttcctgaagcgccaccacatcggcgtcggtggaggcgaaccagtcccagtcgggtttgccgctcagggcgcggaacccgttgacgttccatgaaacgagacgaatggtatccatagttttctcttggcaaaaggaaagggaatcggtaggcacggatcaggcggccccggctttcatccccatgttccgggaatgcgggccgcgccatgcgggcgcttccagagaagccagcccgtgcctcttccgcggaaggattccattgcccgtgccgattgtcaaacgcgccgcgtgccggtgcggcccgtccataaaaaggaaaaatgatgaagaaaatccgcttgccgctgctgtctttgcttctgctgtgctttgcggcgccatcacaggcatttgagttgacggttctgcacaccaacgatgtccactccatgtacggcgggaccactgaaaaagggacggcctgctatgcggcccagtgcgctggcgggtccgggggcagcgtgcgcctgaaacaggccgtggatacggtgcgcgctgcggaaccgaatgtggtgctccttgacgccggggacgaatttcaggggacgctgttctatacgcagttcaaaggcggcgtggcggcggaggtgcttgacgccctggactatacggcctttacgccgggcaatcacgagttcgatgacggctgcggcgaattccggcgtttcgtggagcggacgcatgtgcccgtactggccgccaacctgacgcttccgcccgtacccgggggcaagccgctcacgcgtccgtggattgtcgtggagcgccaaggccgcaagatcggcattgtggggctggtcaacgaggaaacgccctctctggcctccccctgcaaggaggccgtgttcggtccggcggaaacggccttgcgcgaagcggtcgcctcgctccgggcgcagggcgtgaacattgtcatcgcgctgacccatctgggcctgaacgtcgactgcgagctcgcggggcgggtggacggcgtggatgtgttcgtcggcgggcatacgcattccctgctttccaatacaaaccccaaggcagtcgggccgtatcccattgtgaagcactccccgtccggagagcccgtgctggtcgtgacggcggcgtcctcctgcaagctgcttgggcatattgcgatagacttcaacgacgcgggcatcgctcagcgctggaacggcgaacccattgttctggatggccggaacgtcaccgttccgcctgatgcgaagctttccgcacggctggacagctacgccgcccagttgcggtcgctcatcgggcagcctgtgggcaaaatcctgcttgccggggacacgagcgggcggcaggttgaccttgaggaagacgcccatctctgccgcgtgcaggaatgtccgtccggcgacgtcctcatggactccctgctctggggagcacgggataccggcgcgaccgtcgccttgtccgtgggcggcactgtgcgctcccctctgcataccggcgtggtcacgatgggtgacctgctggcgaccatgccgttcgacaacacgctcgttgtcggtgatttgaccggaaaacaactgctcggggcgcttgaacatggcgcatccggctacgaaaacggggcggggcggtttcttcaggtcgcggggctcacgtattcggtggaacccgcgaaaccggtggggcaacgcgtttccgccgtatccgtccgcacaaaggcgggcggttgggaacctctgcgcccggaagcggtataccgcgtcgccacggtggactatgcggcggagggcggtgacggtttcgccgccttcaagaaaataaaatggcaatacacgggccgcgcgcacatcgaatgcctgcgcgactatatcgccaaggcccctgtggaggtcaggtccggagggcggatcacggtcctccgataacaacacaagaaacaacattgcctatcgggggagagggcttttttcgagaagcgcgcccgtcaaacggttccctctcccccgacacatccatctccctctctccaatacattcccttccatcgaccacccgtcagtgtttcccaccgccgaaagcgggcatagccgggcggcgtacgcgctgttttccggccctgcccatcctttcggtttttcctttggtgcccgccacgaaatcgtcacactcccgtcgtatatccagcgtatcgcatatcgggagaggttttcggcacatgacgaaacgcatgatcgccgcccagctttccgttggggcactgctcctcgtgctggtggcgctgatggaatcctataccggttgggacacggcggctcaacgtttgtggtttgattccgccacgcacgaatgggttgtgtccaacgagctgcacgctcggctgacgtggtttttctacgatggccctaaaatcctgctggtggttctcgggatagcctgtgtcgccggggtgcttggcggcgcacggtggaatctgccgccggaatgccgcagggggtgcttgctgctgctcctcagtctggcctttgtcccgatgctgctcggcggtgcaaaacagttcaccaacgtttattgccccaagcagatcgaggagttcgggggcgaatacgtccatcagggcgtgctggaatgccggaaccccgccaatgaaggccgttcccccggcaggtgtttcccggcggggcacgcttcgggcggttttgcgctcatgatgctgttcttttgcttccggtcgcgccgtgaccggtgggccggtctgggggccgggcttattgcgggctggggtatgggattctaccagatgctgcggggacagcatttcctctcgcacacgctgttcacaatgatcggcgcatggatgatcatcctgctcgtcacatgggcactgcgcggtttttctcttaacaagcttgtaagtataaatatttgtcctgttgttctcccccggttgtcacggaatcgtaacagttcctgtgtaacaacgcgctctccgaacaggatcttttccttcaagagaggcttcatcatgtatgcgtttctggatgccgtgcgctaccttgtgcggcggttgctccctttcataggcatatattttttcgcagagcttacggaactttccatactggccctgcgggaatcctccaacctgcatctgtcgctgaaaggctttctggtttcgttccccgtttgggtgggaacgacgatggtttcgtgccttttttcaatcctgcccgtgctggcgtacctgctgctcctgcctcggaagtggcacggcggacggtgggacaggcggctttccatcctctttttctttctgttcacggcggggcacttgtttgaggaagtcgcggaactgctgttctgggacgaattcacttcccgcttcaatttcgtggccgtggattatcttgtctacacgaatgaagtgatcggaaatatcagccagtcctaccctgtggccctgtttttgggcgggattactgtggcggcgggagtcattacgctgctggcccggcgttggctttccacggtccgcaccgtgccgcggcttctcatgcgttttgccggcgcggcgctgctcgtcttgtgcgcgtgttcgctcaatatggtcaacttcatggatatatccgaagataccggcgatcggtatctcaccgagctgtccaaggatgggctgtacagcctgttccacgcgtttttttccaacgaactttcctacaacgatttttatctgacgcgccctgatgcggataccgtggcgacgctggcccccttgatggcctcggatgcccgccgggtgggcgatcccgcgtcgctggcctatgaggtggcgccgcatgaaaaggaaatccgggcgaatgtggtcattgtgctcatggagagcatgggatcggaatttttcagcgaattccgcgacgatgggcaaaagctgactccggaactggaaaagctggcttccgagtcgctctatttcagccatgtctattcgacgggcacccgcaccgtccggggcatcgaagcgctcacgctggcgcgtccgccgctgccgggtatgcccatcgtgcggttgcagggcaacgacaacctgcgcggcatctggagcgtattccgcgagcgcgggtatgacaccaaatggatttacggcggctacggctatttcgacaacatgaacgcctatttctccgggaacgggttcaccgtggtggaccgtacggtgatgcagccggaagagatcacgttctcgaatatctggggcgtgtgtgacgagaacctctttgcccgcgcgatcaaggaggcggacgcttcccatgcggcgggcaagccgttcttcaacttcgtgctgacgacttcgaatcaccgcccatacacctatcccgacggaaagatttcgattccatccaagtccgggcgcaacggcggggtcatgtacgcggattattccatcggcaaattcatggaagaggcccgcaagcatccgtggtttgacgataccgtgttcgtttttgtggcggatcacggggcgagcagttccgggcgcgaggagatcaagcaggggaaccatcacattccgcttatcatttatgcgccgaagttcatcaaaccggagcgccacgatcagccgatcagccagatcgacgccgtgccgacgctgctctccctgcttcatttcaagtatacgggcgagttctacggcacgaatgcgctcgatccggactatgtatctcgtttgttcctgagcaattatcagaaattggcctatgtcaaaggcaacgagatggtgatcatgcggcctgttcgcggggtgcacttctaccgtgacggccagcagatcggttccgccgaggccgcaaagccgcgggacagggtaaaggcccccgatgcctcgctccagcaggtgcttgatgagggcatcagctattatcagcactccgcccgctggcgggaatttttgaaggagtaatgagagaggtggggtggaggagtggagaggtgagggagattggggagggggaag

SEQ ID NO: 7521 - DNA, 979 bp, Unknown
  gut microbiota DNA sequence
ggagctattaattcgaagagtatctgggaagtatggaactacaataagctggattatggtgatcgtttttgttccggtctcctgttctggtatcataactgctctatgcctcaagtggcttcccgtatgtgggactggtctttggaaccgacagcatccctttatcatactgccaactctttagagccattgcatgcgcagtttgactatttgaaaaatacagtgtctgtagtgaatgattattatcgtgaatttaaggattataaagtgatagcacaggtttacgatattaacagcaaaaaagtctttgaggaatcagcagtggttaatctaccctcggatggagtggtaaacgatgcgttaactattcgtttcccggaaaatatatctcaagttcactttattaaactgattctgaaagatgaaaagggaaaagatgtttcttccaatttctattggcgttccaatgacaaatatgaaggaagcaaaactttgaccggtccggctgcttcaggttttgaagatttgagtaaattaaaacaggcaaaggtgaaacttacctataaagtaagagaagacgataacaattactttgtagatattactttgagaaatacctccgggcagattgcattctttaatcagttgcaattcctgaattcaaaaatgagtccgatacgtccgtcattctatacagacaatttcttctccctgatgccgggtgaaaagaaaacggtaaccattgaaaccgcaaaaggaaagttgaaagatggagttgtattggcactgaaaggctggaatataaataagcaggaatataaattgaagtagaaaagtaagaatatgaattgattctgctttctttgtttcagtagattgtagaatcaatcattgatattatagagaaatcatttaatcattaaaaagaagtgagatgaaacttaagtttatcataggtgtagtcggtatattatcagca

SEQ ID NO: 7522 - DNA, 659 bp, Unknown
  gut microbiota DNA sequence
gtttactaatgcaccttctttagatactactcaggaagaacaggataataattgggtgattggcccattccatcgtccggaaggagttaatcctgtcatatcaccgcagccgacagaattttattgtcctatgcggaaacagcaagtgaagtgggaagaaagtgatacttttaatccggctgctactacaaaagacggaaaaattgttgtactttaccgtgcagaagataattcggcccaaggcataggtaaaagaacctcacgtgttggttatgctgaaagtaaggatgggattgagatgaaaaggatgggcagccctgttctttttcctgccgaagataattttaaagatcaagattggccggggggctgcgaagatccccgtgtggctatgaccgaagacggattgtatgtgatgctttatacggcatggaatcgaaaaaaagcgcgtcttgctgtagctacttcccgagatttgaagaattggacaaaacatggacttgcctttgataaggcatataacggtcgatttaataatcttttctgcaagtcaggttctattctaacaaaattgaaaggaaatcaactggtcattgataaagttgacggtaagtatttgatgtattggggagagtatgcggtatatgctgctacttctg

SEQ ID NO: 7523 - DNA, 1568 bp, Unknown
  gut microbiota DNA sequence
taagcgaaaaggacattcccgaggggtgggaatgtcctgcgaaaaagagtatcgatatgatctgatttaagagcacagtccgcatttcgcacatgcagacggtgtggcagcgcaaccgccgagggcagtctcgcgcagctcgatggggatgcggcggccgaccgcgtacatggtatcgagcatttcatcgaacgggataaactggtgaatgcccgcgagcgagagctcagcggcaacgagcgcgttggccacgcctgccgcgttgcggttctggcacggatactcgaccagtccgccgaccgggtcgcagaccagaccgagcatgttcatcagcacggtggaggccgcgtcaagacactgctcaggcttgccgcccatcagttcgacagccgcgctggccgccatcgcggatgcgatgccgacctcagcctgacagccgccgaccgcgcctgcaacggttgcgttgcgcatggcaaggtagccgatcgcaccggcgttgaacaggccgtcgatcagccgttcgtccgagatgttgtagcggtcctgcagggcaaacagcatgcccggcggaacaccggcgctgcctgcggtcggcgcggccacgataaggcccatcgaggcgttgacctcgagcacggccatcgcgtactgcgccgccttgtgcagtacatccccgcagatggagcggcctttggccgcgtgctgcgccagcttttttgcttcgccgccaatcaggccgcccatggacttgaccggcgttttgagcggtgtcagcgcggatgagcgcatgatttcgagtgccctcttcatacggtgcgtgacctcatcacgtgtggtttcgcccagctggcactcgcggcggcgcatgatctcggagatggggagctgctgctgcgtgcagagtgcaagcagctcggatgcgtttttgaaatccataatctgctctcctccttacggttcgatgatcatgacgtcgtggacgttgggattgtttttaagcggttcctcaatgccctcgggaaaatgaccgtccgactcgacgatggtgtaggcggtgttgcccttggactcgcggaacaggcgcatgaacgcaatgtttacgcccttgtcgctcaggaccttggtgatgtgcgccacaacgcccggcttgtcctgctgaacgacgatgaccgtgctgtattcaccagtaaagtcaacctcaacgccgttaatgcgcgcgatgcggcacttgccgccgccgagcgactcaccgcggatggtcatcacctgaccggcggcattctccatgtggatgtccacggtgttcggatgaacatcggtctcggtctcacacggcgtgaatgagtaggacagaccgcgctcggtcgcaatcgaaaacgaattgcggatgcgggtgtcgtcggtcgaaaagcccatgatgccgccgagcagggcgcggtcggtgccgtggccgtgataggtcttggcgaacgagccgtacagggtgaaatccacctttttgagcggcggcgcgatcatcttgtgcgccagatacgcgataacggcggcaccggcggtatgggaactgg

SEQ ID NO: 7524 - DNA, 6930 bp, Unknown
  gut microbiota DNA sequence
ggagaacactccacacaaaacgtcaatgaacagaaaaatacatgattctatcagaatattttctgaatacagaaatatttctgaaaaaatccaccatccgataaccaaacaccatgctcaaatggcctgatctcccgccacaagcacgatgaagccgcaaaaaagattccattcgggcaaagcgaatctttctttcttgcgaaaaaacacccaaacaaaaaggggagcacggccaatcaatcgcctgaacgaaagggaatccggcaatcccgctgcccctccgcctcttctgcccactgaaggccccttccccacccccaccgcacaacgctgtgcgcggactgcaaaaacggccatccgcgcacaacaacgtacgggcacaaataaaaaagccgctcccaaacgggaaacggctttttctcgccctcaacagacgttcttgaaacaatgtgccctgccccaaagcaagaaatcaagtcacaggagaaaccacgttacgctctcaagaaacgccttacggaagaacgaccgcgaaagggcaccccttccggggccttctcccccgcattcctcaatcataccgcagaacgctcatccccttcagccgggaaagaatcagattctcgcggcggacgttgggaagttcagctccgggctggagggaggtgacgacggcccgcccgataatgtgccggccttcgccgttcccgtcatcagtacgaacgccccaaacgttgtggaacataacgggctcgcccttgtactcccctatatataaggtaatgtgcccgcgcagccagagcagcgtggcgaacggaaccccttcgtccttgatgatgctttccttacccgagggggatgccttcacgaagctgatgaactgccatgccttggcctgcgccgatgagttgcgtggcagccacaccccaaaagggacgaaaagatccctcatcgccagcgagcagtcccggttgaacaggtatccgccccagccgtagggctgccccatcatgcggttgccgatctcggccgccgcccttgccgtcaggggaatgggcttgcgcaccgcatcggagggagacacccgcacgggtacggccacggcacggccctgcggatcacgcacaggggccagcagcctcagcgaggatcccgatccgccggacagaggcaacatggtcccgaggctccccgtggtaacataacggcccagctcgtccaccagcgggacgtcgtcacggacgatgaccgcatacgtcccgttctcgtagcgcgagcggaacggcgcgtccgtcacagccgtatcctccgtgggaacccagccggatacgagccccgtctccacgaacacccatgcgccatcggcggaggtatgcacgacaagcagcggcatccccaccggaagcgtggagtacatgaacatatcgaagggatacccctccccggcctcggcagggttcccgaaccggggcttatgggtgggcgcttcgcgcagcaccgtgggccgcacggtaatcgccttgtcgaaccgggacgggtacgcatcccgagcggcgttcgccgtcagcttgtcccaattctcctgcgtccacggcaacaggttttccgcccatccccgcgccttgctccgcttcttctggccgccgaaaatggcgaacgcctcggaggcggaaacggaggagcgtacagcctcccacgggccaaagaacaggctgttgaaccgggcgtcctgccgggcctgctccgcagccgacatgaggggcttgtccggattgccctgccgggcatagaccagcaaatcctgcggcaaccgccgcaaatccgcaatgctccctttcgggccttcaaagctgccggactcgaccggaggcaggctcccgcccttgcgtccgccgccgcagccgccgagcgcaagggcgcagcacagcaatacgccgagagcaatcagacggaggcttctccctttcaccatttgggggacagagacaacgccccgccccccgagcctttcatacggcggcacaccccaaaagcccttgcgggcaccagaaaccatcatgtgcgttcaccctcagtttgcggaccggcggcctccggggccgcccccaaacgtcgggccagccacgtataccgcttctgcatccggttgtttttaacggccatcgccaaagcgcggggctctcccaccagtacgacgagacgcttgccccgcgtcacccccgtatagatgagattccgctgcagcagcatatagtgctgcgtcatcaacggaatgacgacggcaggatattccgaaccctgtgatttgtgaatggaaatcgcgtaggccgccactatttcgtcgagttcttcccaatcgtacccgacataacggtcatcataccggacaacaaggcatttttcctgtacgtccacactggaaacccgcccgatatcgccgttgtacacatctttctcatagttgttgcggatctgcatgaccttgtcgccgagccggtagagccgctctccgcgctgcagggcctccccttcgggattgagcgcctgctgaagccgcaggttgaggttcgccgcgcccacggtgcccttgtgcatgggcgaaagcacctggatttcatcgaaaggatcaagctggaaacggcgggggatgtggttcttgaccaaatccacgatgatgtccgccgcgcgatcgggatcgtcctgccgcatgaaatagaaatcggaaagacgatcctttgaggattcgaggcgtggcagctcgccccggttgatcaggtgggcgttgcacacgatttcgctttccgccgcctgccggaacacctccaccagctcgaccacgggcatggccccggaagcgatgagatccccgagcacattgcccggccccacggacgggagctgatgcacgtcgcccacgaacacgatggtcgcgccgagcggagccgccttgagcaggtggtaagccagcatggtgtccatcatggacgcctcgtccaccacgagcagcccgcaggccagcgggttatcctcattgcgggcgaacccgtcgtccttgggcgtgtattcgagcaggcggtggatcgtgcgggcttcccggccgatggcctcggacatgcgcttcgccgcccggcccgtgggcgcggccagcaaaatcttggccttgttttccgcgaaaacctgaatgatcgcgttcaggatggtggtcttgcccgtaccggggccgccggtcaggaccattactttggacgtcgccgatgtgcgcacggcctcaagctgttcctcggccagcgtaatgccgagccgggacacgactttctccaccacctcgtcggcttttgggaaccgcactgacttcggcgaggcgaggatacgccgcaggtaataggcaatcttcgattcgtaatgatggaaccgggtcaggtacacgccgatctcgtcgtcgagctcctccagtaccacccgctcctcacgggcgaggcagtccacggcctcctcgacgaactcttccgcaatgccgagctgggaacaggtctgttccaccaaggcccggcggggataatagacgtgcccgtcgtcgatctgcttcatcagcgtgtacagcgtgcccgcctgaatccgcaaagggtgctcgctttcaaagccgagcttggccgccagcgcatccgccgtcaggaagccgatgcccctgatgtccatcgccagccggtaggggttctcctgcacgatggacagcgcctgcgggccgtaatgcttatagatacggacggcgaaggaagcgccgatatcgtgcggctggaggaactgcaccagattgcgcacgccctgatgctcggtccagcactcgacgatggtcaccagcttcttctgggtgatgccggaaatttccagcagacgctgcggctcctcatcgaaaatcctgagcgtgtcttcgccgaacgccttgacgatgcgcgccgcgatgctcttgccgatgcccttgatcagcccggaggccagatacagcttgatgccctcggcggtggcggggagcaggctttcaaaggaatccatctgcacctgcctgccgaagcgggcgttgttcacccaccggcccttgatgcgcagggacgcgcccgcctgcgggctgcccatatgcccgaccacggtgacgagatccacctcgtccttgccttccggcctgacccggaacaccgtgtagccgttttcctcattatggaagaccacacgctccagcgtgccctgcaattccaccgtatcattgagggatgaaagagaaagctgcgtcatgccctaccccatccgccgctgcagcagcagagcgtcggccacggtcaaggcggccatcgcctcaagcacgggattgacgcgcggaatggcgcagatgtcgtgccgtccgcccacacgcaaggatacggggctgccttcggcgttcacgctttgctgttccttggcgatggaggggatgggtttgatcgccacggtcatcaccagcggctggccggtcgaaatgccgccgaggataccgccgcaatggttggtcgcgggattgcccggcgtcgatccggccccggccggacggtaggcgtcgttattgaagctcccccggctgcgggccgcggcgaaaccgtcgccgatctccacgcccttgaccgcccctacgctcatgagcgcctgcgccagcacggcatccagcttatcgaacacgggttcgcccagaccggagggcacgccgagcacctccacccggacaatgccgccgagcgtgtcgccctcgccgcgtacggtacggaccaacgcctcccacggctccacggcggcctcacacggagcgcagtacggacgggacgccgcgcccgccatgtcttccggcgtaaaagccggggcgggcataccgccgatttccaacgtgcaggaacgcaccgaaatcccctgcgccgcgagcagcgcgcgggcaatggccccgccagctacacgggcggcggtttcgcgggccgaggaacgccccccgccccggaagtcgcgcacgccgtacttggcgtcataggtcatatccgcgtgccccggacgccagaccgccgccagcggcccgtaatcgccggagcgctggttggtgttctcgatttggaagccgatgggcgttcccgtggtcgcgccttcaaaaacgccggacagcaaccggacagcgtccggctccttgcgcgtggtcccggccgtgccgccgccgggacgccgccggtcgagctccttctggagcagttcctccgagagggcgatgcccgccgggcaaccgtccaccacgccgccgagcgccgggccgtgggattccccgtaggtggtcagacgaaaaagacgtccgaaagtatttccgctcatgaatgctctttcctccgtgtgactcccgccatcaaaacacgattcgttttcggcgtccagagacgaacccccaagcggagcatgacttttttcgcttccgcctccgccgccgcgcgcttccctccctttacagacggcgccgttccctactatagatacaaattcacgctacggacaggtacttccgtcccttccgcgaagacttcagcccaaaaggacatctgttgatgaatacgaccctgaatatcggactggccggactcggaaccgtcggcggcggccttgtgcgcctgctgtccgaaaacgccgaagaaatccgggcccgctccggctgcgactttaatctgaaggctgtcgccgtccgcaatccgaaccgtaaacgcgatcttccggagggcgtgcgcctgacgaccgatcccatgacccttgccgacgatcccgacattgacgtggtcatcgagctgatgggcggcatcgacacggccaaggagctcatcacgcgcagcctcgcaaagggcaaacaggtcgtcaccgccaacaaggccctgctcgcggaagaaggcgaaagcctgttccggctggccgacgaaaagggcgccactctgctctatgaagccagcgttgcgggcggcatccccatcgtccagacgctgaaggaaagccttaccgggaaccatatcacttcgctcgaaggcattttgaacggcaccggcaactatatcctttcggaaatgaccagcaagggcgtcaacttcgcccctgccctcgccgaagcgcaggaaaagggctacgccgaggccgatcccacgctggacatcgacgggttcgacaccgcgcacaagctcgtgctgcttatccgccttgcatggggcgtggactatccctatacgaaaatgcccatcgaaggcatccgcaacctcgacaagatggacatcgactttgcccgcgagttcggctaccgcatcaagctcctcggccgcgcccggatgcgtgacggcaagctcgaagcgggcgtcttcccgacgctggtgaaccacacctatctccttgcccgcgtgggcggcgcgtacaacgccgtgcgcgtggaaggcaatgcggtcggctccctcttcctgcacggactcggcgcgggcagcctgcccacggccagcgcggtgctcggggaccttatttccatcgcccgccagaacaacaagctgaactccggcttcgtcaagcaggtgctcccgcaagccgacatcctgcccccggaagaagcctgcaacacctattacatgcgcttcatggtcaaggacgatcccggtgtcctgcgcgacctttccggcgcgctctccgatcagggcgtcagcatcgcgcaggcaatccagaagggacagagcgaagcgggcgtgcccctcgtcttcatgacccacgaagcctcggtttccgccatccgcaaggccgtcgaaaccatgcgcaagagcgatttcctccttgccccggctatttgttatcgggtcatggggtaaatgaagctattgggtttggggaggggaacctttctggagaaaggttccc

SEQ ID NO: 7525 - DNA, 9043 bp, Unknown
  gut microbiota DNA sequence
gggggaggggagggggaaactttctctagaaagtttccccctcccctcccccggttttccccctacccttctacatacagaggaaaactggcctcgacggactcaaagagagcgagcgggacgggtcgggaaaaaatgtagccctgaatcgcgctgcacccgatcgagcggagaaactccacctgctcctgcttctcaacgccttcggcgacggtggacatgccgagtgcgcgggccatctgcacaatgctctcaaccacggcgcgctcgcggggcgtgccttcggtgtcgcggaaaaaggcgatgtccagcttgagcacgtcgagcgcgatctccttgagcatgttgagcgacgagtaccccgtgccgaaatcgtccatcgcactgcggaacccacgggacggaagggccgccatcagttcacggaacagcgcgaagttacggatcaccatcgtctcggtgcactcaagctcaagcattccggaatcgataccgtacttgtcacggatcgctgaataacggtcgaggaaatcgccctgcgcaatgctcaggcgagacacattcaccgaaagcctcaacggaggcaggccgcgcgaaccccgggacgccagataggcgcacgcctcttcgaacacaaaagcatccagatccacgatgaacccgttgcgctcgaacagcgggatgaagtcgccgggcgagaccatcccgtatcccgggcgctcccaacgcaccaggacttcggcgccaaacagcgcgtcgccgtgctggatatccacctgcggctgaagatggaggcagaactcccgattgcgcagggcctcctccatgcagctctcgatgttcttttcgtaaagaacccgcttgcgcatctcctcggaatataaggcgtacttgctgccgctgagatgttttacgctcttctgcgcaaggttcgcccggtcgagcatatcgtcgatgctgagaatgtcctctggacgctcgaccagataaatacccgcgatcatctccacgcggaaccggcgattcgccaacccttcaaaccgggtcagcagatccgaacagcgcaggaaccgcgccaccagatcgtcgatatcccgatagcaccgcagcagggcaaagttgtcgccggaaatacgcccgaacgtctctcccgggcgcgcgccttccgcgatgagctcggcccagtagctgagcaactcgtcgccgatgtcgtatccgtagatatcattgatgaacttgaagttgcggatatcgcagtaccagagcgaatatttgcggtcgccgcgagcggccagcaattccgccgcgtccgtcttgaacttggcgaaattgctgtatcccgtaaccggatcgtgctccgcctgatagcgcagatggcgcagtgcccgcacgttatcatccatgtccgagatcgtacccacaatacgcaggagcttgccctgcgcatcgcgcttgagcgtcgccgcgatgcggcaccaaatgaacgcgccgtcacggcggcgcaggcgcaccgtcgtctccacctgatcctcacggtacagcgaagcgtgaaacgccttgaaatcggccatgtcacgcgggtgcaccgtcaatgaccggagcatgtccggcacattgccgggattgttgcggcaatccagcagcgagcccaaatacggcgcataatgcagctgttgttccggcccccagtcgaacaccacgctcttggtctgctccacgatgatccggtaacgctcgtccatcatatgcagccgctggagctcggcattctcgcgggaaaattcgtccagccgtttgcggtcgtcgatgccgtgcacccagacgaaatgaagcttgtccgcatcttccacgcacaggatgtttgctgttacccaatggtaactattatcccgccacaggcaacggaaatcttccttcaacacgccgtcgttcagccggagagaacgggcgtttgcgacaaccctgtcgtaacgctccagatcttcggggtggatcatggactccctcaccatcgccttcaggtcgtccagcctgccctcatcgggaagcgggagaaacgtcccgctggagtgccggatgatgcggaaggtgttccgggtgaggttgcattcgtagatttccccggactcctcactcagggcaaagtcatacagcagggcgacgcggctgcgctcgcgctcatgccgtgtctcggtgatgtcggtgatagtgctgtagcacagccgggaacggcccgacgtggcgaagaagaaccttgactggatccaccgggttccccctgcggacatcttcgcccggtattcgcaaaggagttcccgtttgtccgaatcgaacacctgccgcaaattttcgatgcggcaaagcgcatacacgtcttcgctatcctcagcgacgatgttggagcgtaccgcctccttgagcatggcctcatagtcgccttgggacgggatcttctttcgggcgaggaattccccatacggcacggtgtacaaccccgtatcgagatcaatgcgcagaacaaggccgtaagcataccggaacaggcaggaatgctctccttccgagtcgtaaaccggaagatcgtccagttccctgcctccccgggctcggaatttcatccggtacatatcgtcgtccgcgagctggaacagggcatcgtaagagatctgctcatgggaataggccacgccgatgctcacggaaagcttgcaatccgcatattcattgccaagcgtggcggacatggcttcccggatgcgcctggagacgtccagcgcctcggtgcgcgaagggacatcctgcatgaaggcgatgaattcatccccgcccgtgcgggccacaaaatcccgggtacggaaagattcctgcaacagcttggcgaaagcgatcagcacggcgtcgccgcgcaggtggccatagcgatcgttgacgcgcttgaaatgatcgagatcgaacaccagcagggcggaagaatgccctccgcggtggatatccaaatacgtctggataaactgctgcgcgtactcgcggttgtagagccccgtgagcggatcgagccgggtctggcggatcagctcgtcctgccgcattttgcgttcggtgatgtcgaggagcaggcagatgcacacgggctctccttccccgtccacaacgagccgccccttttcaaggacccagatgacctgcccgtctccttttctgatgcggtattcctgctcatagcagccgttcacggcctcgcgccatgcggtgcggaaaagggccacgtcatcggagcaaacaatggcctcaaggccgcccgccatcaacccctggaaaacgtccggctcatagccgaggaaatgcagcatcccctcgctgatgtaggccaagcgccgctcgtcgcctccgtcagtaacgaaaaagcccccctcaaggctggaatcgatcaaagacataaaataacgctggcggcggtagtcggcctcacggcgctgctgctcgtcaatgtcggtatagaagcagtacagcacctcatgaccgttccaccgctcttccgcgcggcaggcgtccaggcgcacccatatgtcgctgccgtccttccggcggacgcggaaagggatgctgaaccgcccggtggctttgcggttgcggatctcgtcgttgcccacgatcaaatcttcggcatacacaaagttgatggcgcgattgccgaactggccgcggacttcttcccgcgtatacccgatcatacagaaaaactgatcattggcctcaaggatggtgtactcggcatcggcggcgagctttgcaaaaccgttgaacaccacggcgtggcaggcttccagctcggcgttcttttccttgagcgaaaccacgctttgctgaagctgctcctgaagctcatgggaacgggtgatgtcgacgacgatgctgacgataacgggccgcccgtcctcggaaatattgcgcaatccccggtcaaggacccaaatgtaggacccgtcccgcctgagcatccgataggagacttcatagctgtcagtgacggtcatcgactcattgactagagtgttgacgcggtcgcggtcgcagggatggataccgttttcaaccatccctcccgtgtcctccacaaaatcttcatacgaactatatccaaggtacccgaggagctgatcgttgatgaaatagagggggaagcccttttcgatatagccgccgataagcccgccgggaatgctgtttttaagcagctggaacgcgctgcgccgggactgcgaggaaagctcgttcccttccccaaggaaagaggtagggaagaattcgccgtccggctgttcgccgctgggaagggaggcgtgaatgccctggatgaggcagcgcccatccgggacttcgccgcacatcgcggaaatgcggacgttcaccccttttccgctggatggatcgacgacgctcatgtcgccgtccgtatagcacgccttgcccgcttccacggaatagagattccgcagcttcacgtcgaaggagcccggcgtggccttgaactcctcgataagcagctcgcggcaatcgcaaaaacccttgccggcacgttcaaaatctcctgtccctatccagcggatatcgtcagcgaggcactcaagcgttttatccagatcgcgtaaatggaggtaagcatcaaaaaaacggcggacgacgtcctcggaacgggaagcgattgtttgcataggggcaccagatcaaaaaatattttgtgatcactagcctgtgtcccgaagggcgtcaaggaggcaaaaaggcgcctcaaacgggaaaatacaggctcttggagagattatcttcccacgaatgaatcgcggtttttcggatgtgggacagttccccttcttcacacaggggccccaacaataggacagctacgtaaaaggaagatggaaaacggtcacctcccttaccatacaatcgtttcccgtaccgttaccttgactgcaaaaacaggttacgcagtatgatgcacatgctccaaggaagcattccaacccctttagtgaaaacccggcgaaaaatataaaaatcctcatatccataacgggggttatgccgtacggaaaaggatggcaaaccccggcgccctcaggcggagcgggataagcctgcccttatcgttgggcaggagtggtacggttcgtcagaatgaccgcctgcggcaatatgccctccaggatgcggctccatacccaccctttttcggtatatcggccaccgggatacggccaaatgccctccgcgatcccccgaaacaccttcatgcacaagggctgtgagggcctcctcagtatttcagaaaacaaaggaggacataagaaagcttcatccgcccacagaaaaagcagaagccaccctgacccaaacaagaaaacggctgtggatcagcgcttcaacaggccgaaggagttcgtttggcaggcctttcccttttcgccgaaaaatcctacccttggaagaaagggcgcggacggcgcctccaacctctttcacacaacgccatgaagacagaattcgaaacagccacaacggatctcgcgcgccgggtcccgccccacagtgtggaagccgagcgggccgtgctcgccggactgatcctgcgcccttccgcaatggggcagatcgcccccatgctgcacccggaagatttttacctgcccgcgcatcagacgctgtacgcggccgccctcgggcttcacaccgataaccggccagtggatctcgttacccttgcggaacatctgcgcgatcaaggctcgctggaacaggcgggcggcgcggcttatatcgcggatctggcgcagtcgcatgtcagcgcggcaaacgccgagtattatgccaagctcgtacgcgacaaatccatccagcgcgggctcatcgaggcgggggctaaaatcgtttcgacgggcttcgacacttcaaaggatctggccgggctcatcgacgaggccgagcaatccgttatggcggtatccagccgcaccagttccggcggattccggccggtgcaggcgctcgtgggagacgtggtggacgccgtgctcaaacccgcagagggggggatcaccgggctcgctactggctatcccgaactcgacgccatcacacgggggctccagccttcggatctgatcatcatcgcggcgcgccctgcgatgggcaaaaccgccctcgccctcaacctcgccatgcgtgccgccatcagcgaaggcgcgcccgtgggcattttctcgctggaaatgtccgaacaccagcttgtccagcgtatgatcagcctgtggggaaagattccgcaggagcagctttccacaggccgcctcagcaaagccgagggagcacgcttcttcgaaaccgcagatctgctccggaccgcgccgctgttcatcaacgaaacgcccgccatcagcactcttgaactccgttcacaggcacggcggctcaaggccgagcacggcctcgggctcatcgtggtcgactatttgcaacttatgcgctcttcacggcgcacggactcccgtgaactcgaaatttcggatatctcccgctcgctcaaggctatagccaaagagctcgacgtaccggtcgtggccctttcgcagctcaaccgtaaagttgaagaacgtaaagacaaccgccccatgctctcggacctgcgtgaatccggagccattgaacaggatgcggacatcgtgatcttcctttaccgcgatgaagtatacaagcccgatacgccgaaaaaaggcatcgcggaacttatcatcggcaagcaccgcaacgggcgcgtcgggaccgtggaactggccttcctgccgcagtacaccgctttcgaaccgcttgccaaggatcgctgatcggcgatggtggattcggcaagcgtacattccttttaagaggatactgaagcgttggggaagggagacttttctgaaaacccccttccccaacgctgtcactttgcatctatctcccttcccaaagggttctataaagatcgaattcctgtccgcagcgctcactgaagtgttttccctttgaaacaagagctcgtttcaagagaaacactccagcctatgtccctagagacactccacaatgtacggcgtgttttgggaaatacacagatctctccctctccctgcatgacacaacacccgcatggggcttccggatggcagatgcagccggatacgcccaggaacggttccatcgtctgtttttcatctctttagaggaatcccccttttacaaaatataaattttatcttttattttcaatatattaacatacattctttccgggagtcccataaaaaacaaattttatacttgaaaaagaatttcaatttcattattgtctttttatggacgacgaggaaacaggcagtatcccgtctccagtcaaactgttgccgagaaatcggcacagaagccgggaagtggttggcccggcttcccagccggatgccgatcccccccctcggaagcagtccttcggcatccggcaaagaaatttcctaatacgcgggtgtttctcagcttcgcgtgttctcattgccttttccagccaaaaagagcgagtgtgcaaggacaaaaccgtttcatcatggagtacatcatgagcaaagtactgattgtttacggctccacgaccggcaacacggaagctctcgcggaaatcctcggacgccttatccaagaggctgggcatgagacaaccctcctcaatgccgctgacgccagtgcgcccggcctttgcgatggatgggatatgatccttttcggttgttccgcatggggcgacgacgaaataatcctgcaggacgactttgacgcgttgttccagcagttcgacctcatcaacgccaaggggcacaaagtagcctgtttcgctacaggggacagcaacttcacatacttctgtggagctgtcgacgttatcgaagccgctcttgaacggcttggagcggatgtcgtcgttgaaggccttaaaatcgacggacaggcccagtccgaccagccggaaatccaggaatggaccaaggctgtcatcgaaactctgtaagcgctaagaacgtcttccttcgaaatgctcgtttccttacgagcacaacgggtcggagccctctcgacctcttcgacccaacctcctccttgcgccccggttcgaccgccgaaccggggcgatactttttcccgtcatgaggttcttacggtagcatggccacctcaagcggatctcctcttccatgccgccctgccaccggatgaggctgtctagccgtaatccttgacgtgcggaatcttccgcgagtgtggtacgtcgagcttcttgtacgctggcgcccttcaggcactcccagcccgtaccgtttctcataagagctaagaacatcttctctgagagtgacttttcttgagcatactgtttccacagtcattttcatcagtcaacggctgtcactgacaactttcaacaggtatccatccagcgcgtttctccgtcggtttctttgaacaaactgtttctagtcatcaccacctgttaccgccagacaacatctgcaaacagcagtggatgactgacaatgatagctccggactggcactgtcagacatacaaaaacaacacggcaaaatggtcacgaataaactatactatgttaaaataacaagctttatttgcatcaatgacaaacgctgaaatacggtagagaggtgtcatctcaaagcggaggccataaattttttccatccaaaacaagtcggcaaaatactcgctattttaccttaatatattgaaatattatgttaaaatgattcaaaaagatcatattcccttatgtttgattcccctaagcccgccgagggcttaaacgggaaattctgaaacgttgttccaggtgtcaacgaaaacagcatgttatcggtgatgacagctaaggtgagttcgtgacggattatgacatgcatcagttgtcacatggcttttcagaagaaagcatggaagaacatt

SEQ ID NO: 7526 - DNA, 1426 bp, Unknown
  gut microbiota DNA sequence
atcctgtatttcacgtccgggatggcgattctgaacgcgctcccctctggagaatggcaatacgccgccatcggcgcggtgcccgccatgatgggggctctccgttacaacatgtatgtcattgccaatgccgatgaggaattcctcatcaaccgcgtcctcgtccggcccgacagccccatcgccaaggtgaaagggtggaacaaggattatccggaggttctcggcagccctgaaaccgtgaagggcaagaccttcctgaccaccaccgtctcgtccgcccactatgcgctcagcgtatggctgcgtgttctcgggctcactgaaaaagacatcgtgctcaagaatatggatcaggcgcaggccctcagcgcttacgaagacggcatcggggacggcgtatgtctctgggccccccatgcgtatgtgggcgaggccaaaggctggaagcttgtcgccaaccccaagctgtgtgggcgtagcagcccttgcgtgatcgtggccgaccgcaagtatgcggatgcgaaccctgaggtgaccgcgcgtttcctctccgtgtatatgcgggccatgaatatgctgcagaacgagccgctggagtcccttgtccctgaataccgccgcttcttccttgaatgggcgggcagggactaccccgccgatctggcactgctcgatcttcagacgcacccggtcttcaatctggacgagcagctcgccatgttcgacgcctccaagggtcagagcaaggcccagtacgcgcagagcgaaatggccagattcttcgccgaaatcggcagcatcaacaaggatgaactgaagagggtggaagacggctcctacgccacggacaagttcctgaagcttatcaagaagcccataccctcctacaagtaaacggatgtccctctgccctgaagggaaggcttcggccttcccttttttgttcaacgcagtaaaaaaaattatcctttacaagatatggagagtgttcatcaatggtttctattcagaatttggaatgataagcatatcggtgccgatgcgtttgccgtgtggattcctgatctcgcggatacgcgggctcttggaaagaaatccggtggctgttggacattggccatacgttcgaaccatgtccggttgcagtgccgaggggcggtaggggctcgtcggcgatacagtatgtattgacttgtatcaaaagacatatgagagtcgggctctccaccctgttgaagagaagtatcccttctttacaatgggatcagtatagaaccaaagtagcgccggattagaaactgaaaatgattcctgattgacaagggaagagctgtgggctagggagcctgtgcgaatgtattcccttgttgtctgcatagagcgtttgtagagcaaattccggtcgagggaggtgccgcccatg

SEQ ID NO: 7527 - DNA, 3761 bp, Unknown
  gut microbiota DNA sequence
gcgttctgcccggaatgccggagcaggccggctatgagccgccgtgcagcgagggaggcccggatgacgagccgtgattcccttccgacaaccgaccggaatgaaggcgtgaaccgtgatagagaaatgcgaaccgattacccatctgtttgatgctgtccatcagttatgggatcacaggcgtacgcagcgtgcgttcgctaccctgatcttcttcatttatcttgcggggcttctgggtatcgaggccaaccggcagggggtactgcctccgtggctggagcatattacgcccataagccactttcaggcgatccatctggctttcacgcttatcctcggcatggaggtgatggagcttatcctgaccatttccggatcgctttccaaatcgctcggcaagcagtttgaagtcatggccctcatcctgctccgggacgcctttaaagaattatccaagctccccgagccggtcagcctcacgtcaggcatcgagccggtggtgcacatcgcctctgcggggctgggcgcgctgatcatcttcatttgcctcggtttttattatcagctccgtacccatcagaattatataaccaatccagaagaacagatgcggtacgtcatgtcgaagaagctcatctcgctcgtgctgttcctgctcttcgtaggcatcgccgtccgggatttgatattgttcgtgcagaccggcaatgacgctgacttctttgaaaccatctacaccatcctgatcttcgcggacatcgcgctggtgctcatttcgcagcggttcatgccggattttcacgccgtgttccgcaactccggcttcgtgatcgggacgctgatcatgcgcctgtccttgtccgccccttggccttggaacatcgcgtcgagcatttttgcggcggtttttgtcctggccctgacgtgggccaccacctatttcgggccttcgcgtctgcggaagccgttaccgaggtagcgtcatgctgtatgagatcgaacaggctgtttttgaacgttttccgggatatgcgcggatggtcgtggttgccgatggcgtggacaacacccgggaaatccctgagctggccgaactgctggcccagtgtgaggaaggcgtgcgccgtgatgatctggaggatttctggcatgtcccggtgctggaaacatgggccgaagccttctcgggcatgggcatcaaacccaagaagaacccgccgtccgtgatcaacctcatcaagcgttgccgtgcggggaaacctcttccgttcatcaatccgctggtggcgatcttcaactgcatcagtctgaaatatttgttgccgtgcgggggcgacgacctgaacgtcatcgagggcgatctgcgcctcggcattgcggacggtaccgaaaactatgtgccgctcggccagcccgacgtgctggagcacccgcagcccggcgaagtcatctattatgatatggcgacgaaagatgtgttctgccgggcatggtgctggaagaacggcaaccgcagcaaattgatgcccgaaaccacgaatgcggtgatcaatgtggacgcgatgccgcctctgcccttggcgaccgccgaacaggccgccgaagaagtcgccgggctgctccgccgcttcactggagccaagacggccattcataagctggccgccgagactccgcgctttacgctgtgatgattcgtaccccggcccctctccggcaccgtattctcggcaagacggttttgggaggttttcagggttgttttggccagaaggctttccctgcaggtatggggaaggcgaacgccgtgttcccgttttatcggtagtcccggcacggcgctggtcggggatgctccgtatggggcatccctttttttatggcgttgagcttccttatggaaagagttccatgagttatcgtggctatgggcgtgactccgttttgggagatcctccataacggaataggcgttatttccgggggatggcacgcatagggttcttcccgaaaaacaaggcggcggctatgacagccagacacggagcccatacccagcgcaattctgagagcatgacggagagcccccgttgcgacaggagccccttgaggccgaacggcgaaacccggatagggcgccagtcgcagaagtaccgggtttggtcgaagggccagaacgcggctacgccgagtccgccgttggtcattgcgtccagcaggatatggcttgagacggccagaaggccgacggtgaatcccatgaggcgtgaaccgcgcaggaacagcggggccactccgaagccggcacagcccatgagcagggcaaacgcgagggaatgggaaaacccccggtgcccgaacgcgtcggcatagctgatgccgaaccggaagccgatgacgtcggcatccggcaaaacggcgcacaggatgccgaagagcagcatccgggtggaaagccgtccgcccaggagtgccgccaacgcgagcacgggtgcggggtgggaaaaaacagtgggcatggggaactcttgagatggcggcctaggtgttgctgcatggcgggataggatgtcccatgccttgcctttcacccggatcgtccgtcatgtcaatcgccttggtgcgcgtggccgaagtccctatgcaggagtgtttcaagcgccgggagcgccctgctgacgcacgctttcccttcgttgatgacctcttcggccttgtagaattccagcagcccgacatgggcgagcctcggcgtcagaaaaatgtccggaggatcgcctgccatgcggctccgggtgatcctgtcctgcacgatgtccacggcactggcgatggtgccgaagacgctcggcgggtggtgtgcgggggattcgttttcgccgaacagcgtggtgccgtactgcctgatggtcatggcgatacgttccacgaaatctccctcgccctctttattttctttcggctttttcttggcggagtgccgcccgatgagctcgccgttcaggttgacggcgaggacgatgtccgccccaagcgcacggcaaacggaaataggcacgggattgaccagcccgccgtcaaacagccagcggtcatgataaaagacgggcgggaacaaaccgggaagggagatggaagaccagatcgcttcttcaagcggacctttcttcagccagtattccctgccggtgctcacctccgtggcgacggaggcatagcgcacgggcagatcttcgatgagcatgcccggcggggtcacacagtccgcgaagaaggcacggagtttttccttattcacaaacccatcgatggacatgctgaaattgaagtacgacgccgtattgagtttggtcagcgcgcacacgcgctgcttcagccgaccaatgtttccggtggcgtacgccgcgcccacaatcgaaccgatggacgtcccgcacacgatttcggggtggatgtccagctccgcgagtgcttcaatgatgcctatatgcgaccagccccgtgcggagccgctccccagcgccaatcctattttcatggcagaccgcctcattgcatattcgatcctgcccggaggagggcagggtggatgcgcgttttttgaagtattttttgatcgcgttccagattttttatacggtgtgccgccgtttctgtcgatagcgttacaaatcgtttcttgaacatcgtgaagccctattcagaggaagcggaaggcacccgttggaacagaaaacacctaatagtgtataataaaa

SEQ ID NO: 7528 - DNA, 669 bp, Unknown
  gut microbiota DNA sequence
cctcagtgctcgtctgccggaatgtggatcacccgccggaacagcgggttcgggagctggctccgatacagaccccggtgggcgtcctggagccgctccggctctgctgcggcctcctccggccacaccagcatggcgtattgcacaccgaaaatccgggtctggtagtccagccgccggaagccggagcgctcatagaaggacagccgcctggcccgcagggcgttttcctccggcggcaccccctcctcctgggcctccgcctccaccagcagggagcagcccccatagcgggcctggagcagggaaagcgccagggtgccggttccccgcccccggccctcccggcacacggccagatagtccagcaacgccacgccgtacgcctccgaccgccacaggaaagcgtacgccagcagctcctctccctcgtacatcccccaggtgtcgtatacccctgccgcccgcaggtgctccatggaggcaagaggccgccgctcgctgggcggaaaatcggaccgtacccgctcccggtacacctgccggagctgccgggcggtgagcagacgcagctcagccatggcggtcaaactccaccgtaatcagcagggcgtcctcgtgctcggcacggtagtagttcttccggcggcccacctcccggaagcccag

SEQ ID NO: 7529 - DNA, 54477 bp, Unknown
  gut microbiota DNA sequence
acccctccacccgcaaagacttttgatcttatcgaatccctcttgttgggggtgacgatgttgtgaagccgttcctgtgaatggcttttttgtttggaaaagaggaggcaacaattgggtaacgtcatgcaacggtacttccgttgcgtaacctccccaccagtcgaagtttttgcgggagggggccgggggagggctcttttttcaaaaagcgtcctcccccggtgcgtatcccccatccctcaatgataatcacagcgctctcagacggacccaagtagtttatccggaatcaacaaagtaaggagtgttgccatgcagagcctcattgctgtgattttcaaggaagacatggatcgggcggaagcgtaccgagtggagctgcggggccgggaagaactcgccgggctggtggattgctccaaaatggtagccgcggtctgcgataaggaaggaaaggtacacctccaatatacgcacgccctcgccaaggacggcgcgctgatcggcggcgtgtggggcgcgctgatcggattcctgttcctcaacccgctgctcggcattgtcgcgggggccgggctcggcgcggcgaccggcgaggtgggcgatttcggcatcagccaccgctttatgaacgaactggcgacgcacctgaaacccggcagctcggcgctgttcatccctctgaagaaggaagccgtcgacgaaacgttgcgtgcgctcggcaattccgacggcgtcgtcctgagtaccgacctcaagctggaggacgagtaccagatggaaaagctctttgaggaaatgaccgcggaacgtgccaagaaaacgtcctgagccctgcctatctttcgaaacctgatgctgttactgtgggggcccttccaacagtcaacacatcaggtttttttcatgctgcacaagatcattgtctgttgtctggttgtggttgcgctggcttttccggcacgggcgtcgtcgttgtggcatcccgaatccggttttctgcccgaggacgcccggcacgccgttcccaacaatcccgctccgccggaacgcacggttcccgaacaggttcttccgcctcttccggttcaagatgaaggcaccatacgccgcgtggccgccaaggaaaaagtggcggccttgacgtttgatctgtgcgaactgtccaccatgactacaggatacgatgctgaaatcatcgatttcctgcgtgagaagcggatcccggccaccctgttcatgggcggcaagtggatgcggtcccacagcgagcgggccatgcagcttatggccgatcctctttttgagatcggcaatcacgggtggtcgcatggcaatttcggcattatgagcgaaaaggccatgttggagcagatccgctggacgcaggcggaatatgagctgttgcgcgaggagatcctgaaaagggctcgggcggaagggcacagcgtcgagctgccggaagccgtaacgttgttccgcttgccttacggcagatgtacggacaaggcgcttgcactgcttgcgcgcgagggcctgcaggtgatccagtggagcgtggttgcggaaacgccgcaggacaacgcggtccacggtatgggtgcgcgggtggccgggcaggtgcggcccggcgcgattatcctgttccatgccaacctggtgcccaagggatcggcgttcatgctcaaggaaaccgttggagagctccagcggaaagggtaccgtttcgtgaccgtcggagaactgctcaagctcggggaaccgcagcgcacgcgggacggttacttcaacaaacccggcgacaacctgagccttgatacgcattttggaatcgacggtacgggacgcaggaagtaagcccttacagggatgagagggcggcaggcacggcgtttccgatacaacggggctcccgtcacatgttattccggccagctataggaaccccccggcaggcatcgatgccgttcagcgcaatcaagggaagctgtgcaaatccgccaaggggctctgcatctggccgtgccgatgctctacatctctactaaaggtggcgcaccgtatcgcggtgagggcggattacatggggctaaccataacgaagttgaaggcaataacgtaaccataagtaaagatgaaatgttttctttttgggagaaaatgctcattgatcagcgtaaccctgaaccttatccttacttgagaaagcccgctgaaatgactttttatccagcaagaaaggacggttgggcattctattatgctttttgtcgacatgcggcgttataaagagaatcatccttttttcagcaacagtccgcattatcaggaaaaaggctttcagcgaggatgactgtcgaaaatccaagctccggccagcttgaataaacatcctccaactatttgtctctattccttattgtgaaaaacagcaaaagggaatggaacgcttgtcatgaaaaggcctccgtgctattattctcacaatgctaggtatccgtaacggcaatatcgcttccggagtggaagcgggaatgcagcgcgcgagtgttgtgccgtcatggacgccccgtcacaatgaagcttttcgtatcggaagacgtatgactcttttggaaagacagcgccgtgaatccttcatgaagggaatgttcattcctttcatgttgctggcgcttgtctgttccctgtttggcgatacgaatatccttcacgcggatgtgcagaaggtcgtcgtgtacgattcgggcagtgcccttaccgacatgcagaagcagtctccggtcatcctggaatcctttgaggaatgcatggagacgtctgcttcgaaggcccctctgaagcatctcgtcccgttgatggccctcttcatgctccagcttgggcttgccgtctcttccgtagtgcggctgttcgtgcggcattatgtgcccacgctccgaaagtccgactcttggggcctgcttcccttttctctcgctcccccctgcttcgcgtagccgtcagcggatcgtctgatccgtcatgacgcgcgtcctcacggcttcctttcttttggaagctgcgttcgtttgcgcccgttccgtatcgggctggttcttcccaagcaattctttataaaagcagttcctttttcagagggatggtctttcacaacggtttcctgtcaggttgcggttcggctagggatcgcgtcgcctgctcggatacagatggacgctttcgccatggtggcgaagtcagccgtccggtacagttttacaagaggatatggctatggcaaagaccaatctgaacgaagataagatagccctgttgacgggttgtttcatcttccttttggccgcgttgaatctggcgcatctcgacgtgttgggctgggtagtcagcactaatatgtggacgagcatggacaaggccttctctgccaccaccggcgcatacaagggaacgatctctggtgtcgtttccctgctgtgcacgtatgtggctctgacggcgatcctgtcgttcggcatcaagctgctcggcggcaatgtcgctcggttcgtcaagtcgttcacggtcgtctttttcatcagcgaaatctgctacatgttcggcgcgaacgcccatatcgcggctacgcccgacgcgcaggccaagttcggtatcgactggtcgatcggcctgactacggaagcgggtttcattgtggcgcttgtcgccggtattttcatcagcaacgcgttcccgcgcattgccgaaagtttgcatgacgcctgccgtcccgaattgttcgtcaagatcgccatcgtggtcctcggcgccgaactcggcgtgaaggccgccgcggcttccggcatggccgggacgatcattttccgaggcctgtgcgccatcgtggaagcctatcttctgtactgggccttcgtgtattacgtagcccgcaagtacttcaagttcagccgtgaatgggctgtcccgctggcttccggcatctccatctgcggcgtgtccgccgccatcgctacggggagttccatccgcgcccggcctgtggtgcccatcatggtgtcctcgctgatcgtggtgttcacctgcatcgaaatgctgatcctgcccttcatcgcttcccacttcctgtacagcgagcccatggtggccggcggctggatgggcctcgcggtgaagtccgacggcggcgccatcgcttccggcgccatcgccgactccctgatccgcgcccgtgcgctcgaactcctcggcgtccactgggaagccgggtgggtcaccatggtcaccacgaccgtgaagatcttcatcgacgtgttcatcggcgtgtggtccctggttctcgcctgggtgtggaccgcgaagttcgacaagaccaacagcggccgtaccatgaacttcggcgacgtgctcgcccgtttcccccgcttcgtgctcggctatctgctgaccttcgtgatcatgctgttcatctgcgtgaacgtggaatggcagcccctcggcaagagcgtgatcagcaccctcggacccctgcgcacgattttcttcaccctgaccttcttcaccatcggtatggtgtccaacttccataagcttatggaagaaggcatcggcaggctcgccattgtgtacgtcgtatgtctcttcggcttcatcatttggctcggcctgttcatctcgtggctgttcttccacggcatgacgcctccggttatcgctggctaacctcttccattttcagctataaaggagactgacatggcagaagatactaagaacgtgaagtttcacgaagaagtgcagaagatggagtatgagccgctggacactaccgaactgaagctcatccattggagctgggctctcggcgtgttcctgctcgtggctctctatttcctcagcgacttcattgctcccggcgcccacggctaagccgtcggcgtagggaagggcggacggaactttttacgggggttccgaaggattcacggggcgcgcacacgcctttgcgtctcgccgtcgccgcccatgcaagggtaagccactcggaacgccttcccggagactcctccttcgggaaggcgcaaggagaacccggccccctccgggttctccgaatttcgcctcacaggataaatggaacgcatcatgggccgctacagagtccactacatcgagggttccggcgagaatctcaggattcgcaaagagcagactgtcgaagccccttcgtttcaggacgcgctggaacggttcacgcattggcctgccgccgaggcctgcgagcagagcccggcctgtgcccaacatcccggcgccaacctttgccatatggaggcgtgggaagtttttcctgttggggagagttgattttggggaaggagggcttcaacgctgtttgcggtgtccccccttttttcccaataccccgtatctcctgatgccaacgctgtgcgtatccgccgcccctccctgccaaacggaagcggcgggaccggtgttgcataaggagagagggggaatggcatgtggattgtggaaaaaaaccggaaaagagcccggatgcgttgtgcatccgggctcttttcttttgcggagaggagggagggtttggggcaatggcgtttcggaacagccgtcgcgccgcctccccatcagtcaaaagcctttgggaagggggccgggggaggacctttctgaagaaaggtcctcccccggtattcacgcaccctctcttaatacaggccctgctcgatcatggagtcggccaccttacggaagccggcgatgttgccgccgaggacgtagttgccgggcacgccgaattcctcggcggtttcatgggcggccttgaagatgttggccatgatgttcttgagcttggcgtcgacttcttcaaaggtccaggactgcatactggcgttttgagccatttcgagctggctggtggacacgccgcccgcgttggcgcacttgccgggcccgaaggcgagcccggcctgaaggaaggcttccaccgcttcgggggtggagggcatgttggcgccttcgcatacgaggacacagccgttcttgatgaggttggccgcgtcggcgccgctgacttcgttctgcgtggcgctcgggaaggcgagcttgcagggcacgttccacactggatgctgatctttggggtattccttcgcggggatatacttggcgtctttgcagagctcggcgtagcgggcgagggacgcgcgctcgacttccttgacctgcttgagggcgtcgaggttgatgccgcccggatggtagatgcagccgcgcgagtcgctggcggtcacgggtttggcgccgagctggtacagcttttcgatggtgtagatagccacgttgccggagccggacacggcgcaggtggcgccttccagatccatgttgcgggccttgagcatgttggaggcaaagtagacgctgccgtacccggtggcttccttgcgggccagcgagccgccccatttgaggcccttgccggtgagcacgccttcaaagctggaggtcaggcgcttgtactggccgaacatgtagccgatttcgcgggctcccacgccgatgtccccggcgggcacgtcgatggtgctgccgatgtagcggaaggcttccgtcatgaaggcctggcagaaacgcatgacttcggcgtcggacttgcccttgggatcgaagtcgctgccgcccttggcgccgccgatggagaggccgctcaggctgttcttgaagatctgttcaaaaccgaggaatttcaagatgctcaggttgacgctggggtggaagcggaagccgcccttgtaggggccgagggcggagttgaactggacgcggtagccgcggttcacctgcacgcggcccttgtcgtccgtccatgccacgcggaacatgatctggcgttcgggttcgacgatgcgttcgagaatgccgttctgctggtacttggggtccttcagaaaaagcggttccagcgagtggaggacttcttccagcgcctgaatgaactccggctggtgggggttgctcttcttcacactgcggataactttctgcacgtagctcgaagccatgacgtaagctccttggcggggacccctccctttctcagagggagagaactcctgttttgacaatttgagaaacacacaatcccggggcacgccctgaaacagggtttcaaggaaaatgtgtgccgtttttatgcctttttagtccttctggcaaggcgtttttgccgtttttcgcataactgtgcctatctcaaagggaatactgttatttacaaaaatgttaactacgattttgtaaccccccttcgcagtgaaccggaggcctttgcccaaatccgcggaggccgcgcgcggggcgtgtcgagggcggccgttcggagcgtgattttgacaaaccctcggcctcggcataaggtcttccaatttatttggcctgttggatggggttggcttcccgcttcggcggccccatgcgttttggaagcgtttcgggaatccttttattcagaggagaatgggtatggcggttcatgtagttgatcatcctctcgtgcggcacaaactgggcatccttaggaaggaatccacctccaccagcgaattccgtatgctggccaaggaaatcgcccggttgctcatgtatgaagccaccaagcagttcaagaccgaaaagcggaccatcaaaggctgggccgggcccgtggaagtggaatccatttccggcaagatggtgaccatcgttcccattctccgggccgggctcggcctgatggacggcgtgctggacatggtcccgggcgcgaagatcagcgtcgtcggcctgtaccggaacgaagagacgctggagcccgtagagtactacgtgaagctcgccaaggagatcgaccagcgcatcgccattatccttgatcccatgctggcgaccggcggctcgctcatcgccacgatcgatctcctcaagaagcgcggctgcaagcgcatcctcagcctcaatctcgtgtgcgctcccgaaggcatcaagcgcgtcgaggaagcgcatcccgacgtggacatttatacggccgccgtcgactcccatctcgacgagcacggctacatcatccccggcctcggcgacgccggggaccgcatcttcggaacgcggtagcgggcaggcggcgaggcgctgcctccgatccggctgaggggagcagttcccctcaagcccggtatgcgggagccgccagaggacagggaacatacatttttttctgaggagtggagatggagtcggatacgacgtattcttttcggttgaaagattccctgctcggtgcgcagatgcttttcgtggcattcggcgcgctggtgctggtgccgatcctgacgggcatgagcaccaacgtggccttgtttacggccggcgtgggcacgttgatttttcagatttgcacacgcggcaaggtgcccgtttttctcgcgtcgtccttcgcgttcattgcgccgatcatctatggcgtgcagacttgggggcttcccgcgacgctgggcggcatggtcgtggccggtgccgtctatgtggtgctgagcttcatcatccgttggcgcggcacggagatcatcatgcgcctgctgccgcccatcgtgaccgggccggtgatcatcgtcatcggccttgtgctggcccctgtcggggtgaacatggccctcggcaaggccggggacggcagcgcggtgcttgtccccgagaacacggcgctgatcatttcgatggcggcgctggcgacgacggtgctcgtttccctgctcgggcgcggcatgatacgccttatccccattatgtcgggcatcgccgtaggctacctgtgcgccatcgggctcggcatccacgatttcagcaaggtggccgccgcgccgtggttcggcgttccggatttcgtgttccccgagttccgctgggaagccatcctgttcatcatccccattaccctcgccccggccattgagcatttcggggacatcatcgccatcagctcggtgacggggaaggacttcctcaaggaccccggcatcaagagcaccatgctcggcgacggcatcgccacgatgctggcgagcttcatcggcgggcctccgaatacgacctattcggaagtgaccggggcggtggccctgacccgggcgttcaaccccggcgtcatgacgtgggccgccatttgggccatcgtgctctcgtgcgtcaacaagctcggcgcgttcttgagttccatccccgtcccggtcatgggcgggatcatgatcctgctcttcggggccatcatggtggtgggcctgaacacgctggtccgcgctggcgaagacttgatggagccccgcaacctcgccgtcgtcgcgctgatcatcatcttcggcgtgggcggcatgacctttaatatcggctcgttccgcctcggcggcatcgggcttgccgccgtcaccggggtgctgttgaatctcttccttcccagagcggttcatgtccacaagaaagtgaagtccgaatagcaaggatggagactggggagggatgtccggcaacagcattcctccctgttttcctccataaccctttcgagcggcgggaatgcccgccgattggcccctcatttccgatatccccccggaaacttttgttgtaaccgtgagggaaaagttttagggggatggggtggcgcgagccgcgctggcaggttttggaaggggtttcttccaaagggggctttcccccaaaaaagtcatttccgctcatctccgcaaccgagtttgccatgaatgctgaaatcatttcggtagggaccgagctcttgcttgggcatacgatcaacacggacgcggcgtttgtcgcgcgcgagctctccgccatcggggtcaacctgctttttgcctgcaccgtgggcgataatccggggaggctgcgggacgcgctggaagaagcgctgggccgcagcgatgtggttattacgacgggcggcttgggccccacggacgacgatctgaccaaggaaaccatcgccagtgtggcgggcgctccgctgaagatccatgaggacagcctgcgccgtctggaaagctacttcaagggacgcccggcgatgggcgagaaccagcgcaagcaggccatgctgcccgagggcgcgaccgtcttccccaacgacatcgggaccgcgccgggctgcggcgtgcggacggcgtccggcaaggtgatcgtcatgctgccggggccgccttccgaactggtccccatgttgcagcattatgtcgtcccgttcctgaaagaagggagccacgccgtcatccactcgtgcatgatccgcacgttcgggctcggcgagggggcgggcgcgttgaagattgccgatctgaccgatgcggcgaacccgacggcggcgacctatgcgaaggaaaacgagatgttcgtgcgggtgacggcacgggctgagagcgaagaagccgccgaggcgctgtgccgtccggtggtcgaagagatttgccgccggtacggggatgtggtctacggcgtggatgtggacaatctggaaagcgtggtcgtccggctgctcagtgaaaaggggctgcatctggccaccgcagaatcctgcacgggcggtctggtggcgaagctcatcacggacgtttccggcgcgtcggaagtcttcggcatgggccttgtgacctacgccaacgaagccaagatgaagctgctcggcgtgcctgccgccatgcttgaggaacacggggccgtaagcgaacctgtggcccgggctatggccgaaggcgtacgcgaagtatcgggcagcgagctcggcatcggcatcaccggggttgccgggccgaccggggggacgccggaaaagcccgtggggctcatctatattgcgctcagtgacggcacgcggacgtgggtccgcaggatgacgcctcccggccgggttcatggccgcggctggcttcgggatcgcgccgcgggcaccgcgctcgatatggtgcggcggtatttgtccgacctgccgctggaaccggttcagagtgccggaccggcgacaacgctgtagctgcggggccgatgtgaagcacgattacgaagcttgcctcaatgacataacccggatcgtcaaagacatcgtctggggggatgccgaacaggtgcgcgccttgttccgttatacgaacgacccgtccgtccctgcgtccgtggggcggctggctgagcagatcggcacgctcattgtgcagaaagaggtccgggaattccagttggaaaacctgattgaagacctgttttcaaccagaaccgctctggctcaggcacgccatgatcccctgaccgggctgccgaaccgggccatgtttgaggagatgctccacaaagcctgtgggagcgcactggaatgcggctcggggctggccttgctgctggtcgactttgatcggttcaaggaagtcaacgactcgcttggacatgccgcgggcgacgaactgctcgtacagggtgcggcccggttgcagggatgcgtcggcgatcgggggctcatcgggcgcatgggcggggatgaatttgccgtgctgctcattgaacaggcggaaggggatgtactccggacggccgaatgcattcttgaggcgatccgtgccccatttccgctgcaagagggagaggcccgcatcagctcgtccgtgggtgttgcgtttcattcgctggaggccgctacccccgctcgcctgctcaagaacgccgatgtcgccatgtatcgcgctaagggtgaagggcgggatcggctgtggcgctatcgcccgtcaacgttcaccgatagcggatatggccgagtgttttagcgggtaggcggtgcccctgtcggtaaagtccttttttgatgtccggctatgctgaaaaagccccggagtgacggctccggggcttttttcgattaggggaggcagcgctatcgggagtaggcagcattgcttggcgtcatccttctttatagaaggagggcggcgtttctccattccggcacaccatcccggcagggaatggcttccccgcaaagagagaacaggcttggcgttgcggcctgcctcctttgtgcgcactgaggtcccgccccgattggggaggggctgttcgacactccgttccgggcgttatttcgcggcggacgcggcggcctcgccaaggcgggcgaggatatagtcacgcatggcgggatcatcttcctcaaggttgaggcagcaggcatccttccccatgagcccggacgggacgaagtcgcccagttcatcgggatcgttgaccatatccgcgtaaaagcagacggaaagccagcgggcttcgggttcgtcgtccaccacgtccacgagcacgaacagcgggcgttcgtcgttcttggcattggcggcacgcagggagtagctcacgccggggcgggccttgaaatcaaagcgcacgtccggggtggtgagcaggaaatccttgaagcggacgaaggcgtccttcgcgttgttggggtcggtcgtccaattttcgaggaaggttgccaattcgttggggagctgtgcttgcgacattgaaagcatccttgttgcgatctgaaggaaagggccgttttgtgtggcagtgtcgcacaatccgccgatagaatccagcggaacgccgtttccggtttgggattacggaaggggaggccgaatgaaggcgtttgtgtgcctcctcatgttgcccgcaccggtcagttgaggaacatacggatcatctgcgggggcagatccgcttcccagtggccggtgaaaacggcggcggcatagccgatcaggaggatgagcagcgtcccggcggcgatgccccacgccggaaggcggagggctccggtcccgtagccgaaccgtatgtcgaggcagcgggaggggcaggcgcttacgcattccgtacagcccacgcactcgggtccggagagtcgtttgcgctcgtcgacgggaatccgcgacgggcaggccgcggcgcagcgcccgcagccggagcaggaggcggggttacggttgaccgccatcggtgagagcagcgataggaggccgagcagggcgccgtaggggcagaagccccggcaccagaagcccggcaggaagatcgagcccagaaccatgacgacgatcactccgagggtcagcgtcccgggggcaaggaaatactggagcatcttgatgtcggcgacgaggttgtagggcgacttgaggaaccattcgatgctggggaggtccatgctgaccacgaagctgtacaggatggcggcaagaagcacgtatttgggcgcggagaggagccattcgagccgccttccggggcggcagctcacgccaagccgtgtccccagacgggcgaggaggccggagagccagccgacggggcaaaggtagccgcagaacccccggcggcacaggatggccgtacacaaggcgacaagcaggatggtcaatcccgcgggatggatgggatcgtattgcccggtgagcaggaaacgcttgaggccgagcagggcgctcagggggaggaaggcttccgcggcggcggggcgggggacgaatgcgccgtttccggataccccttgggcatactcatagagccgccacgcgacccaggagagaaagaggaagaaaccaagctggataaggcggtgcaggcgcgccgacgataaaggatgcatgaaaatactccaaaaaagggaacggtccgaaaggatgccggaattcctgtcgatcttgcgggccgctttgtcaacagtcgaaacatccggctggaggggggaattcgaggtctcgcggggcaacatccccaaagattttttcttttttattatccactgaattattaagaaaaatcttggaaagagcgcgaatgttacaaaagaatgacaaagaagaggcccgttcctctattcccaacaaaaagatttcagattagtataattctcgctatcgaacggggcttgcctttcgcttcctgatagtttttatcctctttcggctgaggaatgacgtaagagagacatgggggtgtccgtcaatcccggccgaactccgtttatgccgtacgccgttttcacaggggtgaaacggaatggaaatgaaccggttcccagcattgttgtgcgtttccggttctcagagtgatgttgcggaggagggcgcacaggcgcgaaaggcaggagatctccccatgcggcacgtcaggaatgtttttcctcacgaaaacgcagccggggagaaatgttcacattcgaaccgtaaaaaggtggagaaacatgaaacgtgcattggccttgctcatcgcttgcggtctgttgctcggcgttaccgcgacttccagcttcgcggccgacaaagttgtcatcaaaatggccggtatgaagcccgacggggaacctgaaaccctcggtatgcgtaaattcggtgaaatcctgaaggaactgtccggcggcaaatacgacgtgcaggtgttcccgaacagccagctcggcaaggaagacgcctacatcgccagcacccgcaagggcatcatccagatgtgcgccaccggaacccagacgtccgccatccagccttccatggccatgctcgaaacgcccatgctgttcgacgactacgcccacgcccgccgtgccatgaacggcggcaagacgttcgaactgatcaccaacggcttcaccgaaaagtccggtatgcgcgtgctgaacgccttccccctgggcttccgccatttctacaccaaaaagccggtggcgaccatcgacgacatgaagcacctgcgtatgcgcgtgccgaacatccccttgtacatcaactttgccaaggaatgcggcatcagcggccagcccatgcctttcgccgaagtgaccggcgcgcttgatcagggcgttatcgacggcggcgacagccccctgtccgatatcgtgagcatcaagatgtacgagaccacgcctgagatcaccctcaccggccacctgctcgtcatccactccctgtacattaacgaaaagttctaccagtccctgcccgaacaggacaagaagtggatcgacgaagccgccaagcgttccgccgactacgtgtgggatctcgtggaaaaggtcgatgcggacgccgtgaagaccatcaccgaagccggcggccatgtcagcgaaccttcccccgaactgcacaagttcatgcaggacgccggcaagcgcagctggaagcttttctatgacaccgtcccgaatgccaaggaaatccttgacagcgcggactcttatcgtcaggcgaagtaacgtttgcgttctcaacagggcttccggcgcaggccggaggccctttttttccctcaagcccatgtctgtcgcatgggcccgaccatcacgcccaggggtacatcatgagcagtgaaaacaaaccggtcatgccgccggaacgtatagaggaaaccgaaaccgaggaggaaatccgccgggaagaagccgcgaaaggcaaaggcgaacgggcctttgaagtcttttgcgccgctattttcttggggatgatcggcctcgtgtttttcaatgccttcctgcggtacgtgttccgctcgagctttgcgccgagtgaggaatgggcccggttccttttcatctacatcacgttcatcggcggcattgaagctttttaccggcacaagcacatcgcggtggacatgttcgtcaacatgatcagcggcgcgtcgcgcaaggccgtggacatcgtcgcctccctgttcatgcttgcggctctggtgctgctgcttttcggcggtatttccgtggtgctccagacgctggacacctattccgtcgctaccgacgtgaatatggccttcatcaacgggacgctgcccgtcatggcctttgccgcgatcatcatccacctgcgggacatcgtgcggctgatccgcacgcccgccggcgagttcaacaccgcgcccaaaacggaataggggagagaacatggaacttgtcgtctttttggtcagcctgttcggcttcctcgcgttgggcattccgatcgccatcgtgcttgtcctgtgttctatggtcctgatgtattacggcggcatgtgggacagcatgttcgtcatgatcatcccgcagtccatgctggacggcgcgaacaactatcccttgatggccatccccttcttcgtgttcgccggtgaaatcatgaccgaaggcggcctgtcgaagcgggtggtcaagcttgcgcagctcatcatcggccgcgtccgcggcggcctcggctatgccgccatcgtgtccagcgtgattttcgcgggtctgatgggcagttccgtgggcgaagccgctgccctcggcagcctgctcctgcccatgatggcgcaggctgggtataagcccggccgcgcgggcggcgtcatcgcctccggcgccatcctcggccccatcatccccccgagcaccaactttatcctgctcggcgcgaccgtgggcctctccatcaccaagctgttcatgatcggtctggtccctggcctgatcatcggcctctgcctgatggtcacatggttctttatcgtccgcattgacggctataaggaaaagatcgagttcaaaaagggcgaagcctcgaagatcgtccgggacgccatgcccgcattcatgatgcccgtgctgctgcttggcggcatccggttcggcgtcttcacgcccacggaaggcggcgcgttcgcctgcgtgtatgccattgccgtgtgtaccctgtattaccgtgagctgaccttcaagggcctgctcgccgtgagcgcccgcgcggcacgtaccacctccgtcgtcatgctgatcgtggccacggccacggcggtgggctggttcatcacctcggcgcaaatccccatgcaggtggcggaactcttccagccgctggtggattccccgatccttctgctgctttcgatcaacgtcttcctgttccttgcgggcatggtgatggacctgacgccgaacgtgctgattttcgcgccggtgttctatcccctgatccagcaggcgggcatcgatccgtatttcttcgggctgctgttcatcctgaacctcggcatcggcgtcatcacgccgcccgtgggcacggtgctctatgtggtctgcggcatcgggaacatcaagatcggcaatctggtgcggaacatggctcccttccttatcgtggaaatgctggtgctgttcctgcttctgttcttcccctcgctgtccatcgaacccatgaagttcctcatgaagtagcgccgggaaaccaggtaactaaagggcgggcttgcgggcctgccctttttttgtacgtgggtgaggggagcggaagagcgggggaggccgtgcggcgggagttcctgccgtgcggaaggcgggagttgtttggggatggagggcggggcgtttttcggtatgcagttggaggcggggcgttggctttcgggcatggccgcatgaaggcgttttcggtgcgtgggcggggaaaggtgaagcgtcgcggcccggcggggggcaggtcttccttgcatacacgggatggggggggagcggtgcccgttgcggagaaccgggaaatacggcaagggaaaagatatgcttttcagcgcgagccgtcgtacggatattcccacctattactctgagtggctttgcaatcggctggaggcgggcaacgtatgcgtgcgccatgatgcgcgccgcgtcacccggtatgtgttctcccgcgaagccgtggactgccttgttttgtggacgaagaacccgctgcctttgctggatcggttggcgctgctgcgtggctggccttgtgtgttccaattcacgctgacggggtatgggcgtgatgttgagccggggcttccggacaagctgcaattggtcgaagctatgaagcggctgtcggaagcttttgggagcgaacgggtgatctggcggtatgatcccatctttttcagcggcgcctattccctttcatggcatgtgcgctgttttgatgcgctgacggaacggcttgaaggcgttacgcgtacgtgtgtcgtcagttttctggatatgtacccgaagctccgccgccggataccggctcttgggctctgcggggacagcgggcaggctcggaaggagttgcttgccgcgtttgcggcgatggcggagcgcagggggatacggctttccctgtgtgcggaggacgtggacgtccccggtgtcgtccacgcgggttgcctcagccgtgagcttgtcgagcgggtggccggatgccgccttgatgtccgtccctcgcaacagagggccgggtgcaagtgtgtggcgagtgtggatgtcggcgtgtacggcacctgcgggaacggatgcctctattgttacgccaaccaggacggcgtccccgtggggcggggctcggcgctgcatgatcccgcttcgccgctgcttgtagggaggctttccgctgacgatgaagtgacggatcaacgttgcgccagcctgaagagccgccagttctccctgctgtgatagaaaggaagacaacggtggagacgggtctgccgcttttgtttgtgtttcgccaatccgcttttagtgcggacggagccattggtttttgccggatgccgacggattgaggaacggctggagatgggggaaccggcggtatggcactggatgaagccgtcatttttgataaaaaggctttgaagagaggagcaagacaaagcaatccatgctatgtggaagtcataagggagcttgtatgttgtgttttcgggaaaccgcctttgggcgggtgggcatagaggacaaagagggttccatcacgcgtctttatttgccgggccggagtgatgccgcttcggaaggtccagaaacggcgctgctgggcgaggcgtttgcgcagttggaggcgtatttcgccggtcggcgcaaaacgtttgacctgccgctgcggtttgatgagggaacgcctttcatgaagcaggtttggcaggccctgtgcacggttccctatgcccatacggcaagttataaagatatcgccgaagccgtcggcaatccgaaggcctgccgggccgtgggcatggcgaacaacaggaaccccattgcgatcattgtcccttgccatcgtatcataggcagcaccggtgcgcttgtcggctacggcggcggattgggtatgaaggaacgtttgcttgagctggagcgtagatatggccccgctgactgagccggcgttcgcccggttgcgttcagtggacccggtgctggccgaagccgctggtgatgccgctttcgagttggaaacggatctgttcgcggcgctggcaaaggggatcatggaaaagggggcatccgatgcgttcccgttcgcgtgggcatcgttggccgcacagattggggaggtttcccccgagcgcgtgcttgaggcaggatcggcgttggaggccttcgggaagaaaacggcgaatgcattgctcggcgcggcgaaggcggttcgctcgggaaagatcggcatggagcgccttgccgccctgcccgacgacgaggcggtgggtgccttgtgttcgctgcggtgcgtggatgtgcgccttgccgtgcgcgtattgatcggagtgttgcggcgtcccgacgtcctgcggttcgacgacgaggctgtgcggagtggcctgatgcgggtacatgggccgcgaagctgcacgcaggaaggttttgaggcgtttcgggcccgccacgcgccgttcggctcggcggcgacgctgtgcctttgggagagcgaggagcggctgcgtcccgtgttcccatgcggcggggaggcgctcgacgcgctgaagcgccgggacaaacggcttgggcgggtgatcgagcggcttggaccgatacggcgcggggtggagccggatctgtttacggctctcgtcgacagcgtgattgcacagcagatttccggaagggccgcgcagacgatttccgaccggctgcacgttttggtggggaactttacgccgcaaggccttgcggaggctgacccctcacagatccagcagtgtggcctcagtcagcgtaaagttggatatatacaggggattgcccgtgaagtcgcctccggtgctctggatctggaggccctgcgccatgcccccgatgaagaattgatccggaagctttcggccctcaacggcatcggcgtgtggacggcggaaatgctcatgattttttcgttgtgccgtccggacgtgctcagttggggcgatctgggcatccggcggggcatggcgttgctctacggggacagggagttgacgcgggagcgctttgagcgccgccgcaagcgctattccccgtacgggtcggtcgtttcgctgtatctctggtcgattgcgggcatggaggaagccttggcggtaaagctccccagaggctgatgcgttgcgctttacggagaacgggcacgggattggcgtggggaacgtgtctggagttgttccgcgtttcctctccgcgtcctgttgtttgagcgcgcggccccgttgcgccgtatgaggttggccgtagccacggagtggctagggacgggagaggggctccattatctggctcgggccgcctctccttgttccgtacttggattaccggatcatttttccgatgagttcatgcatggccttgtttccggcgaggatcgaccagcgcagatcaaagggcgagccgtccagattggaaatgctgcccccggcctcggtgacgagcagcgcgcctgcggccatgtcccacggtttgagttcgtcttcataaaaagcgtcgaagcgcccgcaggccgtccatgcgagatccagtgctgcggccccgcaacgccgtaccccttggcaagaagacagcacaggacgcattcgctccagaatttcatccacgcggctggcgatttcataaggaaaaccggtggctacaagggcattctcgcaggccgtcacggatgagacgctgatgcgttccccgttgcgccatgcccctttccccttttccgcaataaagcattcgcggagcagcggcgcgttgacgatgccgagcacaatttccccgttcaggcggtaggccacggacgtgacggtcaggggcaggccgtgggcaaaattggttgtgccgtccacgggatcgatgatccagcaggtatccggcaggctcagatcttccgcgctctcttcagcgaggaatccggcctggggcgctagggttgcaaggcgttctttcaggaatgcctccacagcgatatcggtttccgttacgagatcgatgcgccccttatggcggatagtgtggggatgggcatgattggcgccgatgatggcgccgctttcctcgacgacggcaagggcctgcaaggccaatggtgaaagctgttctgtcatgatgctgaacgatccgaaaaaagttgaagagacaggaaggaaggtacgccggaaccttccggatcggaagggcctagagaggggtggcggctctcagtgacggttttcctcaaagaaacaggccgctgaggagagagccccgcgccgtaggcaagttgcgccggaaaaggccgcgaacagggcgatacgcatgaaaggctttgcagggagggcccgtgctggcaggtttggggaagaggagaaacgtggtctgcctttatccggaacttcctcctccccagtacccctgcaaacttccaaagcctatttgccctcgcgggccaaacagcgtttgcagggtttgtatccgttgctgcgggcctcttccgcggatttgaaacgcaccgtgcaggccttgcagttgaagtaacggcagccggatacgtgaaagatccgcgtcttggcgttgccgctgtaggaagacgtggcggcggtttggacggggacagccgcttcttttgctggttgggccggagcggcgaaggccggagccgtgagcaggagtgcggcggccaaagaaggaatgattgcggataagcaggatcgcatggagcctccctgtgtttgacgatggcatgtctgttcttttgtcagaaaaataagagacagggaagaaggattgtgcttagtctctcgccggagtggcgtgtggccgtgaaagcgctggaagcgtgccggaaaacgagacccgaaaacatgttattccgtggatatcgttatgaaaaaacgcatattgacaagtattgaaaaattttctagcctcgcccaatgaacatacctagtatcaaaatacgcgctggcctgtggcttttgttgttgacgggccttattctcgcggggtgtgctcccaaacagcgggcggtcgacgattcgtttgcctttgggaacgactacgagaatctgactgggcccgatcgttcgaccatgaccccggaagagcgttttgcctacgattaccgttcggcggcggtggcgcgtatgcgggacgagggcgttcctctctcgaacgtgcaccttgtcgagcgcgccaagacggctatcggtacgccgtatgttcgcggcgggaccagcatgtcggggttcgactgctcgggtttcgtgcaatgggcctataaaagcgtcggggtttcgctcccgcgtaccgcgcgggaacagtccgtgctgggtacgcctattgattccgatgaaatggaagccggagatatcgtggctttcagacatccccggcgtgggtatcatacgggtatatacgttggggacggcaagttcatccacagcccccggcgcggcaagagcgtggagatcacctcgctcagcgatccttatttcagttcgacgttcctcggcgcccgccgtgtgagcatttcggaatccgatgccgaagccgcgcagaaactgatggcgctgtatgaatcccgctcttcccggcttcaccggacggcttccgacgcggcgctttcgcagagcaaggccaagcacgtcgtttccaaatcgcagaaaaagggcaagcagacgctttcgtccagccggtccagctcgaaacacaaggctgtttccagcaaaaagcggacgacggtagcctcgaagaaggcggcgagtaagacttccgtggcaagcagcaagaagccttcctcaaagaaacaggttgcccagaagcgttcttcacagaagaaaagcacttctgtagcgcaaaagaaatctacctccaaggcaaagtccaaatagtgttttgctgttgctgaagcgatatgttgagaaagccccgattcgttcggggcttttttttgctgtcgggcatggaggggcccttgctatggaacctgttgaagaacagaaaaaaacacgatagagcaggataaagctgagatacgtttagagtgccggagaaagcccccgcaaggggcctgagaaggcgctgaggccgctttggcaatgcggaaaggggtactggggcggcgcggaggtgcgttgcctgtatgtattcatattgaggagggcatatatgaaacgcttttcgaagatgctgggggcatttgccctttgtatggggttgttggccagtcctgcgcaggctgaaaaatttgtggtgggatttcagccgtatgatacgatttcctatcaagcgatcatcaacgccgaactggggctttggaagaaatatacgcccgaagggacggaaatcgagtttcaccccgctgtgcaggggacggtcgtcgccagcaacatgctggctgacagggcgcagatcggctatatgagcatcatgccggccgccgtgctgtgcgtgcgcgccaagggcaaggtcaagatggtgtccacgacggacatgtccgaagggacccgctgctcgctcatcttagtgcgcaaagacgcgccggacttcaagaacaacgaagcgttggcccgctggcttgacgggaaggtcattgccgctcccaagggcagcgcctcggaccagtatatgcgccgtttttttgagaagtataaggtgaagcccgctgaatacctgaaccagaccattgaagtcatctccacgaatttccgtgcgggcaagcttgatgcggcgtcgctttgggaacctacgctttccgggctggcttccgaggtcggcgaaggcgtggggaagattgtcgccgatgggtccgcctgtgacaacgaggacctcggcatagtggtcatgcgttctgatttcatggagaaacatcccaaggtcgccgaaggctatttgcgttcggatctggaagcccagttgttcatgctgaaccccgacaattgggaacaggtcatcaatatggtttcccagtacgccaccggcgttcccaagcgggtgctgtggtattccgtattcggcaaggttccggccaactctcccaaccttgtccgcgagtggatgaacttctactttggggagcgcgagaaggcgaacatcgatgaagtggtggctttcctccaccaagaagggatcatcagtgtcgacaagcttcccgaagggaccgtggacgacagcctgacccggaaagtatttaaggcatcaggccataagcctgtcgctccgggcgcggctcttggcgtcattgagggaaggagcgcggcggattgcccttttaaggattagttgctgctaagcccacgaacactgaaggcccatcggcattcgctatgccgatgggccttttattttgtccttataggatgttgcaggaggggaatgctttttgtgatgcgccgtttgttctttttgttgcaattagggcatgattttccccctaaaaaatgagggtatccatgagggcgcggaacccatgaagcccctgatgaagactgtgttttttatatcacgctggaataaaatagataatgcgcttctggaacagcaaagtgagaaaaaggggatgccgaaaagtgtggaaaaatgccgtttcagggcgtttatggtagagaaaaggcataatttcacaaattttttaaaaatatttttttgatatcgtaatatattggaatcataatttcttttagtgagcatactccctaagagtataaagtcgacattcattttttgagtacgcatatgaagtattttaatgttttcaatatgttccggaatggtcagacaatacgccaaaatcacttataaactgtggaaagtagacatttgaggtacgccggaaaaactgatcgcgtactcaactctggtacattttttgataaatgaggggggcttcccttttttcctgtggctggtgtacaacaagcatcatacccgttggcgggaatactttttttcacgtaaggagacgtgtgatgaaaaaagtactgtacaccgtagctgcccttttggcttcctcgtgcatggtcctcggcatggccaataatgcgcgagctgaaaaaccgcttaccctgcgccttggccaccctatggctccgggcaacaacgtgactgtcggctatgagaagttcaaggagcttgtcgaaaagaagagcaacaagaagatccgcatccagctcttccccaactgccagctcggcagcgaccgcgtgaccacggaagccgcccaggccgggacgctggatatgtcctccagctccacgccgaacctcgcgagtttctcgaaatcctacatggctatcgaccttccctatgtgacctctcccgccaatcaggaaaagctttacaaggctcttgacgacggcgaacttggcaaggccctcgacaaagtttccgaaagcatcggcctgaagaccatcatgttcagcgaattcggttaccgcaacttcgtgtccgccaagaagcccctcaaggaagtcaaggatcttatgaacctgaaggttcgtacgaccgactcgcccgtagaagtggccgtggccaccgagctgggcatgaaccccgctcccgtggcgtggggtgaaacctacaccgccatccagcagggcaccgtcgacgccgaaggcaacaccttctcgctgctgaacgacgccaagcacaccgaagtcctcaagtacgccatggactccgagcacaactattccatgcacatcctgctgatgaacaagaaaaagtgggacagcctgacccccgaacagcagcagatcatcactgaagcggcgaaggaagccaccgtatggcagcgcgccgaatccgtgaagctcgaaaagaaggcttgggacgcgttcaaggccaagggcatcgaaatcacgatgctgacgcccgaacagcgcaaggaactgtatgacaggaccgctcccgtgcgtgaacagttcgccaaggaaatcccggccgaattgctgcagctgatcgccgatacccagaagtaagtcctttgatgctcggcctgcggcatgttcttgccgcaggccggctctttttctcttacaccacaggaatctcgcatggaaaagaccaacgcttccaagcagggcgtactgcactggctcgacgaaaactttgagaagatgttcctcgtcaccggcctgctgtccattaccctgttcatcacatggcaggttatttaccgttacatcatcacgcagttcattgagcgcgccggtgccgccgtatggactgaagagctttcccgctacatctttatttggatttcctacctcgccctgagcgtcgccatcaaaaagcgttcgtccatccgggtggacatgctctacgatcatctgcccccgcgcttgcagcagatcagctggatcgtggtcgaggtgctgttcttcatcctgacggccaccatcgcctactacggctggggccagatcgaacggctgcaggaatacccgcagcataccacggctttgcgcatccccttcctcatcccttatctgatcctgcctttcggcttcggtctcatgtgtttccgcctgctccagtctctctacaagcaggtcaaggtttgcgggttggtggataccctgatcggcctcatagcggttttcgtcatcgcttcgccggtcattttctgtgactacatcgaaccgctgcccgcgttgttcggttatttcatcgtgctgtgcgccatcggcgtgcccgtggccatcagcctcggcctgtccacgctggcgaccatcatctgcgcggacaccctccctatcgaatacatggctcaggtggcctttacgtccatcgacagcttccccattatggctatcccgttctttatcgcggcgggtgtattcatgggcgcgggcgggctttcccaccgtctgctgtcccttgccgacgaaatcgtcggcggcacctatggcggtatcggcctcaccgccattgtgacctgcatgttcttcggcgcgatctccggttccggccccgccaccgtggcggccatcggcgcgctcaccatccccgcgatggtggagcgcggttacgacaagtatttttccgcagccctcgttgcggccgccggttgcgtgggcgtcatgatccccccgagcaacccctttgtggtgtacggcatttccgcgcaggtctccatcggcgacctgttcatgagcggtatcgtgcccggcatcatggtgggcatcgtgcttatgagctactgctattggtattcccgcaagaaggggtggcgcggtcaggaaaaggtccgcaatgcacggaccctcatgcacgcggcttgggacgccaagtgggcgctcatggttccggtcatcgtgctcggcggcatctacggcggcatcatgaccccgaccgaagccgcggccatcgccgccttctacggtctgatcgtgggcctgttcctgtataaggaaatggatttcaagtgccttatcaactcgtgcattgagtcctgcgagacttccgccgtcattatcgtgctgatggccatggcgaccctgttcgggaacatcatgaccatcgaagacgtgcccggcactgtggcccgggccatcctgagcttctccgagaacaagatcgtcatcctgatgctcatcaacgtgctcctgctcatcgtcggcacgttcatggaagcgttggcggccatcgttatcctcgtgcccatcctgctgcccatcgtgacgggcgtgggcgtatcgccgctgcacttcggcgtcatcattgtggtcaaccttgccatcggcttcatcacgccgcccgtgggtgtaaacctcttcgtggccagcggcgtcgccaaggcgaagctcgagaacatcgccagtcaggctctgcccatgatcgccctgatgcttatcgtcctgctcatttgtacctatatccctgaagttccgctgattctggtgggcggcccccactaagcgtttctctggcagttttacctgtggaaaaagggagtcccttgcgggggctccctttttttgtgcgtggaggggggaggagagggagagcgggggagggaaactttctgagagaagcttccctcttccctaccccggccccctcctatctcctttcaaaggcttttgactggtggggaggccgcgcgacgggagttcggttcagcggaaaggaagaagatcagggggatacacggaaaatggaacagttccgttttgaaatgttccaaggccgagaaccccgttctccatgaaatgcgtctttgaagagaaaggggctccaagggatgcgggggaagggattcggtaagtataaacgcttggcggaaagagaggggcgcactggcggagttggggaagggaggaaaagcgtggggggctccccccttccttcagaaggcttttctctcctttccccgatgctccgcccattcaaaatcaatcgaggctattttccggccttggcgttggggaagaagagttgcttgccttcaagctggaagctggcgatggccttctgggtattggggctgatccaccagttgatgaacttcttggcggcttcctgcttgaccttcgggcacttggcggggttgacaatcatgacgctgtactggttcaggagggccttgtcgccttcgacgaggatcttcaggggcgcatcgcccttggcggcggcattgtacttgatgtaggtgccgcggtcggtcacggtgtagccgtctttttcggcggcgatgcggatggtggccatcatgccctggccggcgtcaatgtaccacgtggcgtccttgccgggcacttccatgccagcgactttccacagctgcttttcggtgttgtgcgtgccggagttgtcgccgcggctcacgaaggggatcttcttttcggcgaaggtcttcagggcggtggggatgtctttgcccttgacgccggccgggtcggcggcgggtccgatcagcacgaagtcgttgtacatcacctgatggcggtccacgccgaaaccgtcggccacgaacttttcctcaagggcgggggcgtgtacgagcagcacgtcgacgtcgcagtccttgccgtgggcgagggctttgcccgtgcctacggaaatccatttcagatcgatgcccgtgtcctttttgaagatgggctggagatattccagaaggccggtgtcctgcgtgctggtggtggtcgccatcatcaaggtttcggcgttggccatctggggcagcagcagaagggaaaggacgaggaaagctctgagcagacgcattgaaaaacgctccttacaaaaggttgtgccttacggcagacacgaatttgaacataatcgttccgagtatgctccgccttgcatataaaatcaaggagggtgcgtaacgggattgccaagtttggcaaatagggtagaaatcggcgaccgattgcccggcttgacagaatccatatcaattgagtagggaagtcggcgtacctttatcgccgcgaaggagtgtttcccgtgcccattaagattcctgaagatttgcctgcccgcccgatactggaaggcgaaaacatttttgtcatgacggaaggccgcgccaaccgtcaggacatccggcctctggagattgccatcgttaacctgatgccgaccaagatcgccacggaaacgcagttgctgcgcctgctcgggaatacgcccctgcaagtgaacgtgacgcttctgcgggctgaggggcacgaatccaaaaataccgcgccgcagcatcttgagcgtttctataagacgttttctcaggtgcgcgacagctcgttcgacggcatgatcatcaccggcgcgccggtggaacagctcgcctttgaggaagtggactactgggacgagctcgtcggcatcatggactatgcgaaaaagcacgtgcacgctacgttgtatatatgttggggcgcgcaagcgggtctgtaccatcattacggcatcccgaagtacgggcttccgcgcaagctttccggtattttcagccacaccatcaatgatcccacgaatcagctgttccggggattcgacgatgtgttccatgcgccgcattcccggcacactgaagtccggggcgaagacattgccaagatccccacgctggagattctggccgagtcggatgaggccggggtgcttgtggccggtacgctcgacgggcggagcatgttcatcacagggcatcttgagtacgaccgggatacgctggatgcggagtatcggcgggatgtggccaagggaatggagatcacgcctccggcacattactaccccggtgacgatgcgacgcggcccccgctggtcagctggcgggcccatgcccatttgttctattccaactggttgaactattgcgtgtatcaggcgacgccataccgccttgacgatatccccacagacagggattaagtccgccctcggaaaaaaacggggcattcacgctggggtacgggataggcttgacgcttcggcgtcccatatgcggaatcagtgaaaggcgctgcgcggagtgtttccgagccgggggctccgggggcggctggatgcggaaacggctttcaggccgggacgtatccgaagccatttgaggaataggtacggagatcctctccaaggggaggatgccgcccggtatgcgcgggggcccggggagggccgcctcaggacattttcccgaaacgacggttccggccttgtgccgggtacggaggacaataatgcctatccgttttgaaacgctcgccgttcatggcgggcaacatcctgatcctacgacgctgtcgaggggagtcccggtctaccggaccagcagctacctcttcaagagcgcggagcacgccgccaaactttttggccttgccgaacaggggaatgtctacgggcggctcggcaaccccacgcaggccatgctggaagaacgtatgagcctgttggagggcggtgtcggggcgttggcttcggcgtcgggtacgtccgccattttttcgacgattgtcaatctggcgaagcagggggacgaaatcgtctcggcgaacaacctgtacggcggaacgttcaccctgttcaacgacatcctgccccagttcgggatcaccacacgcttcgtgaagccgcaggattttgacaagatggaagccgccgtcaacgggcggacgcgcgccttgtacgtggaggccatcggcaaccccgcgctggacgtcgcggatctggatgcggtatccgccatcgccaagcggcatgggctgcccctggttgtggacgcgaccttcgccacgccgtatctgcttcggccttttgagcatggtgctgatattgtagtgcactcattgacgaaatggcttggggggcacggcacggctctcggcggcatcgtcgtggacggcggtacatttgactggacggacagccgtttctctctgtacgtcgagcccgatgccagttatcattacttgcgatggggatatgatctgccggaagggtatccgccgttcatcacgcggatgcggctggtccccctgcggaatcttggggcctgcatttcgccggacaatgcgtggatgatcctgcaggggctggaaaccctgccgctgcgcatggagcggcactgcgccaatgcgctgaaggtcgcctatcatctcaagcagcacccgaaagtggcgtgggtccgctacccggggctgcccgacgatcccgcccatgccgcggcttgccgtatgctgcgcaacgggttcgggggcatggtcgttttcgggattcagggaggtcagtctgctggccagcggttcatcgaaaaactcggcctcttttcgcatctcgccaacgtgggcgatgccaagagccttgcgctccatccagcgagcacaagtcacgcgcagctcagcgaagaacagcagcgtgacgcgggattgccgccggaactgatccggttgtccatcggtatcgaacacatcgacgacattcttgaggatctcgatcaggctcttggagagatctgagccgatccggagggtgtggtcctttagggggaaagcatgcgttattcgactcgcacccgatacgggctccgttttttgatcaatttggcgggacggcctgcggggtcctgtgtccagttggcggaaatcgcccgcgaggaaggcgtttccgtcaagtatctcgagcagatcgtacgcgtcttgcgccctgcgggcattttgcgttccgcacgcggggccaagggcggctatgcgcttgcgaaatccccggacgccatccgtatggacgaggtcttcgagcgtttggaagggcacatctctccggtggaatgcctgcacggggcaaaaagctgcgaacgggaaggcgtctgccccacaagatggttctggcgggagctggatgatcacatgcggatgtttctcaagggcatgacgctcgcccgttttgtcgagcgggaacgggccctgaaaacggaaaaaggcacttttcctgtggatatggatggtccggcgtgctttcatgcgttgcatcggacgccgccggagggcggggggaacgcatgacggagcggaaaatgaaagacggattctggatgctgctgtgcgcggcctgtctcttgttgtcggcgcggtccgtgcaggcgcgggaactgacggcgttggatatttttgcccagttgccgatcaccttgtttgaaaacacgccggaaggcctttccgaagatgaaaagctccggctgatcgagcagggggcaagcgaattttgggaggtggagcggttcgacgccgatcgcctcgtactggtatcgcggccttttggcgagacgcgggtggggctgcgtgtcttccggggaggggacaggctgcttgccgcactagggacggacgggggcgccatgtgcgcccttgagctctggcaggaagacgctaccggtggattcgtgccggccaatccgccggatgacccgcagctttccgattttttggcctcagggcagcggcttgcggcggatgtttccccggcgttcatgttctgccttgaagatgacggattggatgtacggccgctcttctgggggcctgcgggcctcgtcgacgtgcccgtgggcaagtccgtgcgttatatctggaagtcgggggcgtttgaaaaaacggtgtccggcaagcccgaatagcttgtgctgcggggatttccgtacttgccaagcttggatagacgctatagtatatggattttgtggccctagccgtaattatgggccttctttcactatgtctttaacccctttttgccccaggaggcctcatgtttgcttctgttgctcatgcgatgggtacggccggtgccggtcaggctggcggcgctgacgccctcatgcagtttgttcctcttatcgccatgctcgccatcttctacttcctgctcatccgtccccagcagaaacgcgccaagcagcataaagccatgctggaagctctgaagaagggtgatcaggtcctgaccaccggcggcctcgtgggccgtgtcgtggacatcgacggcgacatcctctccattgatctcggcagcaccacggtaagcctcggccgcgcctatgtcgtgagcgtgatggatccccgttccaaggccgtgaaggaagagaagtaggttcttttgctttgccggcagacatgcgttccgtcgatcccggcgggcgtatgtctgcctttcttcattttatgcgcggagcgttccgcgccgtatggcctcatcggggaaaacaggggccgtacgcataacgacagtgcagatccggccggggggcgggcggatgggccgaatctgatgctctcaggggaacaccatgaaatcgttgagttggcggatagtcgtctcgctgctggttttgttggccagcatcgtttatgtgttgccgagcctgccgggcgtcggcggatcgtctctgggcaatctgctgccggacgcgcggataagcctcgggcttgacttgaagggcgggatgcacctgacccttggcgtggaagtggacaaagccgtaagcaattccctttcgctgaccgggcaggagctgcgcgctcaggcttccgaaaaggggatcaccgtcctgcgctcgcgcctgaccccggacaatcgccttgaatttttgctgcccagagccgaacagcggaccgagctccaggagctgctctccaaagattttccgcagcttgccgttgactcgcccacacaggtggaaggcggagggctgcgttttacggcggcctttacgcccgccgccaaagcgaagatcgaggaaatggcccttgatcaggctgtccgcaccatccgcaaccgtatcgaccagttcggcgtcgccgaaccggatatccgcaagcaggccgatttccgcattcagatccagttgcccggcctgaccgattccaagcgcgccatccagcttgtgggccaaaccgcccagctgacgttccacctcgtgcgcgacgacgtgaacccgcagggtattctgcctcccggtgtggccctgttccccatggtgacggtccgtcccgacggttcgacctccgaaagcatgatcgcgctggacaaggaaccgctcatgaccggcgaggacgtggctgatgcccgtcccaccttcgacaaccgcgacaacaagccgagcgtcgggctttccttcaactcgcgcggcgcggccatgttcgagcgcatcaccggcgagcacatccataagcgtatggccatcgtgcttgacggcaaggtgcacagcgcccccaccatccagagccgcatcggcggcggcaaggccagcatcaccggcagtttcacgcccaccgaggcgcaggaccttgccatcgtgctgcgtgctggctcgcttcccgcgcccgtgaccgtgcttgaagaacgcacggtcggcccttccctcgggaaggaatccatcgagagcggcattttggccgccgcggtgggcggcatcgccgtcatggtcgtgatgccgttgtactatgggctggccgggctgctggccgacgtcatgctggtcttcacgatcaccatgctcatggccgggctcgccgccttcggcgcgaccctgaccctgccgggcattgcgggcatcgtgctgaccatcggcatgtccgtggacgccaacgtgcttatttttgaacgtatccgcgaagagatacggcaaggcctgaaaccgcttgaggccgtggccgtggggtttgatcgcgcgaccatttccattgtggactccaacctgaccaccatcattgccgccgccatcctgtatcagtttggcaccggccccgtgcggggattcgccgtaaccttgagcctcggtatcgtggcgtccatgtttacggccattttcgtctcgcgcacggcgtttgggctctggcttggtggaaacgacgggaagaagctcagcatctagccgcccggctggtgcgtatccgtcgttggatgtatctcgagctttaagatacgaggagttctggcatgagtcttcatatattcagcaagcagacaaaaatagatttcgtaggtatgcggcattatgcctacggtctgtctgcgcttcttattttggtggggctgatcaccatttttatgaatggcggcctgcggtatggcgtcgactttgccggcggcgcggcggtccagcttcaatttgaaaagccggtggccgacgaagatatcaaaaaatcgctggccgagatggaactgcccggtctggctatccagcagtacggcgaggacgggcgcgattatctggtccgtttttccacgccgaacctgaccagcgaaggcatccgcagcaatatcctttcctcgctggaaaagagttttgccggcaacccggccagcatccagcgtctggagatggtggggcccaaggtcggcgcggatttgcggaatgcggcgcttgaggccatgtatttcgccatcctgctgattaccgtgtacatttccgggcgattcgaacagcgctggatgatcgccgcgctcatggcggcggttctcggttcggccatgtacgtcatgggcttcctcgggatggacatggtataccgggtgatcggtgccttggcgctgaccttgctcatttcttggaagctcaagttgaattatgccctcggcgccatcgtggggcttttgcacgacgtcctgatcaccttggggctgttggcgatgatgggcaaagagatcgacctgaacatcatcgcggcgctgatgacgctcgtgggctactcgctcaacgacaccatcatcgtgtatgaccgtatccgcgaaaacctccagaaccagccggaggacaaccccgccccgttggccgacatcatcaacctgagcgtgaaccagacccttggccgtacgatcatgacctcggcgacgaccctgatcgccgccctgagcctgactatccttggcggcggtgcgatccacgacttcgcgctgaccatgagcctcggcgtgtttatcggtacgttctcttccgtcttcgtctccaacccgatcctgctcctgctcggcgatacccgccagtatatggtggcccgcaagaaggtggaatacgagcgccccggcgaacacggggtcgtgtaagtttttcaagaggagcggaggggggcgttttgaaaaagtgctccctccccgtgccccctccagcaacactttggccttattgaatccctactcccagctttcctgaataaaaaacggaggacgtttctgcgtcctccgttttttgtcgtctgtctttcgtctttcccaaacaggttaaggcaagcgccgctatctctcctcaggcatgacgataagggcggacgggtcggtgtggatgaggatgcggtcgagcttgggtgcgcaggtgcggaggcggcgttccatgtccgtggcgacatcgtgggcgacggcaagggacagatcgccgtcgatgatgcagtggaagctgaccagcggcgtcccgcccatatgcgtcaggcgcaggtcgtgcacattggacaccatcggaaattccgggagtatgctgtccacggcggcgcgcacataatggagatccgcgtcgaagggcagggcgttttccggagcgcagaggcgatcttccggctcgatgtgcgtttcgatgcgggttgtgttgaggcgcttgccgagggctttctcgaacatcacgacgtattcgtgggcttcgcgcagcgtcatatccggagacgcctccacatgcagaaacacgaggagccctccgctctgttcggaaaggatcaggttgtggacggaaagcttgtgcgcggcggcaaccgtgcggacgagctggagcatactttccgtttcttcctgcgcgggttcgacgtgtacggtaatatcggcggagggtacgatttcgtgcgcgatgtcctcaatcacgcaggatacgtcgtgtgcggcgtcgaggcgcagggtggcgggggcttcgaccgtgatgtccataaacacgtcggcaccgctttcgcgcacgcgcaggcggcgcacccggcagagggggagctgcttggcgagagcctgttccagggcctcggaatgttccttgccgcccccgtcaagcagcatggtcacggcccggcgggagagccggaagcccacaacgacgacgatgcccgaaacgaacagcgcggcgatggcgtccgccatatgcaaaatgccccggaaagggctgtccgccggaaggtattcgctggcctgcacgcaaagcaggccgacgagcacgactccggaggaccagatgtccgtggtgaaatgcagggcgtcggcttccagcgcctggcttttgtgcttttgggcgacgcggcggagcatggcggcccggttgacgtccacgagcagggaaatgaggatgatgatcacgccccaccatgacggggtgatttcgggggcgtcgaagaagagccggttgacggcttcgtgcacgatccagccgcaggtgacgagcagcaggaccgtttccgccagcgcggaaaggttttcgatcttgccgtagccatagggatgggtttcgtctgcggggcgggccgcgacgcggacggcgaagaaggtgatgcccgcggctacaaggtcaaggctgctgtgcagggcctcggaaaggataccgaggctgttggtggcgagcccggctccgagtttgatgagcgtcaggaacagcgcccagaacaaagacgagagggccgcgtgttgtttttcggaatgcgcttcgtggtgcgcggtttcggtagtcatgaaaacactccggggaaatggccgcccctttgcggccgttcacggaaagagcgttagggcgtcagctcagtacgccgtgctcataaaggattttcaggccgatgccgataaggacgcagccgcccacaagttcggcgcgtcggccaaaaatgtccgcatgtgcgagcccttttcccgccagcaggccaagggccgtgatgacggcacagaccacgccgatcagggtggacggcccccatacgtttatgttgaggagcgagaaggaaagccccacggccagggcgtcgatactggtcgccaccgcgaggatgagcagcttgcgtcctttggtgggatcaaccgaacagctttccccgtcttcggaatcgtctccgccgccccggatcatgttgccgccgatccatgccagcagcgcgaaggcgatccagtgatcccacgattcgatgaatccgcgcacggtcaagccaagggcccatccgatcacgggcatcaggaactggaaaaagccgaacgtcagcgaaaggcgcaaaaaatgcacggccgtcacccgtttgagggcgcagcccgcacagaccgacacggcgaaagcatccatggccagtgcaacggcaatggcgaacagttctgggaaactcatagggtgttatgggggttaaggttatgggcgtcaaaaccgatccggttgttgtgaggccttcggctcttgctgtcaaccttttgcggagaggtggatagaataccgggggaggggaggaggaaacattcttcagaacgtttcccccttccctccccgacctccctcctttcccctttcaaagactttcgattggtggggaggctgcgcggtgggcgtcccgttgtgtggaagtattggcaaggccggttgggtatatgtagctgcggggagaatttattttaatgcatgaagaaaataccggtagcgacgaggacgacggcaaggagtttgaccgcggaaaatttttccccaaggaaaaatacggcgaggagcataccgaaaatgacggatgtttcacgcagggccgcgaccatcgctatgggggccttggtcatggcccaaagggctacgccgtaggagccgaggctgcacaggccgccgaacaggccgtgtttccagcggttgcagaaataggggatgtaggttttgcgctgtctcagcagcaggatgacgttgatggggaacgtgttgatgacgtagagccagcatacgtagctgatgggattcccgctggcccgggcgccgtagccgtcgaaaagggtgtagcccatgatcacgacggcggttcccacggcggccagcgcgccgttgatgttgaacttgccgttcttaatgttgtcgcgggtcagggtaaggacgccggcgcacaggcacaggatgccgagccacccggcaagcggcatttcatggccggaaaggagcatgaaaacggacgtcaggagcggggccgtgccgcgcatgatggtataggcgaacgacatgtccacattgcggtaggctacggcgatacagaggtagtaagcgatatggacggtgcaggagccggccaggaacttgaggctttccagcgccggaaaggggaggaaagggacgatgaacaaaacgccgacgcctccgccgaagcagttgagccccgtttcatagagcttgttggagccgcccttgatgacggcattccatgaagcatggagcaaagcggcaagcagtatgagaagaatgatttcgaaagacatgaagcccccctatttttttcgcgggaagctagcgcgaaaaaagacgcttgtacaccgatccttttcttttgctgaccggtatgcaagcgtctttatgctgagatcaaaatgggttgtgttgtgacgttttcgtgtcggtttttttgttggaggggaatggaaaagattcgttttcgaaataaatattcgtatacgaaactacttcttgtgatgttcggctatccacgccttgaattggcgcatttccttggcctggctgataatgatgttctcagcgaggttgaggatctgaggattgttggagccgaggagggcggggacggacatttccagcgccatcgcgtggtgcggcagcatgagttccacaaaacgcatgttcgcgcccagattcttgccctcttcgagcatgtgctgcatggccttcttcatgggcgcgtaggccgattcttcgatgccgccgagaggcttcagcagctccttcatttcggcgatttctttttcctgcaccttgatcacgtcgtcggcccatgccgtaacctgaggatcttgatctttctttggggttgcaaggaagactttggccatatccaccgcgccctcatggtgcgcgatcatgccggaaaggaaggcgcgatccgaatagtgggcggcgccggagccgtgatccatagcggcctgagcgggcaggacggaaaacaaaaacgccgcaacgagcgcaaggacagtcaacgaggcggtacgcatagttttttctcccagataggacgtgagccacggaacgccgtggcgggcccccacaatgggggcccgtccggagcataccggcaaccttacatgagatgtaactattttttatcgggcccgcccgtgcgtacctcggcaccacacctcgcgcctcataatatcgcggtgacgggttacggcgttccccggaaccgggggcagggattcgataaaggaaaaagccttcggtgggagagggatgggttccgttggcaggtttggaaaagggagagggcttctcattcaggaagagcccatcttccttccccaatttccaatcttctatcgcctcttcacggatgaggtgccggaagcgcaggcattgaccatcggcacataggtttcgctttccgcgtcgaagtagagcagttcgcctgagcccatatcgaagtacaggccgtgcaggagcaattcgcccccatcgacggcgctcttgatccacggataccccatgaggttgtccagcgagaaacgcacgccccacatttcgcaggcccgttgccgttcgtcaggatcggccccgggcagggagctgtccacctcggccttggcgcggcaggcgaggttcatccagatgttgaggaattcgtcgtcgctgtgcgaagcttcaagcaggctggtaaagccgccgcatttcgcgtgccccatgaccatgatgtggccgatgtgcaggtggcggaccgcgtattccagcgcggcgctgacgccgtggtgatgggagtccggctcgtagggagggacaaggttggcgacgttccggatgacgaacagatcgccgggcgtcgcgtcaaggagcaggacagggtcaacccgggagtcgctgcaggcgatgacgagggcgtagggatgctggccgacgcggaggtcttcataaatattgttttcaggacaataccatgtcttttggaagcgctggaatccggcggaaaagcgtttgagcaggtcgtgcgataccatttgagggtcctttgcggcaaagaggatcggaaggcgggcttgtcatttcgtggtggaggctttatctccctaaaacagaggagtcaacgcaaccgattggagtattctcccatgcccgattttttgagatggatcatcgccggcgttacgtccgtggtggtggcggggcttgtgttcctgcttgccaccgtggggatcgtcgtcgccttttttgtgtttttggtgctgttcgtcgtgtttgggctggccatgcgccgggcccgcaagaacgtgcagtacggtgaggacggcagccggtttatcatttataccaacattcccggagctggggcggggaatgccgaccgtgtgcgccgggacgatcccgacacgtatgagctgtcccctgacgaatataccgtggaagcggcaccttcgaagaagcccggcgacacggacccgaaggcccttggagatcacgggaaatcgtgacggcgtgcccggacggcaggtctttttctggcgtaaattcacttggatagcaatatgtttctgcacgcgtgtcttagagttgctcggctctggcgaatgggctgccttgtcctgtgcggctttttcctgtgctttgggggaggtgccgccgcgtttgccgccccttccgtcgaagaaatggccgggcagatgctgctcgtcggtttcaaagggcaggagcctgaggaatgcggagctatccttagagatattcagacccgccacctgggcggggtgatcctgttcaaacgggatgcgcgcaacgccaagctccctcgcaatatccgcgatgcggcgcaagtgaaacggctgatcgccgcgctgcgaggggcctctgcggggcatccgctttttgtcgccgtggatcaggaaggcggcaaggtggcacgcttccagccgggcgacggttttccggcgtacccttcggccgcggagctgggccggggcacgcccgatgccacgcgccgcacggccctcggcatgggccgcatgttgcgggagctcggggtcaatctcaatttcgcgcccgtactggatgtgaatgtgtatcccgcttccccggccataggccgtctcggacgcagtttttcggctgatccgcaggccgtcgccgcgcatggggcggcttttgcggacggcctgaacgacgcgggcatcgtagctgttttcaagcattttcccggacacggcagtgcgcgtgcggattcgcataaaggggtcacggacatcagcgcgacatggagcgagcgcgaactgtctccgtaccgctccgcgctcgggcgtccggggcagcgtatggtaatgacggggcaccttttccacgccgggctcgatcccgcctttccggccacgctgtcgccttccgtcatcaacgggctgctgcgcgggcgtctgggatatgacggtgtggtggtgacggatgacctgcaaatggatgccatcgccgccgaatacacgctggaggaagtggtgcttcgtgccatcggggccggagcggacatcctgctgttcggcaataatctggagtatgatcccgctatcgtcgccaaggttcaggccgtcatcgtccgggccgtcgaggacggaaccatttcccgtgcccggcttgaggcgtcgtggaggcggattctgaagctcaagcagcagatgtcctgatgcttcggcggaggccgcctgcggagacgattttctggagccggtcgcggtttcgaaaaggctttgggctgttgccgcccgggagacggcccccccatgaaaaagaagggacctcgtttgaggtcccttccgtcgttttactcgtcgtcttcgtccatgagggagtcgtgcagggcatcggtgaagatgtcgaaggcgacctgctcgatgggcgtgcggggtttgtaggtgagggcctcttcggggacttcgccgttttctttgcacaattcgtcgaaacggtccgaataggcggcgatcaggcgttccacttccagcacgatgggatcgtcggaggggatgacgtcgtcatcgctgtcttcgcagctcccttcgtcgtggctgcatccgcaaccgcattcttcctcatcgcctttgttggcgtaatattcatcaacctgtgcttcataggcatcgatggcgtcgatgacctgctcctcggtcagtccggcaaattccggtttgactacaacggtcttcatacgatctccttggatggcggcgggcgtcgccgctggtgctgtttttgtcttcatgcccgtccggacctgtcccggaggaactttttcggaacgtgtgccgagctgtccggcgagttccgttctttgggattcatcacgcaaagggacaacatcccgctgcccctccgcttccctgccttttttcctattctccgcgcatcgtcaaggaaatgcgcttgcgggggatgtccacgtcgagcacggtgacgagcacttcctgatgcactttgacgacttcgttgggatcgcgcacgaagcggttcgccagctggctgatgtggacgagcccgtcctgatgcacgccgatgtccacaaacgcgccgaacgctgtgatattggtgacgatgcccggcagcttcatgccctgtttgagatcctgcatcgtgctcacgccttcggcaaaggaaaagggcttgaaggggcctcgcgggtcgcgtccgggtttttccagttccttcatgatgtcggtgagcgtgggcaggccgagcttgtccgtgacatagtcggaaaggcggatggccttgcggcgttcggggctttgcatgagttcgcggacggttgtgcccgtatccttggccatgcgctcgaccacggcgtaggcttccgggtgcacggcgctggcgtcgaggggctgcttgccgtcccggatgcgcaggaagccggagcactgctcaaaggccttggggccgaggcggggcaccttgagaagatcccggcgggtctggaaggggccgttttcgtggcggtgagccacgatattgcgggcgagcgtggggccgaggccggaaacgtaggtgaggagctgctcgctggccgtgttcagatccacgcccacggcgttgacgcagctgacgaccacgtcgtcgaggcagcgcttgagttcggactggttgacgtcgtgctggtactgccccacgccgatggatttgggatcgatcttgacaagttccgccagcgggtccgcgaggcggcggccgatggacaccgcgcccctgtaggtgagatcgagatccgggaactcggcgcgggccgcctccgaggcggaatagaccgaagccccgctttcgctgaccatgaccacggggatgctccagccggggagcgcccggatgaaggtttcggtttcgcgcccggcggtgccgttgcccacggcggcgacttccgcgccgtgtttcttggcgaggcggaggagcgtttccccggcttcggtgcgggccttgtccgatccggcgtgcgggttgatggtcgcgtattcgagcagtttcccttcacggttgaggcagacgattttgcagccggtgcggaaaccggggtccacggcgaggatgttctgagcgccgaggggcggggccagcaggagctggcgcaggttttcggcgaacacgcggatggattcggcgtcggcgcgctgtttgagctggttgcggagttcggtctccagcgcgggcgcgagaagccgcccgtagccgtccagcgcggctgcgcgcacttcgcgcccgcaggggccgtcgttgcggacgaagaggcgggccaagaggtcctgcgcctgctcctcattgcgggggcgcagggagaggcgcaggaagccttcctcttcgccccggaacatggcgaggatacggtgggaaggggcttgcgcggcgggttcgtcccacgcgaaatagtcgcggtacttggcggcgtcgggaacctcttccttgccggaaacggctttgctccgcatgagtccttcgcgcccgaagagtttacgcaggcgttcgcgggcgggctgatcctcggcgaagcgctccgcaaggatgtcacgcgctccggcaagcgccgcttccgcatccggcacgcccttttcggcgtcgacataggcggcggccatcgcttcggggagggtgctatcctgacgggccagctgatcggccagcggttcgaggccgcgctccttcgccattgaggcgcgggtgcggcgcttggggcggtagggcaggtaaatgtcttcaaggacggtcagcgcatcggcggcttcgaccttggcacgcagttcgggcgtgaggaggccgcgttcctccagcgaggcgaggatggcttcgcgccgtttgtccaattccttcagggcggcgaggcgatcacggatggcggtgaccgccacttcgtcgaggctccccgtggcttccttgcggtagcgggcaataaaggggaccgtggcgtcctcgtcgagcaggcggatgacggcttcggtttgctgtgggcgtatattcagttcttgggctatgatggatgcgtagttctgcacgcgtgttccttatctgtttgacggattacgggaaggtccggcaccgttatgggtgcctgggcggacatgccggatggaaaaggaggcatggcgccgagcgacggtatgctttttcgcggaaaaagaaaacgcccgccggattccggtgaaacccttgaccttggggccccgggtgaccatagtaaaggatatttccctctaaggagttttcatgaacacgccatcttcagccctttccgatgaaatgaaaggggcgatgtccactctgctcaatgccgttatttttgaacaatggctccgtttttcctggattgaggaagacgaggaaggggatttctgcatccagatccccgcggagacggtcagcgaacttgtggaggattaccccgaatacgaggggttgatcgcccagctcaacgggaccatcgtggatgcggacatggcctgttccgccgtcctcggctatgcgcggtcctcgcttggggaacagagcctcgccgtgctggagcacaacgaattccagaatatggtggggcgtttccaccagtggctcaacgacaacgtggaagcgctggatcaggacccgaagaatttcgatcagtggtgcgagctgttcctcgccgacttgcagcaggccaaggacggcaacgcgtaaggctttgccgggcttcggcaccgacgggttccgctcacgggaatggagtacctttgaaacggtacagctttcaaaggtccccgagactatcgagcgggcggtctgtgccgttttagagaaaggcgggagcgatgttcccgcctttctcttttgggctgcaggaaaaggccgcccttgcgtggagcggccctggcttggaaaacatggcggggggccctgtttcagcacgatgaggtgtggggtaaggaaaggatacgcttgacggaacggtgttatttgccccagagcgaaaggctcggcccggcgtcagccagcgcgtcgagggggatgtccacgacctgcgacccggcggcccacggagccacctgatacggctggaagaaaatgcgtatgccctcgggcgtgagcgcaaagctggaaaagttttcggcttcgggggcggtgccgctgcggagcatgtcgtcgttgtacatgtcgccgagggatttggtcagggccttggtgcagtagcggctcatgacgtcgagcgccgtatccagattttcgaatacgtcatacaaatcgatgagcgcgccgctcttcatatcataggtcgtcgtggtgatttccaggttgccgtgcgcgccgccggtatagctggcggtcttccagactatcgaaaggacggacggcgtggaacgggtcgtgctgtaggtcgtttcgagttcgtagggcacgcccagatccggttcttcgccataggtattctggaacgtgtccaccgcctgatgcgcccagtcggccacatcggcatccacgcgggcattgccggttatcgggtaatggacccgaatctgaagcttgccggtttgccgggaaaccacggcgtcgcgctcgttcagggcgttggcgtacgtgggtatcgccagcgcaacggtacagcacagcaggagaaaacggacgaagtatgacatgggaaatcctgttccgaatgattttgcggcagacatgacatccggaagccgttttgtccagaggttagagatcagatccggcacgccccgtacaggcgggccagccacggcctcgaatagatttccagcctgagcctgagccagctccaccccgcgtcgcgtactttgaagcggtgcacggcctcgggcgcggcaggcgggttggctcccatgcgggtggtgaagaatacggaaaatccggctttccgcccctcttcccgcgcaacctcggacccgcttccccacggccagcacagcgagcgcacaggatgccccagttcccggcggagcgtttccgcgcaggcgcccagttcttcgtgcacacggctgcggcgggccgcttcgctctccagcgtacccaatcgatccggggaaaatcccgctacaagcgtttccagcgcggctacatttcccgccgattgaaagaaagtacgggcctccgccggttcttgcggcacgaggcgctgcacggcggcgaccagatcaggggaagggatgaatgcccggctgtacaggaaggggcgttctttgaagcggggcaggccccagacttcggggaagtcgaccgcgttgaacgtgttcgcccgcgttccggggacgtggaagcgttgcccggcggcttccagtgcggaggcgggcttctggtgcctgtcgtggcggttcaccgggccccattccggaccggcgaaaacggcgaggtggcgggcggagtgcgcggccacggccatgacgccgctggattccatgtgtcgggcttcttcccaagaaaagaacatatcgcggcgtacctgatagccgaagggggtgtcgtgcatgggcgcatccacgggagggaggctggacggaggcaacccctcccagacttcggcaagggtcgggcggcattttttttcggcctccatccgttcggtgacggcaaagacgacgcctttgtgcccgtatttccgcaggatgggccatgcgtagacgtaattgtccaggtacccgtcgtcaaaggtgatcagcagggaacgcggcggcagcggtgcgcccttcagcagaaaggcctccgcttcatcaaggccgatcccgcgccagccgtgttcggccatgcctcggcactggtcttcaaaatgttccgggctgacggcgatagcccccggaaagcggctgacgtaatggtacatgagtacaggaaggctgtatgcgctcatggggcatccttgaactgtttggagggaattcgggggaatggtctggcctgcggaggggatggggccttgcccgttgttcttccccgccggagagggatggggaaaacgccgtacaccgtgaggtacgcttccgaacaccgtgcgtgccgcttttttatgatgaagcgcgcaaggtttcaaccatgctctgatacagaaaaaggggcggccccttcatcggagccgccccccggaagggtggatcaaaggttgccgctgcgtttgcgctgtttggttcctgtgtttgatgcccactggtgttcgtgcgtgaggaactgcatcggattgatcggcttatcgcggagccgcacttcaaagtgcaggtgagggcccgtaacccgcccggtcctgccgagattgccgatatactggccttgcttgaccttctggcctttccggactccgagtttgtccagatgggcataacgcagggtgacgccttttccggcatcgatgtcgatggtcaggccataggagcctttgcggccgctgtacacgactttgccgggcgcggaagcaacgactttttccccgcggtttccggcgatatccacgcccgcgtgcatgagccgcctgcgtttgacgggatgcttgcgggggccgaaggacgacgtgacccggatagtttccttgatgggctggatgagcgaaagagccgggtagagcgacggttccttgagcagttccggcgtgacttcaatgtcgccgtcgtcgaattcttcatcggggatgggagtgaagcggacgttggaaccgttctggctgacggcggcgccggctgtctggagttcgcggcgggccgtgtaggaaagcgcttcgcgtgtcggggggcgatagtcatgcagggccgtcaaggaatcctgatagcggacgatggaatactggtggtgctgcaagccggattgttgtggagcgcaggcggtgaggagaaggaggcaaaggaggggggagaaaagagcaagcctttttgctgcgctgtaagacaaatacgaaggtttgagcgtcatgaaggattccttgtttgcaggggccgtatgcatagcggaggagaggggggggcgccccggtcgtgatgtcattgcggaaagaaggaagcacgttagcatcccgggcaaaagctgtcgagtcgttggatttttttgaggacgcctcagccaatcagctacaaaaaggagcggttacggtgggatagcggatggttttgttgtttttccgctatcaggtttaaaaaactgtacatatttttccctatatgatttttcaatgatcatggcggataagaacggcctgttggaaaccgcaaagggaggaattttttttcggaaaaagaaaacccgtattatcgtaaataggaacttttctgaatgaattaaccgtccaaaggaggagcccttcctgtggcctcctcaccttccgagggcagtgcgctttccatgtatgtgtggaggatcaaaagtgcagaaggggggaggacggaacttggcgaatgggcggaactatggcagagtagggacacgaaacccaagaaccaagaggtgctatgcgtacaatatccttcactttcgcctctttttgccgtattaccgcccttgccgttttgtctttttccttggcgggctgcggactgatggattacggcggaggagggtccggcacgcgggggacgaagacgtacacggtgcggggaaaaacctacaggccctatctgtcggcggacgggtatagggaagacggggtcgcctcgtggtacggcagggattttcacggaaaaaccacggccaacggcgaacgctataatatgtatgcgatgaccgccgcgcacaaactgttgccgctcgggaccaaggtgcgggtcacgcatctgaggaacggaaagtccatcgtcgtgcgcgtcaacgaccggggaccgttcgtcggggatcggatcatcgatctttcgtatgcgagcgcgaaggaactgggcatgatcggcacgggtacggcgcgtgtccgtgtcgaggcgatcgaaacctttggcggcgcgtcccccggcgatatgaacgggagcttctacatccagatcgccgcgctgagcagccaagcctcggctcaggatcttgtgcggcggctgcaaaaccggaatctcggcgggcgggcgttctacgcgccttctctggggctctggcgtgtgcaggccgggccgttcaactcgctgaaccgcgctgaggatctctcggacgagctgaacaggcagtatcccggcaactttgtggtcgcggattaaaggcggaagcggaaggggagccttttttgaaacggcttcccttccgccgtgttttccacgcttccccttcggcttttgggcatacgggcttcccgttcagggtgtttctcatggcggaaggccgtgagaaggtttcggggcgggggtgaaaccgttgacaacggtgcttggctgctgtatgtttcttcccacgtaaaggggagtaactgggttcttgagacccgggtaacgtcaacagcatggcttcggcctggcgttaccatcaagctttgacttgatgagtgagaccttcacggcacatgttgccggagggtcttttttgttttctccggcgaccaaacgcaacaaggagtaaaacatgatgttcgctcttcttcccgtcctgaaggggcgcgcctacggaggttccgatggtcgttgagcattccgtgacggaagtcgtccttttctgtgtcctcatcatcgtctgtctgtggtgcgacctgcacgcgcatcaggccgataagcccgtttccgcccgtaacgccgccatctggagctgtatctgggtgggcctcgcgctcgtgttcgcagggtacatcggatatagcttcggctctgaacaggttcagctcttcctgaccgggtacctgctggaaaagtcgctttcagtggacaacctgttcgtcatcatggccattttcagttcgttcgcggtgaaggacgcgttccagcaccgggttctgtactacggcgtcctcggcgcgctggttctgcgcctgatcttcgtggcggcgggcagttccctggtggcgatgttcggcccctacgcgctggcgagtttcggcatcttcgtgctctggacggcgtggaagatgtggcagtccatgcacagcggtgagaaggaagaaatcgtcgactactccgagcactgggccgtccggtacaccaagcgcttcatccccgtgcacaaccagctcagcggccacgatttcttcgtgaaggcccccgatactaccggcaagctgatctggaaggccacgccgctgttcctgtgcctgtttgtggtggaagtgtccgacgtgatgttcgcgttcgactcggtcccggccatcatcgccgtcacgcacgaccccttcctcgtctataccagcaacgtgttcgccatcctcggcctgcggtccatgtatttcctgctcgccgccggaaagcgttacctgcgccacctggaaaagtccgtagtgatcatcctcgcgtacatcggcgtgaagatgcttctggacgtggtgggcatcgtgcacatttccccgctgatcagccttggtgtggtcatcgggctgctggccataggcatccttgcctcactgctgccggaaaagtccgccaagtaagttctcatggatgaatgacgcccggccggagtatgcttctttacgcgggcatactccggctcccctttggggacattgcattttgtgtggaaaagcgtatccctgtttccattccatagaggccggaggcgcaggctttcggtgatttttccaaggttgacgcggggaagggacgatacgctcggatctgttttccagaagcgggagccttggtttttaataaggagcgttggacgcatgaatcgtacaagaaccctgcttatcattggggtttttatgctttctctcgccgtgctcgcggcgttggaattccgtgttcaggatgaacccccgagcgaaggccagatggtgacgggctccctttcgaaggatatgcccgctcttcccaagctgccttccctgggcgattcggaagggaataagggcggagttctggttcctctcgacaacgggacgctgcgcggcagtgcggccccgcttgatatgtccgcgatcccgcccgatgaggaaactccggcgggtaaggatacgcccgaaacggcggctcccgcagccgatcccgctgtctcggcggaaaagcccgcaccggccccgatgggtgaaattgcgcctgccgatacgtttacggaaaagccgaagcagcccgtagccgaggaaaaggcccctcagcaggaaaagaaggctgagaaggccgtggcggaaaagcccgccgaaaagccgcagccgaaggtttccgaaccgaagcaggaaaaggaacaggcgaaggaaggcgtggtggtgctgaccaccaaggtccccgcgaagctggcggcggggcagaccgcgatcaccgcgacccggcttgagctgggcaagagcgtggtattccgcatgaccggcgcggccccgatcaagaccaagacgctgctcctcaaggaccccaaccgctatgtcgtggaccttcagggcaactggggcatccagctcccgcgcgtgcccaaggatctctggatttcgggcatccgtctgggacaccatgaagagagcacccgccttgtatttgaattgacccgcgccccggtgtcggccaaggtcgtcaaaatcaacaacacgaccgtggaagtccgtatccagtaactcgccggataccagaatgcttggaaagccctccgccggatttgcggggggctttttcgttgtccgaatgccgataaagcggccttttggaggcaaagccggatattcttgagggggaatttcaaggtaacaattttttggtgctctaaccggagcgaaaacacggtagaaacggggagtgtggggcaaaaaaatcagaaaaaaataaaaagtcgttgacagaggcggcgtggaggtgcataacccgttctcgccgctgcgggacggaatgtctcgctgagccgggcagggccgagaggccgggacggcggg

SEQ ID NO: 7530 - DNA, 567 bp, Unknown
  gut microbiota DNA sequence
agatgaaatcaaggagcgtattgaaagacatgaaagaacattgatcacgacattgacggttcgtatggcagaggatttaacttcatatttaaagaatatggatttaaaggtagcatggctacaccatgaagttacaacgattgaacgtactgagatcattcatgatttacgccaaggtaaatatgatgtacttgtaggtatcaacttattaagagaaggtttggatattccagaagttagcttgatcgcaatattagatgcagataaagaaggctttttaagatcacgaaggtctttaattcagatcattggtcgtgcagcacgtaatgccaaaggtaaagttattatgtatgcagataagataacagaaagtatgcaggaagccatggatgaaactgcaagacgtagatcgattcaaatggaatataatgaaaaacatggaattgttccaaagacaattatcaaaccaatccatgatgtcgttcgttctaaagaaacaaaggaaatggcagctaagtatttgaagaagaaaaagttgccggcaaaacaaaaggaaaagatgatcaa

SEQ ID NO: 7531 - DNA, 8919 bp, Unknown
  gut microbiota DNA sequence
tcttcttcttcttcttcttcttcttcttcttcttcttcttcttcttctttctcgccagcatccatcaggcggggactccttttgagccgcctccccaccagtcgaaagtcttggaaaaggagggggccgggggaggaataacccttcttcagaaggggtttcctcccccggtcatctccactatttcttttcaggcaacgggccgcgcgggaggaaacgccacgtgtcgcggatttccatagcggcttcgttgatgaagggaatgtcgttgtagtagagggcgccgatgggcacatcatatttttcctgtgccgcggcgaaatcctgatgcagcttgctgtagggcacccaaagcggggtgatgacccagagcagcagccatatcgtgaacatgcagagaagcagtttcacatagccggggagagggcgtctggacatgatgcgtttcctatgaggggtgccgggaagatcccggcccggtgagcttttgaataaggaggtggaatcgccgggcgatcccacctccgggtccgggcttgccggaagtggcgcacccggaagccggatgcgccgatgagtccgttagatcttcgccgtgatttcggggaagacgagatagaacatcacatacgccatgaggagggtcagagccaagttgaaggactggccgcagacgtacaggatgaggggcttgccgcccttgaagtagggggcgagttcgcggaagttggtgctcaggccgatggcggtaaaggcgagcacgaagaaccacgtgcggacgcccttttcgatgccgtcgatgacgcccttgttgatgagggcggtgccgaggtcagggccgaggtcggcgctgtaaatggagaagatgatcgaagcggtgaggaagccgatgacgaacttggggaaacggtgccagatttccatcaggctggtttcgcgtccggcggtcttttcaacgctggtgcaccagtacacggcgataccgaaggcggtcacgccgatgagcacgttctggatcatcttgatggtcgcggccacgtacatggccttggggccgagcagcgcgccggcggcggccacggcgcccgtggagtcgaccgtaccgccgatccacgcgccgccaagcacttcaggcaggccgaggtacttgatgaaggcgggcagggccaccatcatgatggcggtaaaggtcatggacaggccgagggcgagggtaagctcttccttcttggcgcggcacgcggcggctgcggcgatggcggcggaggtgccgcacacggacatgtcggcggagatggtgatgttcagggtcggggaagccatcttgaggaccttctggccgaagatgaaggtcgtgatgagcacgatgggggtgaccacccacgccacgaagataccggcggtgccgatggcgatgatcttgtcgaacaggatttccgcgccgaggagcacgaggcccgtcttgatgaagtattcaacctggagcgcgggcttcatccactgcggggtgccgatcgtgttggcgatgatcatcccgaacatgatgccccagggctccacgccgatgccgtagtaggccatggtggactgcttgccgagaatcatggcgatcaccacgacgacgaacaggcccacgaagccgatgaggaacttgggcaggttctggcccatgacgaagataccgatgccgaagaacagggcaaaggcgaccatcagcaagggcagggtggtgaagaggtttacgggcttggccttggcggaagccttggacgcgtcggccttggccttggtccaatccttgatggccgcttcggcggcggtgttcaggctggcatccttgtagcccgcgtcggcggcgagcttttcggcggcctgagcggcggcgaaagagctttcggccttggccttggcggcttcagccttttccttgttggccgcgttcttcgcgtcggcttcagcctggctggtaaacatggacttcacggggttgtccgtccatttgccggggctggcgatgaatgccttgatttccttggcgataggcaggttggtgcctacgacgcccttcttggcgtcctgagcctggatatacgcgatagtcttaaatggagccttctcggcttccaccttcatgatcgcgttggacttatcgatcgtttctttataactggccggagcgccattgatgaaaatgcagatggccgcgatgagcagagcgaaaccaagccaaatggcccagtagtcttccttcttccacaggtctgaccagtgcgattgagctcggtctacgaccacgttgctgttttcatttgccataacagtctcctcctggctttgggcatgtgccgaaagccaaatctgttttggtgaaaaagttcaccgattcctctgcctgtgagcggttgtggagtttacggctccacagaccagacgcctttagtccgactaataacaggacacggtctattgtcaaccgaattttgaatgtaatagcgggttattggggaacgaatacggagcggagagaaataagccttgtatatgaacacaatagactgaatgctcaatcaaagggggacaaatttgatatgatttggacaagagagcgcatatggaacggtatatagggcacaaaaacggataagtgattctgcttttttctgtttgtatggttttaacatatttatattgttatgttatattggataagcgcttctcccttcccttctggagttccgaccccataaggcccatcatgctctggagttcaccagggaactcttgagagacgccatccctaggaagggctcttttgaaaaaaactcgagagttccatgccgcaagaacctggagacgtggggggataaaaaaagaacgggatgcgatggaatcagggagaacggcgcggcatcatcacacagatgcagctgttgtcgacaagaaaagaggacggtcatcagcccctttcaaccgcaacgcgacagcagggcaacgagagaaaggtacacaagggcaatgtgttcggtactgaatccagaggctgaactcatggagtcgccgtttatgatgcagcgaggagaattcggtgtgcactctctgtcatagggcaatgcagatttgcattgccctatgaagcgatacgtcatcatccgtaggctgtttcttgtccatgcggaagcgtcacggcttcgaggatagtttattgcctgtattttcctgtagatagcttcaattattcgtgcggggactgtttcaaaccgtacagtgcagtcgggtaggagggggttaccagacgttataatgcactttctgttcgtcgtaacgttccttatgcgagaaaggcgtctcggaatagccgaggatggcaaggccgagcggcgatacggtatccggaagattaaagagctcacggaaagcctgttcccgttcggggacggggtggacgccgcaccagagcgaagccagctccttggcgcgtgccgcaagcaacaggttttccatagcggcggagcagtcctgcacccagtatttgccataattggccgacgtggtgtccccgcacacgaggatggcgagcggagcctgcttgatcatgcccgcatatggatgaaaatccggaatcttatccagtttttcgcggtccgtgatgaccacgaacctccacggctggatgccccccgcagtaggcgcggacatggcggcgctcagcaattctttgacgagatcttctccgacgggccggttcaggaactggcggatgctgcggcgagtatggaggacttcaaaggcatccataagaacgctcctttcattgggtttgtgttcgttgcaccataccagaaccgtttttgttgcaccagagccgatttgccgggctcctccaatggagatgccgtgtagcccgcacggatgtttggatattctttttcagcgcgtcagggcttgtcactgcgttatcatgcgtgtattctttccggtctggacaaagaaacgagggggttcgttcctgctgtgttcgtaccccggacgtatttcgtttgctggctttttttcttcattctttttcgtgatagcgtgttttgaaggagtttttatggctggtttgccgggtcccggagatcgtattgaagcccgttgcactcgctgcaatgacattaccgggcatgtcatcgtcgcccttgtcggcggggaaattgtcaaggtggaatgccgcgcctgcggaagcgtgcataagtattacccgcctgcgactcccaaggaagcgaagggaaagacggccgtttgccgcgtaaaggccggtgagacccgtaaggaggccgtgaattccttcaagcccacctccacgccttcgacggccgccgcatcgcccgccgccgtgtcccgggccgccgccaaagcgcaaaaggccgctgaggacatggagcagaattggcagcgcaccatgaacatgaccgccgcttccgcccgcccctacgccatgaacgagtccttcgccgtcggcgatgttatcgatcatcccaagttcggcagcggcgtcgtgcaggaaatctttcctcccgataagatgcagatcctcttccgcgacggcgccaagatgctgcgctgtgcgtgctgaggggcagtaaagagattttgagattggggagaggagcaccccacggttctcctcctccccaaaaactgccggcgcggctcgcacccacccctcctctcccaagactttcatctttatcgaatccctattccggatttttctgtgattatcataaccaattctttggaatgatggactttgttgcattgaaaacgatagcctgttgcgaaagtgcggtgtaacaataacggggcgatcgaaaacgaacggttccaaaccggcgcaaggcggtttggaaccgttcgttttcgatcgctctgagggggtccggggggaatcattccccccggcgggtgcagggcggagccctgccggggttcaaggggccgcgccccttgccgccggaggccttacggcatcatggcgcagagcatgagcccggtcgtgaccggaagcccgcacatgatgttggcgttggcgatggcctgcccggatgcgccgcggcagacgttgtcgatgacggataccacgatgagacggttggtccggggatcgacgatgacggacatgtcgcagaacatcgtcccacggacattacgggtctcgggaagctggccggagggcaggacgcgcacccacgggctgtccgcccatgtttcctcatacacccgctgggcgtccgcctgcgagaggggagccttgagctgtgcgtagatcgtggacaggatgccgcggttcatgggcacaagatgcggattgaaagagatggtcatgggcccgtgcgccagacgggacagttcctgctcgatttccggggtgtggcggtgcgtgccgatgccgtaagccttgaaggagtccgcgacttcgcagtagagcgaaccgagcttggcggaacggcccgcgccggatacgccggacttggagtccgcgacgatgccgtgggtttcgatcaggccgtcggcgagggccgcggtcatgccgaggatgatcgaggtggggtagcagccggggttcgccacaaggcgcgccttggcaatgtcggaggcgtagagttccggcaggccgtataccgcttcgggaagcaggtcgggtcgcttgtgctcgactttgtaccactgctcataggtttccgcgcttttgaggcggaagtcggcggaaagatccaccaccttgaggccgcgctccacaagcgccgccgccatttcggtggccgccgtgtgcgggacggcgaggaaggccagatcgcattctttggcgatgagttccggttcgggctcgatgaggatgacgtcggctcccggcaggccattgaggaacggatacagatcgccgagccgcttgcccgcttcggtgcgggaggtggcggcggtgagcttcatgttcggatggccggtcagcaggcgcgccaactccattccggtgtagccggtgaccccgacaaggcccacccggatcatttcttgtggcatggcttttaatccacctttttcatgacgtatttcatgcgcagttcgtacaggatgccctccagaaggcgggcttcgtcgctgtcgaggcattgtttggtcttttcttcgagcatggtcaggatgtcgatggtatgcttggctatgaccaaatcctgttcggtcgcgcccgattcaggattggggacctcgccgagctgcaccagcgcggacgaggcgagggaaaggataaacgtggaaaacgtaacctgcggcatggagcagtcgcagccgggcttattgcagtcacaggccttgtggtcttcaggggaagcagcgttcatggtgtctccgtggaacgagtgtctatgatgggtccggcggggatgccggttcaacttcttacatcaggaataactcgtcccggctcaacgtcaagggcgcgatgatatgcggaaagtgccgtttccagataatcgcgcgacgcgctgaagccgccggaggcacgcaaaccgtgcgccagagcgtgcaatcccgccagcgcgtcggcccagtccacccagcccatgtgcccgaagcggaccatgcggcccttataatgatcttgtccccccgcgaatacgatgccgcattcgtcggccgccaccttgaggagcttgtcgccgtccaccccggcgggcagcatgatgctggtgacgccccatgcgtaatgcgtgggcgcgaacaggggcagatccagcgccagcgccccggtacggaccatgcaggtgagcgcccactgcttgcggtacagggcgtcgaggccgccttcttcgaacagcatggacaggctttcgtgcagccccacgatgaggttgaccggcgaggtgaacagcccttgccccttgagcaggttgtcgcgttcgcccgcgaggttgaaatagaagcaggagacggggatggattcggcgcgtttccatgcgcgtgcggaaagggccatcagcgccatgccgggcgggaccatgaggcccttctgggagccggtgaggaggcagtcgatgccccatgcgtccatcgggcagggagagatgccgaccgccgagatgccgtccgcgacaaggagcacttcgcgcgtgcgggtaagccgggcgatggcttccaccggatgctgcgcggcggtggaggtttcgcagacctgcatgaacacgcccttggcctcgggatgttcgcggagcgcctgttcgacctgcgcgggcgtcacggcctgtccccaggccacatcgatttccacgaccttaagcccgcgtacggcggcgattttggaccagcgttcaccgaatttgccgccgttcaccacgatgacggtttcgccgggcaggaacaggccgtgcacggcggcggtcatggccccggtgccggagcaggaaagcgggagcaccggctgttcggtgccgaacagcttctggagcatggtttcggtttccagcaggattttcttgaagccgggcttccggtgatggatcatgtcctgcgcgagggcgaggcggacgcgttcgggcagaggcgtggggccgggagtgagcaaacggggcttgttgaacatgatgtctcctgtcatgcggacaaatttcgcggcgcggatcagtctttccagacccgcaggataaagactttgagataggccgtttcgggcatggacggatgcaccggatgatccggcccctggaagccctgatacagcagttgcgtgttcaggcccctcttggcggcgcactgggcgatcaggcggcgcagcgcttcggcctcaaggtggtgcgaacaggaacagctcgtaagaatgcccccgttttccacgagttgcaagcccagatcgttgacccggcggtaggcgttgaggccctgttcggcgtccttcttgcgcttgatgaaggccgggggatcgacgcagaccacgccgaatttccgccccccgtcgcgcagggacgccagcgtgtccagcgcgtcgccgggcagcgtctcgccggggcatccggcgttggcggcaaggttgcggcttgccatgtcgagagcctgtctggaggcgtcgaggaacgtcacgcccgccgcgccgttccgggccgccatgaccccgaacgcgcccgcgtagcagaaggcgtcgagcacggtcttgcccttggcgtacttggcggcctccacccggttggggcgctggtcgtagaaccagccggtcttctggccttccgccagcgagacggtaaaggctgcgccgctttcccgtacttcgatttcgtccggcaccgtgcccatgcccgtttccacgagcaggggcaggttttccatcgtccgcacgcccacatcgttgcggagcagcacggctttgggggtgaacagctctccgagcacttcaagcagggcatccttctgggcttccatacccgccgtggtgatctgagcgctgaatacgtcgccgtagcggtcgagcacgaggccgggcagccagtcgccttcgccgtggcacaggcggtaaaagggcacgtcgaacagcgtttcgcgcagctgcaaagcccgttcaaggcgttttttgatgagggcggcgtcgagcggctcatcggccttgcggctgacgatgcgcgcggcgatgagcgaagcggggttgacgtaggccgtcccgatggtacgcccgtcggcggcgcagacctgcgcggcctcgcccggcgcgaacgccgtcagcggggatcgtttcacgtccacttcgttgctgaatatccacaggtgccccgcccgcaggcggcggtcttcgtgttttttgaggaaaagctgttgcatgggtgtcctttggagagagaagggtgaaaggcgactggagaggggagggagaacccttctggagaagggttctcc

SEQ ID NO: 7532 - DNA, 840 bp, Unknown
  gut microbiota DNA sequence
gagcggcaaccccgtgatccccgcccagttcgcccatatctcccatcccgcgtagaacggcgtgttcccggcctcaggatgctcatggatcagctcacagttgcgcaacgcttcgggattctcgatcagatcatgctcccgcgcgtaacgctgggagcatacgggcaacaggttgtcccgcagaagcggcgtcgcgtgcagcccgtcggtaatcgagtcgccgcaatagatcgccacatccgcgttgccttcttcattctcataactgatgaggtcgttgccgctgcgtatgtgcagggaaatgttgggatgctcgtgctgaaatcccggcagcagcggcaacagccagcaacccgcgatggaaggggcgcaggcgatgacgagatccccctgcagctccgcctcctgaatatttctgatggtttcgtggatctgcttgaggctggcgtccagcgcgccgtacagcgtcttcccttcttcggtcaggatgatcttgcgcgtcaggcgatgaaaaagcggaaaacccagttcctgctcaaggcagcgtattctatggctcaccgcactctgggtgatgcacagatcctcagccgcctttgtaaagctcatgtgcttggctacgaccgtaaacgagtacaggaattgcccggacacttggagtttattctggttcatgcattcatctcatgaatgggcggataaagattttgcgtttgatagaattatcacattcttctataccgtaatcataagttcagcagaatccatagataaccaacttttttcaagtctcatcctatccttcaagccagcctttggcaaacaagctttcccgcttcg

SEQ ID NO: 7533 - DNA, 563 bp, Unknown
  gut microbiota DNA sequence
aaactttctccagaaagtttctcctccccctccccaatttcttctcgctctaatcgtgattcggggtggagttgatggtcgcttcttcgtcggtccgttcgactttgaaaatgacggggcgcaggccgtcgttgcagctgcatatggctacgcccggcttttcaatccagtcgccgtaatagaattgtccgctgccgtgcgccaaggcgaaaacatactgatagatggccttccacgcttcatcacagaacccgtccggcttggcgtagtcggcgtaaaatatttgcccttccttgagcatcggacacttgccgattcccttggagccgtattccttggccagttcctcatcaaaatgccgcttgaggacggtgatcctgcatcgtttcatgtcgcctccgtgatgtgttggaaaaggcgtctccgggaaactgccgccaagggacagcccccgcgatcccgaaatcatattctgtcccatttatgaaagtctttgaagaggaagggggaggtttggagggggaaggggaaactttctcagaaagtttccccttcccccctcc

SEQ ID NO: 7534 - DNA, 5546 bp, Unknown
  gut microbiota DNA sequence
aatgcagcttcctgaaaatggtactgcggttgaccttgaagacctcggcgactttttggacggagccgtgcaccttgagagccttacggaggatgccgcgttcgatgtcggccatgatgtccttgagggggcgctcgtagttgatgccgtcgtcggggaaaaacagctcttcattctcgttgccggtcatgtgccggggcaaatccttgacggagagcgggccgtgatccttggtgatcacgatgctgtgcatgaggttctggagctcgcgcacgttgccgggccatgaatactggcgcagggcttccatgaggccgggcgtaaggttcatgtgtttgcggtacttggaagtgaacatgttcagaaaatgcgtcacgagaggctggatgtcgtcagggcgctcgcgcaggggcgggatgttcaccacggccacgttgaggcggtaataaagatcgcgccggaagaggcccttttccacgcgttcagccaggttgcggttcgtggcggcgatgatgcggacgttgaccttgcggggcttggaggagcccacgcgcatgatctcgccatcctgaagcacgcggagcaaacgggtctgcatggcaaggctcagttcgccgatttcgtcgagaaacaccgtgccgccgtcggccatttcgaaatagccgctcttgcccttgttgcccgcgcctgtgaaggctcccggcatgtagccgaagagttccgactcggtgaggctttcggaaatgccgccgcagtccaccttgaggaacatcttttccttgcgcgggctgagttcgtgggtgaggcgggccaccacgtccttgccgacgcccgtttcgccgaggatgagcaccgtggcgtcggaactggcgaaccgctccacaaggctcatgacctctttcatctcgcggctttcgaagacggggacgagttcgcgggtctgttcgcgggcaaggaaggcgagacggtcgtggaactgttcgatgagtttcttctgggcggtcatctcctcctgcagctgggtcaggacggtgatgtcgcgggcgaaggtcacgacaaggcacaactggcccttgtcgtcgaaaacgggatagccggtcaggaccagacgcttcccgttggcgagctgctggacgtgggtggccgatttcccggtttcgacgatctgcggattgacgaccttgtcgaaaatcccctgctggacgagcgtgcggatgttcttgccccggatttccccctgcctcaggccggtcagggtttcgtacattttgttgacgaacagggtcgtcccctccgcgtcactgatgaagacgccatcagagagggtgtcgaggatactttcaaaatggggagcaagagacgtcatcgaagtgttttccataggcatcgcacgagaaataaaatgattgcagggaaattggtttctcatgctagtgcctgcacgcaagaacgtcaaggcgtgtgtggaaaggggacgagtggacggaggggaaagcaaaaacccccgcccggatcgccggacggggatttctttcgaaagggaggagcggaagcttacttcttttcttccgtcacggcaccgcgggtttcgtcgacgatccgctggatgcgctgcgcgacgccgtcgggcaggctgacgtcgcccatggcgtattcacggctcaggaagtcgtacttctgggttcccaggcggtggtagggcagggcttcgtaacccacgttctcgtagcccttgaggaactcgccgagggcgtaggcgaactcgtcattgtcgttgaacccgggaatgatgggcgtacggacctggacatgcaggttggggaattcggtgagcagctttttgaggttgctgaggatcaactcgttgccgacgccgacgccttcgcggtgcttttcgctgtccatctgtttgacgtcgaacagaacatagttgaggtacggagcggcttccttgagggtatcccacgggatacagccgcacgtttcaatggcggtcttgatgcggcgatgacgggcctcccggagcagcgggagggcaatgtcggcgtgcatgaggggctcgccgccggaaagggtcatgccgccgccggagcgggcatagaacagggcgtccttttccacttccttaaggatctgatcgacggtcttgttttcgccgtagatgatcatgccctgtgcgggacaggcgtgggcacagtcgagcgtcttgcagacgtcgcacttgctgcggtcgagcgagagcgtgccatcttcgttgacggtgatggcgtcgtgttcacaggctttgatgcaacggtggcagccgatgcagcggcccttgttgtaggcgacctgcggatgcgaggcctgggattcggggttactgcaccatttgcacgacagggggcagcccttcaggaagacgatggtccggatgccgggaccgtcgtgaacggaatatttctgaatattgaagacggttccggtcgcctttctatcttcaaaggaacccatggactacctctttttctgagcgttagagttggaaatggcgggccagataattccggcccgccatttatttaatcattcatcttgtgtgccgcaagcggccagaacttacatctggtcgtggccggtacgggcgatgaggtcgttctgcaggtcgggggtcaggtcgacgaagtaggcgctgtacccggcgatgcggacgatgaggttacgatacttctgaggatccttctgggccttcttcagggtatcggcgttgatgacgttgaactggatgtgccacagcttcaggtcgcaccaggtacggatgaactgcaccagcttttcggtaccggcatcgccttcaacgcacttgggagtgaacttcacgttgatcagacgggcagcgcgggcgcgcataccgtagttcttcgtgttgtggttggagagcaggatggcggtgggaccattgtggtcggcgccgtgagacggggaagaaccgtcagccagcgggaaccacgccacgcggccgttcggggtagcggaaacaaccttaccgaagggcacgtgagaggtgaagggcacgtaacgggcgtcgttgttgatgcccatttccttaccgtacttggcggcgaaggacacggccatgcggtcgagttcgcggccgatttcgtcggcgtattcgtcgtcgttgccgtagcagggagccgtgcggagaagctgctggatgtcttcgtagccttcgaagttggcttcgagagcgtcgatgagctgatccatggtgagctttttgtcttcaaacacgagcttcttgatggcggccagggagtcgatgacggtgccgaggcccatgaattcaaagtagccgaagttcaggccttcggggatctggggctgatgcaggtcgatgcagtgcttgcggcagagagcgtgcagcacggagcccatgggctgggcgaagtgcttggcgcgggtctggataacaatgtactgctggatgaacgtggtacggagcaggagcatgtgctgctgcacgtaggcgttccagaattcgtcccagctcttgaacttgcgggcgtcgccggtctggatgccgagctgcacgtcgccgtacttcttcatcttgccgtcgtacagagccatttccacagcggaggcgaagttggtgtaagcaccgccggaggtgtaggtgtcgcggttgggcatacggatttcgatgcagccggacacggcgtagtcaagggcttcttcaaaggtcgcgcccttggagacgtacagcgggatgcattcttcgtcgttgcacagcttggggaagccggagccgaacttgatggtttcggcgacgtcccacaggtagcgttcaggagcgcggctgtggatacgggcggcgaggtcggggtagtgcagcgggaattcgcgcttggacttcaggaacaggtaggtcagatcgttggtcgcgtcgcggccgtccggggtctgaccgccgatggtgacggcttcccagtgagcgtaaccttcgttgaaggcgccgccggcgggggagatgtacatgtcgatgaattcggccatgccgacccacatgcattccaagtattccagggtcttttcatcggtcaggatgccggcttccatgtccttcttgtagaagggatagaagtactggtccatacggccgttggagatggtggtaccggtcttctgttccagacgggagaacatctgggtgaagtactgggactgaacggcttcgtagaagtcgcgagccgggttggcgggcacgtgttcggcgttttcagccatgcggatgagttcggccttgcggaccggatcggcgcaagcttcggcggccttgcgggcggcgtcggcgtggcgcttcgcccacagaacgatggcgtcgcacacgaggatggtggcttcgatgaagggacgcttgtccacctgatccacgggggaggcgggatcaagagcggccagcttttcttccatttcctgcttcagaccgttgaagccgcgcttcagcaccacttcgtagtcatgcacccactggatggaggagcggaaagaggaggtttcgttgacgatgaagcgggagatcaggccgtcgggatcgtcgtaggtcagcttgtggacttcggcgggaagagccttgttcagagcttcgtgataggtgcggcccttccagaaaggagcgatctgctcaaccacgatcttggcgtcttcggggctgatggaagccggagactgcgggcgggtgggaaggtcgcgcacggcgatgtcgaggaagtcgccgtcgagttcggggtacaggatgccgtaacggccgtcatgaccaccgcagcggccgaggaggagctggtcgtcctgcaccatgacggtgatgttcttggcaacgttcatcagagccttggcccagcggagaaccagaggctgacccacggtttcggccatggactgcgtgaagtacagagcgcgttcgacgtcgatagcgggcttctggccgtcgaaacgttccagcagcttgaacacgcgcttgtgggattcgcgatagatgtcttctttaccggcgatgttgtcttcgagacgctgctcatgaggcgatttgatttcagctacctgagtcatgtcacttctccgtgtaggaattaaggttgtgtagtatgatgtgtggagctttccggcggaccgctcggaagttctcgttcccttcttcacttgtcttgcttataataaagcaagtgccgtgccagaggggttataaaaaatgtttacttgttatttcatggtattgtgatagagagcgttttgaggcgtttttatgggaagggggaaagtcgcaaaattgcatcacttatcaggaataatccgcaaatagcgggaatgtgatgttgcatttttgcgacagggagaggttttcctgcaacctctgtccgtttttacgcagcgaaagagaatagttcctgacaagggtttttatcttattgatattatatcagaaaaaactccctttgatggaacggagttggctggaggcggaaagtatgatgcaaaaatgcgacaccaaagaattctatcttgtg

SEQ ID NO: 7535 - DNA, 137 bp, Unknown
  gut microbiota DNA sequence
ttccatttgccgggcagacgtttctctactatatgataagcaggtatcgccaaacgtatcatatacggtgtcagaaatgtggtaatgaccgaaacagccaccacaataggatataagaaatcactggttactttcag

SEQ ID NO: 7536 - DNA, 1304 bp, Unknown
  gut microbiota DNA sequence
aaggccctttctccagaaagggccttcctccccttcccccaaccccatcccctccatccccaaagacttttgtgtttatcgaatccctgtccgcagctttcctagcacaagtgaccgcatggtcctttcaaggggtgaggatctgaatgaaggaagtatggcgggagatacgggagtcgctggacatcggccgttttgccggctcgttccgggatcggtgggtctggctggctttcctgctcgggggcatcgggctgctgttcccttcgggcggcctgcccccattgtggcgtctggcattcgcggccatgactgaggaattggcgtaccgcgccctgctccagcgtcagcttgagcaatgcgtgccgggcaaatgggggctgtttacgggcggcatgttgctgacatcggccctgttcgcgctttcccacctgccgacgcatacgcccctcatggcggctttgacgtttttcccttcgctcgccttcggggccctctggacacgccaccgctcgctctggctctgcgccgccgtccatttctggtacaacctgcttttttttctctagagccagttcatatcccctacatgcggatacccgcccggcttcgaagaaggacacgataaaaacggaagcattggaagggaggggtgcgcgccggcagcttcgggaaacggaggaggcccctttcccaagaaaggttcccctgcctccccaatcgcctcagaccatgaacaattcaacgccgtgctcgtgaatgagatccgcccacttcttgtcgatagggccgtcggtgaacagcgcgttgatgtcggaaaggtgcgcgacgcgaaccattgctggccgcccgaacttggatcggtcggtcacgaggaacacgcggcgggaacattcgatgatggtacgggccacggcgacttcgcggtagtcgtaatcaagcaggttaccctcctcgtcaatgccggaaatgccgatgatgccgtagtccacccggaactcgcggataaaacgctcggcgctggccccgacgatgccgttgtccctgtgccgcaccgtgccgcaggcgaccactacgtcaaaggaggaattgcgggcgcagatggaagccacattgatgctgttggtcaccacgcgcaggttcttgtgctcaagcagggcgcgcgccgcctcttcggtagtggtcccgatattgatgcacacggaaacgccgtccgggatgtgcgtcgccaacagagcgccgatgcggcgcttttcttcctggcagatgcccttgcgctcatcgtagacgatgttctccgaacc

SEQ ID NO: 7537 - DNA, 9300 bp, Unknown
  gut microbiota DNA sequence
aagcgctgcacttttccctcttcggcgagcgcgttgatgtctttacgaaccgtctgcggcgtcacttcaaaatgccgggccagatcctcgatggtcgcgtagccgcgggccgaaaggaactcctgcaaggcctgatgacgagcggaagttttgctcatgtgtcctccctgtgctccccgcttttatcctgttcttcctttcggttcaacaggctgtggggaaacgtcaaaggcaatccggctggacaggcgcacaaagtctccgtatggtaacgcgctttccaacactgatccccggaagactgccatgctcaacaagaaatgttttgttctggatctcgacggaacggtctacctcggcgatatccccattcaggaaaccgtcgacttcatcctccgccactgggacaccatcgatttccatttcctcagcaacaatacgtcaaaggccccgacaacctatgtcaacaagctgacccggatgggtatcccggcgacgcttgaccgcatcctttcgccggtgacgccgctcatcgcccacctgcgggcgaacggcatccgcacggtgtaccccgtggggaaccgtgacttcgtggcgtgcctgcgcgagcgtatgccggaactgaacgtcctcggctatgacgtatccgaaggcgcggaagccgtcgtgctggcgtacgacaccgagctcacctacgaaaagctcacccacgcggccctgctgctgcaaaatccggaagtcgcctacctcgccacgcacccggatctcgtctgcccttccccgcaagggccgctcccggatgcgggcagtttcatgtcgctgttcgaaacagctacgggacgccgccctcaacatatcttcggcaaacccgaccccgccgtactcagcacgcttcttcaatcctatgacaagaaagacatggtcatggtcggcgaccgcctgagcacggacaagaagctcgccgaaaacgcgggcatcgacttcatcctcgtcctcagcggggaagccaagctcagcgacctgcccggcctcgaacgccagcccacgttggtcgtggacaacctcggccagctggaaagcgcataaagcggaacacgatcccgtctatacgcacgggggaagattcctgtacagcactcatattacgcatacaaaaaggccgctttccctgaggaagcggccttttcatactgcctttttggagcgccagcgggctattcggcatccttctgagcggcgcgggcgctgttcagggcggcctgaagcttggcttcgtcctcgtgggacaacgaggactggagaacggtcccgcctgtgccgcgcagggcgtcgagcaccttgtcggtgaggtcggagtcgaccaaaacgaacagggcggacgtaccgggcgtcagcttttcagcaagctgcttcatgaaatcgtcgttgatgcccacgtcgctcagcgcaccggcgacggcaccggctcctgctccgaccacgaggccgagcagcgggttcatgaagatcaggccgatgagcacgccccagaaaccgccgccgacagcgccgctggcggtcaggttgtacatctggtgcagcttcaccttgccgttctgttttttttcaacaaccacggcgtcctcaagggaaaccagatacgacttttgcattttcaggaactgaaggcgcacttcctcggccttgaattccgtatcgtatgtcacagcaatcagtttacgcatggaaaaacctcctgattcgttttgtgccttgcgcaaaaggtgccgcgaacgccgggaaaccgccattatatatccctttagagttctgagagctttggggccgaacggtttcctcaatgttttcagagaagggcggacgcaaaaaatacgcctccgcccggcagtgccaccaagatctccagcgtcccttgccctccttttcccaaaacagagggagcggattccgttttcccgaccgcaaaaggggcccactgtccgggctgtaccggagacgccgccgcaaaccatgttcccacacggcattgccccgataaaaagcgggaacccggacgttcttttccttgtccggcgcttgatcatctttgaactttcttgcatggtaaaggcgtagcacggaacggcaagctccgtgcggaacccttttccattgcaacaggcttgttgcaatacaacagcaaagagaacaaggagatgcgtttcccgccgggagaaccgcgcttgcacgcgccgttccctgcccctccgggccgccgcttatacgggaaacgccatcatatcccggaatattattcggcaaaacgcatccgcaggaggagccatccatgtccgcttacgctgaaatctgttccatgttcgaacaacggagaaaagtcgaagaagaatacgccagcgcggcatacagccagctgctgaccttcgtggagcttttcgaattttacatcggctgccagcaaccggatttggtggttcccctgcgcatcgacgaatgctgcaaccccttgccggatcagaccgcccctttccgcatcgtcgacaacaaaatgatcgccgccgtttgtatccgcacggaggacaagaacgactgcacatgggtccccgtcagcgtcaagcccatctcgctggtggaatgtttcatggaaatcggctatggaactgaccgcgtcaagcagttccacgtgaacttctcctacggcgccatcggcatcaagcagacgagcagcgacaacgcgctgtcctaccttgaagccatgttcaaggaagaagcctcctttaatccgttccacaccaaggacgacactaacgaaatcgggtagcggcatgaccggcggggcctctcgcggccgcccctgcccgtcggaaacgccatgtcagaacaaaccgaaaagaaaatactctctccggaacaggcggtgcaggccgcctgcatcctcttcgaactcaacacccgtgagcaggacctcctcgagatggcccagcgagcgggtgttccctgtggcgacgacgcctcccgcagggccctcacccgcgaatggtacggcttcgttcacgccgccgtggtgtacggcctgatggcccaggcctccaatcaggtcatggccgaatatctgcggagcacccggacattgttgtcgcaaatggccgggtacacccccgagcagatcgaaagcttcatcgacgacacgttttccagctatatccggctgatggcccagaaccagcagaagcagtgcccctcactgttttaccagcggctggtcggcgaaggggccctcgaaaccctacctaaagagcgggtcgcgttcctttccggcatgatggcgatcaccatgtgcgccatcctcgacaagctggggcagtacgaatttggcgttgaataggatgatatcaggggaggggcccttctggagaagggtcctctctcccctcccccgagcctcctctctcccaatcttttcaacgaatgggaggccacgcgacgggagttccgttgggcggcttttttctttggaatagggatacgacggataactcattgccccacaatgggagtgggtggatcccgagtattttttcaaaaagtacacagagttcacagcaggtgaactcaaaagtatgcaaaggccgacacaccgcataatggattgcattgtgtcgaatctgtaccgaaccagtccttccaccgaaaagaatccgctggatgccgttgccaaaagcacggcttgcggctatgctccgatcatgatcccatccttcacagaccgcctcttcttttccccatccatagcgggccgttccgtcccgtgtggtctgtgccctcgccttacacccgcaaactgtcttcccccctgagcaccttacgtgctccggtgaggtgacaccggacttttcccccatccatgcgcattccataccgagtatggaagcgcccccgagcaactagggctgcatgtctttaggcgtgcgcttcgtcctgccgcatcctcactctatgcgtcaggctatcctctacttgtatcttgtgaggaccccatgaaaaagttcctgctccccgctctcgccgcaacgctccttctggccgccaccgccgtggccgccccccttgatgcctttaaaggcatgaaaggcactctggatatcgccggaggcaccgcccatatcccggtcatgaaggaagccgccaaacgcatcatgaccgccaatcccgatatccgcatcaccgtggcgggcggcggttccggcgtgggcgtacagcaggtgggcgaagggctcgtccagatcggcaacacgggccgcccgctgaaggacaaggaaattgaaaaattcggcctgaaaacattccccttcgccattgacggcgtcgccctcgtggtcaatcccgccaacaacgtgtccgacatcaccgcccagcaggccgccgacatctacaacggaaagatcaccaactggaaggagctcggcggaaccgacgcccccatcaccctgtacacccgcgaagacggcagcggcacccgcgaggtgttcgtggaacgcgcgctgaacaagggctccatcgtgcagtccgccaacgtggtgaattccaacggcgcgatgaagaccgccgtagcgcaggacaagcagtcaatcggctacgtgggcatcgggcatgtggacaagaacgtgaaggcgctcgtcttcgacaagatggtcccctcgcaggaaaacgcctccaacggcacgtataaagtgacccgcctgctgttcatgaacaccaagggtgcccccgaagacatcaccaaagccttcatcgactacatctacacccctgaaggcactgaaatcatcaaaaagagcggttatatccccaccggcagacaataaccgcttgccatgaagcacggggaggaaccagcctcccctcacctttcatgtcctcaatacattcatcccctgatgaaccgtagtgcccggcctcgtgcacactggcgttggcgtccccttctccccccccaaaaaaacggacgccaacgccaccttccacttcctcagggaaaaccggcatcagggctcgataaaaacgaacgtctccggaggggaagggatgggcgcgagctgcgctggcaatttagggagggaggccctttcctccaaaagctccccccttcccccagtaacctctccatgcacctcaacacggacggcttgatgaacacttcactcacggaacgcggcggactccctctgctggcggcatggctggccggggcttccgtgtgcgccgtcttcgccctcatcgcctgcttcgcactgcccgtcgtgttcagcgcacaggggggccagatattcagctgggtctggcgtccggatacccacgaattcggcatcctgcccatgatcgtgggctcgctcctgctgtccgtctccgccctgctcctgagctggcctctcgcggtcggcgtggcctgtgccatacaggacggcggaaaaaaacgcctcttcggttgcaccgtcgcgggcatcgtccgattcatgaccacgatccccaccgtggtttacggcttcgccgccgtcttcctgcttgtccccgtcgtccgcgaggctgcggggaaaggctccggcctctgctggctctccgcagccctgatgctcgccttgctcatcctgcccactatggtcctggtcatggattcggccatgcggacgaaggaaagaaacgttcgcatcaccgccgcggcccttggttttacgcgctcccaaacgctggcctgcctcgtgctccccgcctcccggcgctggctgctcacggcggctatcctcgggttcgggcgcgccgcgggcgatacgctgatcccgctgatgctcacgggcaacgccccgcacgtgccggaatccctgttcggcagcctgcggacgctgaccgcgcacatggggctcgttacggccaccgaagtgggcggcccggcatacaattccttgtttgtggcgggcgggctgctcctcctcaccagtgcctgcgtcagcctcgcgttgcgcaagctggcatccgaatccggcgaacagctccccgagccgcccgctttctggagacggtacgcgccttccgccctccgcccgttgtccatcgtttcgggcgctaccgtcgcctccgccatcgtgtgcctgctcggattcctgctgtatcgcggcctgcccacgctcgggccgtccctcctcttcggagacaccccgccgctccgcgccctgctcggaaccctgcccgtttgggacggcatctggcccgcctacgccgggacattctgcctcattgtgacgaccatgctcctcgccatcgggcccggcatcggctgcggcatctatctcgccgagtacgcctcgccttccatgaaacgcctgttcggtgtgattatggacatcctcgctggcataccgtccatcgtcatgggcattttcggctttacgctcatcctcttcctgcaccgcctcggcgtcgccggagccagccccggcattctgctcgcgggcggctgcctcgccctgctggtcctcccttcgctcgtggtcacaacccggacggctctggaagggttgcccgcctccctgcgcctgacggggttcgcactcgggctgacccgcagccagatagtccgccatatcctcgtgccgcaagccagccgtggcatcctcggcggcatcatgctggccatgggccgcgccgccgaagacacggctgtcatcctgctgaccggcgtggtcgccaacgcgggccttccgtccggcctcgccgtgcgcttcgaggccctgcccttcttcatctattacacggcggcccaataccagacgccggaagaactcgaacgcggcttcggagcctcgctgacgcttctgctgctttccgggggccttctgctcgccgcatggtggctgcacgcccgctatcaacgccgcaaggacgcctgttccctgcgggagggagtttccgcatgacgctggcagcacgcatccgtcggctttccgtcgcctttcacgaacgcacaatcctccatgacatcactctggacatcccggccgagggcataaccgtcctgctcgggcgctccggatcggggaaaacaaccttcctccgcgccctgaaccgcctgaacgaatgcctgcccggctgccggacgtccggcgaggccgaactccggttaggcggcgaactccgcccgatctatgccggacgcacgggagaggccgcactctccgacctgcgccgccgcgtgggcatggtcttccagacgcccaacatcctgcccgccagcatccggcagaacatgttgctccccctccagctggcgacagccttccccgcttcggagtggcgggaacggatggaacgcagcctgacggaggtggggctctggcacgacgtcagttcacgcctgcgcgaaccggcttcgatactttcgggggggcaacaacaacgcctctgccttgcccgtacgctggcgctcgaaccggaaatcctgctcctcgacgaacccacggcatccctcgatcccgcgacaacccacaccatcgaaaacctgctcctcaagctggcggagcgctatcccatccttctcgtctcacatgggttgccgcaagccaaaagaatggcctcgcggattgtccagtttgggaaaggacgtctgcaaggtatgctctcgcccgaagaactccccaacgaagcagagatgaaccgttttttcgacggcgaggacgctggaaatcgttaagagaaaaacgtacagctcccccttttctcatcgaatggaaatctgccttgcccttagtgccccgcttctccaacctgtggcctccacgatacaaaaaaacgcgcaccccaacggctgcgcgtttcttcattgcttgttagcatccctttaccactggtctatccactcgcgcaaaagcgcctgtccggtttctttggcgctttcacccgcacgtttggtctcatcgcgcagacggcgaggatcgattgcggcgcgggccaactcacaggcatgtccgacgaaccatctttccagcttatccgcatcgacctctggatgaaactgcaatgccagcacatgattgcccatgcggaatgcctggtgcggggtcacgggggtggaggccagcagttcagcaccttcgggcagatcaaacgtatctccgtgccaatgcagaaccggacggtaaccatcgagaaaacgcaaaggcgactttctgcccgcttcggtgagttccacgccgccccagccgatttccttgcccttgccggggtatacgcgggacttgagcacggaggcaataagctgcgcccccagacagatgccgagcaacggcttttgtgattccagacgcttcctgatgagatctttttcatctttgagaaacggatagagaacctgatcataaaccccgatggcgcctccgaggaccacggcgagatcagcggccagccattcctcttcggtaggcggttcgtctaccgggcaatatcgaatggcaaaacctttttcttccagcacaggcgcgaaagtacccagatcttcaaaggcgacatgctgcataaccagacactgtttcatatgatacgcctcctgcgccgcgcgcccttatcccccagaccgcacaggcttttcatttagattctattgattttactccatttggcaagtctcattcaggttcttttttccaccgggaggccattcctctctggttttccggcttccttttctctatgctgtgccccacggcagcatctcaggccagcccgcaacccgcacaatccaaaggacatcattctatgaatcgcattctggtcatgcacggcgtcaacctcaatctgttcggcaagcgagatcccaaacattacgggacggaaacccttgaagacatcaacggcaaactttccgcactcgccggggagcttggggtagaggtttcgttttttcagtcgaattatgaaggcgcgttcgtggaacggattcaggaggcgcacggggacggcacggcgggcatcgtgctcaacgctggagcgtggacccattacagctacgccatcatggatgcgctggcgatcttgagcattccggccgtggaagtgcacatgtccaacgtccacgcccgcgaagccttccgccacttctccgtgctttctgccgtaacccgaggttccatcgccgggttcggcagcggcagctatctgctcggcttgcgcgccgttgttgatttagtgaaagggtgacgggtggaaggaacttgtgggggaagggaggggaaacctttctggagaaaggtttcccct

SEQ ID NO: 7538 - DNA, 1550 bp, Unknown
  gut microbiota DNA sequence
cggacggtttccgtccggggtgtttgttttcaaagaccgcttttcactcggcagccgttcccttttcagaggcaacggccgcacttgttttttgtccatctccgaatttctaccgcttcttcttgcgggccgcgttcttttccggcgtggcgggatgtgatgtgatttggggattgtcctcgggttcaggaggaagcggtggagggttgggggttccgaggtatttgaggaagaaggcggcggattcggcggccatttttgcctgtacggccttccggcgcgaaggggagacggcaaggcacatttcaggaagcgtctgatccagattgccgccgcaggatgacatcaggctggctgtatccgcatcgggcaatacgccgagctgcggaggctggggcatggcgctcaggaggcgttccgcgtgctgaagggtatagagaggcgtcctctcggcacgaagcagcagaaggggaatccggatgcgggacaggctggcgggagtgaacatcatggcataggaaggggaaacggcggctgcggcgcggacacgcctgtcgcggtagggtgcggaaaggttgggagtggtggaaaaagcccccatgcgctgccgtgcccacggcgtgcagtatggatcggcgttttcttcctttccggcgcagtagatgggccaaccggtcgcgtccagccgcgctccggcgatgagcatggctgccgtgcctccggggccgacgccaaggacgccgatgcgatcgggatcgatgagcggtgccgtctcgggatcggctagggcgatgtccagtgcctgtgtgagctgcttggcccggtcggtcacctgcacgggcatgaaaagggctcccatgtcgtccacattgtcgccgggatgcgtgaaggccaggacgacaaagccgttgcgggcgagttccgatgccagttcatgcagggaaaagcgtgagcccgcgctgtcatgggagagcaggatgagagggtgttttccttccacgggaggcctgccgcgtgcggcggagaagttccagtctccgtaattgacctgaaagggcgcggaacggctggggtaccagacggcgaagtccagacgcacgtttttggctggatcccagatgccgagggttttaaagcccggttgaagaggcgctgcatacgccgtgcaggtcagtatgaggaacgcgagcaggaaaaagagaaaacggcgcgtcacgatggctccggtatctgctgaggaaagggaacgcggttccctttgaggtttgtcgggaagggcggggcgaaagtcccccgttgcgttttggcaccctaccgtgaatgatgagaaaagggaattgcggagaaggtggcagggggaacgggcggctcgccttttcatcagtacgagtcggcccggtccagagtattccatctttgacctgtatgctgcttcaaacggtaatccgccttggggaacgctggaaacagggattcgataaacacgaaagtctttgaagtggaggggtggggtttggggagggggaggagaaactttctggagaaagttt

SEQ ID NO: 7539 - DNA, 5916 bp, Unknown
  gut microbiota DNA sequence
agggagggggaacctttctccagaaaggttccccctcccttccccaattccccttagttcttcaagctgtggatcggcgcggggatgcgcccgccgaggctgataaaggtgctggcgtcgccgccgggcacggggatgatgtcggcttcgccaagcagtccgccgaagcaggctttttcgccgacgccctttccgggcacggggatgacgcgcacggcggtggtcttggagttgatcatgccgatagccatttcgtcggcgatgatgccggaaatggtggcggcgggcgtgtcgccggggatggcgatcatgtcaaggccgacggagcacacgctggtcatggcttcaagcttttcgagggacagcgcgccggaacgggtggccgcctcaatgctggagtcctcggaaaccgggatgaacgcgccggacaaaccgcccacatgggacgaggcgaacgcgccgccctttttgactgcgtcgttgagcatggcaagcacggctgtggtgccgggcgcgccgatggaggacaggcccacgctctggaagatttcgcccacggagtcccccacggcgggcgtcggggcaagggacaggtccgcgacgccgaagggcaggtcgaggcgctgggccacttccttgccgatgatctcgccgacgcgcgttaccttataagctgtgcgtttgatgacttcggccacttcgccgagcgtgaattcgccgggcttgtggttttccatcgcgcggtcgatggctttcttgaccacgccggggccggaaacgcccacgttgatcaccacatcgggctcgcccacgccgaggtacgcgcccgccatgaagggcacgtcctgcggaatgttggcgaacaccaccagcttggcgcagccgaggccgtcacggtcgcgggtggcttcggcgacatcaaggatgcgctggccgagcagggccacggcatccatattgatgccggagcgcgtcgaggccacgttgatggaggagcagatgcggtccgtggtggcgagggcttccggcagggcatcgataagattgcgctcgccgggcgtgatgcctttttccaccagcgcgccgaagccgccgaggaagtcgacgcccgcgtccttggcggattcgtcgagcacctggcaagcccgcaccatctgatcgcgggagaaggacgcgcccaccaccccgatggggctgacgctgatgcgcttgttgacgacggggatgccgaacttgtcgcccacttcgttgcaggtggcgacgagtttggcggcgtatttggcgatcttggcgcgcacccggtaggcgaacacgtcgaaatcgtggctggcgcagtcgaaaaggctgatgccgagcgtcacggtacgcacatcgaggtgttcgttgcgcagcatgttcagggtgctgaggacttcacgatctgtaagcatggaaacttcctccgggaagtttgttttgacacggatgggacctgcccgcctccttgaggggaacctgcggaaaggggagaggattgacctcggcctccgggaaaccccgcgtatgccgcttaaaccggctgcacgcggtgcagggcctcgaagatgtcgcggtgctgcatactgagctggaggcccagggtgcgggctttgtccttgagggtgcggcgcagggcgttgcggtcgatttccatcggcagggagatctcgaataccagcaaggcgcgcttttcttcctcaggcatgagagccttgaggttttcgatgtttaccttctgatccgcgaaaatcttggagaacgcggcgatgatttcaaaacggtcttcgccgtccaccgtcacgacgaaaggttcgctctcggcggaaccggacgtgtcgccttcttcaaaatcgcggatcgtaactgaaaggtgcatcccgcgggattcaatggctttggaaagctgggtgtggatggtgccgttgtccaggctttcctgtttgttggccacgaaaatggctgcaaactggttcttgagaatggtctggctcacttcttcgatattgcattcaagggccgaaagggtgctggatacggcgtagacgacgccggggcaatccagaccgatgaccgaaacaacgattttgctcacagatacctctcgcggcaggtctttggctttcccaaaataggggctcaacagcagggaaatcaggcggaaacattccgtcagtctcttttgccagccctcacccgctgttagcaagcaaaaagtttggtaacgaccggcagttccgtttcagcccccctgggaaacattttgactgtataaaaattccgctggaaagttttcgaaaaaggttatatggggagtcaatcttgtcgatgccgacagactttttttgattttcttattaaaagaaaaaggaggcactcatggtgctcgatccgaaaaaacacgctgactgggaaatcgctcaggatgccgaaacccgtatgaaaaccgtgcagcagcttggtcgtgatatgggcctccttgataaagagctcctgccttacggccatgtgatgggcaaggtcgactaccgtgccgtgctcgagcgcctcggggacaagcccaacggcaagtatgtcgacgtgaccgccattacgcccacgcccctcggcgagggcaaatccacgaccaccatcggcctcgtacaaggcctcggacgccgcaacaagcgcgcttccgccgccatccgccagccttcgggcggccccacgatgggcgtgaagggctcggccgcgggcggcgggctttcccagtgcatccctttgacgcaatattccctgggttttaccggcgatatcaacgcggtgatgaacgcccataacctcgccatggtggcgctgacttcccgtatgcagcatgagcggaattataatgatgaaaagctgctcaagctgtcggggatgccccgcctgaacatcgaccccaccaatgtgaacatgggctgggtcatggatttctgctgccagtccctgcgcaacatcatcatcggcatggacggcaccaacgggcgctccgacgggttcatgatgcgttcccgctttgacatcgccgtgtcttccgaagtcatggccattctcgccatcgccaaggatttgaaggacctccggcagcgcatgggcaagatcatcgtggcctacgaccgcgatggcaaacccgtgaccaccgccgatctcgaagtggacggcgcgatgaccgcgtggatggtggaagccatcaacccgaaccttatccagaccatcgaaggccagcccgtgttcgtacacgccgggccgttcgccaacatcgccatcgggcagagctcggtcatcgcggaccgcatcggcctcaagctgaacgaataccatgttacggagtccggtttcggcgcggacatcggctatgagaagttctggaaccttaaatgccactacagcggcctgactccggacgccgccgtggtcgtggcgaccgtccgcgcgctcaagagccacggcggcgcgcccgtgcccgtgccggggcgtcctctgcctgaggaataccgtaccgagaacgtgggcttcgtggaggcaggctgctgcaacctgctgcaccacatcaatacggtgaagcgttccggcgtgtcgcccgtggtatgcatcaacgcttttgtgaccgacaccaaggcggaaatcgccaaagtccgtgagctgtgcgaagcggccggggcgcgcgtggccctgtccacgcactgggaacacggcggcgaaggcgcgctggaactggcggatgccgtcatggacgcctgcaacgacaagaccgagttcaagccgctgtactcgtgggatatgccgtttaaggaacgtatcgagctggtggcccgcgaagtgtacggcgcggacggcgtggacttctccgccgaggcgtcccgcaagctggccgacatccagaaacgcgacgacgccaacgagcttggcctgtgcatggtgaagacgcacctgtccctgtccgacgatccgggcgtgaaaggcgctcccaagggatggaagctgcgtatccgcgacgtgctcaccttcggcggcgctggcttcgtggttccggtttccggttccatcacgctcatgcccggaacgggctccaatccttctttccgcagggtcgacgtggacgtcgataccggcagggtgaaggggatcttctaatctgcgtgagaattggaggaaagccttcgagcgagctttcctcctcatttttctagcttattcaaggtgtcaaaagtccttcctgccatagggcggcgatgcgtcgcggatatgtttttccccatcctgcttttgtgacctgtcagtacgcttgctttttcccctcctgattctatatgagaggcattccgggtgccgccgccaggggcgagcgctgcggagttcatccatctttacttcaggaattcattttccgggcaacatatggtcgctgacccatcaatccgattgcgcccgctggagcgggaagatctgccgtttatccatcagctggacaacaatgccagcgtgatgcgttactggtttgaggagccttatgaggcgtttgtggaactgacggatttgtacgacaagcacatccacgatcagagcgagcgccgttttatcgttgagcacgacagggccaaggtcgggctggtcgaacttgtcgagatcgattacgtccaccgcagggccgaatttcagatcatcatcgcacccgcgcatcaagggctcggctacgcggcgaaggccgttctgctcgtcatggactatgcgtttacggtgctcaatctctataaactgtacctcgtcgtggacacggaaaacaaaaaagccattcacgtttataagaaactcgggtttgaggtagagggcgaattgaagcacgaattcttcagcaatggagaataccgaaacgccttgcggatgtgcacgttccagaccgattatcttatgaaaaagaaagaacaggctgcacagtgggcctgacggacactctgacccaaggatattctatggcggacatcatcagcggcacggagatgagggcggcgattcttgacgaattgcgtcaggaagttgaggccattcgggaaaagcacggcacggttccggggcttgtgaccattttggtcggagaaaatccggcttccatcagttatgtgaccttgaaggtgaagacggcgttgtcgctcggctttcatgagattcaagacaaccagcccgcggacgtcagcgaagaggcgcttctcgcgctgatcgacaagtacaaccgggacccgtccatccacggtatccttgtccagcttccgctccccaagcatatcgacgaaaacaaggtcatttacgccatcgatccggacaaggacgtcgacggattccaccccgtcaatctgggccgtatggttatcggcggcgatgccgtacgtttcctgccctgtacgcctgcgggcattcaggaaatgctggtgcgctcgggcgtcgaaatggccggggccgaagtcgtggtcgttggccgttccaatatcgtcggcaagcccatttccgtcatgctcggccagaaggggcccggtgccaacgccacggtgacgatggttcatacccgcaccaaagacttggcggaacattgccgccgggccgacatcctgatcgtcgcggctggcgttcccggtctggtgaagccggactggatcaagcccggcgcaacggttatcgacgtgggcgtcaaccgggtgggttttaacgagaagacgggcaagcccattctttccggggacgtggattttgccgaagccagcaaggtagccgggaagatcacccccgtgcccggcggcgtgggccccatgaccattgccatgctcatgaagaatactgtccgttccgcgtggtatcacttggggcggtagcgtttgagatgaaggcacg

SEQ ID NO: 7540 - DNA, 3595 bp, Unknown
  gut microbiota DNA sequence
ctccctcccccggacccccacccgcaaaaatcttgactggtggggaggcggcgcgacggaagttccgttgtgccgtttttttgctggaagggctcttgcctgaatccttcacagctcattttttctcggaaaggctggcaaacagggacccgataaacacgaaagtctttgaagaggaggggggtgggggttggggagggggagaagaaacgtggggcccccttctccagaaaggttctcctccccttccccaatatcttcacatcatgttaaagccaatccgttctataagcgcagcagtttctgtacgagtttcctttcggtcacatgaaggcgcgaaagcccttcggcatcaaggcccgcaccgagggcggcggccttgcgcagtgcctgcgtgacgtcgggggattcaaagtcggctgaactggaagcgtcagagttgagcagcagttcgcagccgaagcgttctgccatgcggacgatatgcccgttggcgagacagtgccggggggccgtgttcagctccagcaatacgcccttctcggcggcgagttgggcatcttccaccgtaatcaggccgggatgcgctaaaatatccacgcccgcattgatggcggcgaggttggtccctgtctccaccacatcggcaagctgacgggggatgctttcgccgtgcgcaaggatcagcgcggcaccttgctcccgcgcctgccccacggcatcaggcagcagggcaggggggacatgcaccaactccaccccggcgaaagcctcgatgcccgcgtacagggaacaggtcttcaccagcgttttgagcgtgggcagcaggatcggcagggtcgagggatcggcccggacgatcaggccgacggcccggaatcccgcgcatttcgccagacgcatggcctccgagggcagcagtccgtcgcgcccgcccgagcagttcacatgaatatgaaagtcgaacatggtgttccttttccctgaagtgttatccccgcaactcgcctatcaaagaatgtttctttgcggtcacaatagtgacgggcacaatgaggccgggtttgccgactccggcaggcaaggagacgttgacggcgtcgccccacgggtcgcgtccttgccagctttcagtggcggcatcttcgccgtcctgtttgcggcttgccccttcaagcagaatatccgttttacagcccacgcgggccttgagccagtcggaggaaagatcctcctgtaaagcctgcaagcgttcgaggcgacgcagcttttcggcgggttcgaccttgtcggtgtggcggctggcggcggttccggggcggtcggaataacagaaggagaagctcgacatgaagttgaccgcacgtacggcgtccagcgtttcttgaaattgctcttccgtttcgccgggaaaaccgacgatgaggtccgtggacagggcaatgtcggggcgggcggcacggaggccttccacaagcgtcatgtagcgggccatgtcgtacttgcggttcatgcgggccagcacgcgatccgatccggcttggagcggcaagtgcaggcgcgggcagaggttcggaacttccccgaacatggcgatgacctctggggagagatctttaggatgcggagtcacgaaacgcagccgggcgagcccgggcagttccgacaccttacgcagcaggcgtgcgaacgacgtgtcgccggaagcgtgcttatcgaggccgtaggagttcacattctggccgagcagggtgatttccttcgcgccgttgtcgatgagcgcccggcattcgtcaaggatggctccggcgtcgcgggatttctgacggccccgcgtgaaggggacgatgcagtaggtgcagaagttgtcacagccctgcatgatgttgacgaaggccactggagggatctcgccttcaccttgcgcgggcagggcgggatcgcgttcggggtagatttcggaaaagtcggtgaggttcaggcgcagggaaggatctccatgcagcctttcgatggcgtcgggagccatggcgagcccgtcgccgcccacgaccagccgtacctgcgggaaacgctcaaagaagcccgcgccgatctgctgggccacgcatcccgcgaccacggcaaacgagccgggcacgcggcgggtttcatatttgatgcgcccaagcgcggcatagactttttgttccggtttgtcgcgcaccgagcaggtgttgaggatgacgacttccgccttttcaaggggcgattcgacgaacccccggcgttgcagggatctggcgagccaaaacgagtcgttgacgttcatctggcagccaaacgtgatgatatggaaagttccttgcgccatcgggagatgctccatgtgtcgcggtaaacgcgggaatgttgagggattcgggaaggaataaggcatcccggcatccggcgcaaccccgtttcgttgcgttcgggggtgcgctggcgtatcctatgacggctttaaaaggcaaacaaggagcgttccatgcggatcatacgggtcgaacacggcggcacatcgtattacggcatccttgaggacgggttggtgttccgtcttcaccagcagccggggcacatggaacccataccgctttccgaagcgaaggtgcttccgctggtaacgccttccaaggtcgtttgtgtcgggctcaactacaaggcgcacgctgaggagctcgggtatcccctgcccaacatgccgagttttttcctcaagccgccgagcagcattatcggtaacggcgaaccgatcgtattgccgtcgggcatgggccgcatcgagcatgaggcggagctggcgatggtcgtgggcaaggtatgccgcaacctgacgccggaggaggcggaggaaagcctgttcgggttcacctgtgccaacgatgtgacggcccgcgaggtacagaaggtcgatccgctcatcggccactgcaagtcctacgatacgttttgtcccatcggcccgtggattgagaccgagcttgaggatatcaacgatctttccatccgttgccttgtaaacggcgaagtccgtcaatccgcgaataccggggacatgattttccgtcctctggatttgctctgtttcctttcccgcgtcatgacgctgatgcccggagacgtcatccttacagggacgccgcccggcatttcgcccattcaggcggatgacgtcgtgcaggtgtccatcgaaggcataggtaccctctccaaccccgtcgaaggccccggtcctgaagagaagattttgcagtaggtgtggggaagaaaaggaagaagcctggagggggcggggagcctttctagagaacggttccccgccccctccaagccccccttccaaagattttcgactggtggggaggccgcgcgaaagaagttccgtccggcggaaaacggaaaagggtattagcctgttgaggaaaaatatccgttgcagccaataattgttgtcttaagaaaagcccgcttaaacgaaatatgtttaagcgggcttttcttgcgcttgcagggaaaacatcgaacagggattcgataaagtcaaaagtctttgaagggaaagggggggggt

SEQ ID NO: 7541 - DNA, 1047 bp, Unknown
  gut microbiota DNA sequence
ggttcctcaagctgctcggacacacgcgggcctcattcagggaagcctacggcaaccggttcgacaacctcgtccacccggaagaccgcaaacgcgtgctcgactccatcaacagccagatcaagcacagcgattacgatacggtggagtaccgcgtgaccaaggcggacgggcggatcctgtggctgttcgacaaggcgcagctcgtacgcgacgaaagcgggcgcgcatggttctacgtcatcgtcatggacatcacctccctgcgcaagacccagcaggaactcaaaatcagcgaggagcgctaccgtatcctcaccgagctttccgagcgcatcatcttcgagcacgacatccagacccggcgctcctacttctcgccccgcttccgggaaaaattcggctatgaccccgccgtggacagcgcttccggctcgctttcggaacactgcatccactctttggacaggccgctctaccgccggttcgtcacccaaatcctgtcggggcactccgctccggccgaattgcgtttcctcaagcaaccctcggggtttctctggtgccgggtccaggccgtggccattttcgacgaatcgggccagcccgtacggctcgtgggcgaaatcgaggatatcgacgcggaaaagcgcgatacggaacggctccgcatgaaagcgcagctcgatccgctcaccggcctctacaacgcgagttcggccagaaagcgcattgaagccagccttcaacagccccccagcgtggggatgcatgtgctcgcggtaatcgatgtcaatcatttcaagcagatcaacgatacatgcggccatctcaccggggatcacgcgctcattgagacggcgcggcgcctgggctccatgctcaacgaaggggacatcgccgggcgcatcggcggtgacgagttcatcgcgcttttccggggcgtgccctcaatgggtgccctcgaaaaacgcatcgacgaactcaggcgcgggctgtcgttccccttgccggacggcctttccatgtccgcaagcatcggcatag

SEQ ID NO: 7542 - DNA, 2867 bp, Unknown
  gut microbiota DNA sequence
cgtagggcgcacggctggcggccccgccaaggtttccgtggtggccagcgcgctcatgggcatgatcaacggcagcgccctcgccaacgtcgccactaccggggcgatcaccatcccgctcatgaaaaagaccgggtacaagcccgaattcgccgccgccgtcgaggcagtcgcctccaccgggggacagttcgcaccgcccatcatgggcgcggtgggcttcatcatggccgaattcctcggcgtcccgtataccaaggtcatgctcgcggcggcgatcccggcgttcctatattatctcacgctgctcatggcggtgcacttcgaggcccgcaagctcggcctcaaggggctttcccccgagcacatcccggcggcgggcaaagtcctgcgcgaacgcgggcatctgttcatcccgctgatcgtgctgctctggctgatgttcgacggctacacccccctgttcgcggcggcggcttccatcttcgccaccgtcggggctacatggctgccttccctcatcgggctgctgcggacgaaaacagcccgcaccttcgccttcgtcctgctgcttgccgtcctcggaggtctggccctctctgggctcctcagccttggcgcggcgatcctcacagctctgtgcgtgctcgcttccgcgtggtgttcggctcggtaccgcatgactccccgcgtggtggtccaagcgctcgacgaaggcgcgcgcggcgcggtgggcgtgggcgcggcctgcgtgatcatcggcatcatcatcggcacggtatccctcaccggactcggcctgaccttcgggtacgaggtactcaagtacgtgggcgaaggccagctctacctcggcggcctgttcgtcatgatcatgagcaccatcctcggcatgggcgtgcccggcgtggcggcctatgtcatcgttgcggccgtggcggtcccggtgctcacgggcgtgggcgtgatgccgatggcggcgcacatgttctgcttgttctacgcctgcctctccaacatcacgccgccggtcgccatgtcgtcctatgtggcggcgggcattgcgcattcggatcagacccgcacgtccctcattgcggtaaagctcggcctgaccggattcatcctgcccttctttttcctgaacaacccactcctgctgtacagctcggccaatccggctctggcgacgctgtgggcgttcgccacggcctgtctcggggtgagcgcgctggccgccgggttgcagggctggctgttcgggccctgtaattccgtcatgcgcggcctgctgcttgtggcggcctttctcgccatcgatcccggcctcaagacggaccttgcagcgctcgccctgtgcgccgtggcaggggtgtggagttggaaggagagagggaaggggtagggattagtgggaattggaggggaggcggcgcgaagggagtccctgtcgcctcatagaaaagctggaatgaaaaaaactgtcagatgaaggtgtaggcggggatgggaaagttatggaaagagccgggtgggaagtcttccgtgccgagaggagccggagctttatggatatcccgataacaaatgcaacatgcaaaacgaggagaacgtcatgaaaaaatggtccatgtttttggctgctgcggcgtgcgcgtgcgtattggcctcgccccttcaagctgcggagcgcaagaaagtgaatatcagctttcccacggcggcgacgaccggggcgttgtaccccctcggcgcgggcatcgccaatttgtggaataccaagcttggttatgtgaacgcgcgggtgcaggcctccaacggcggcattcagaacctcaacctgctcaaagccgggaacgcgcaggtttcattcgccgtgtcgagcattacctatgaggcgctcaacggcgaacgcgggttcaaggaccgcgcctacaaggacgtccgcgtattggcgggcctgtactataacccgaaccaggtcgtggcccgtgccgacagcggcgtggcttcgctggcggacttcaagggcaaaagtttcgcgccgggcgcggcgggcggtacgaccgaagtggaatcccgcatccacttcaccgaaacggggctcaagtatcccgacgacatcaaagcccatttcgtgggcttcaccgaatccatcgacctgatgcgcaacaagcagcttgacggcgtatggatcatggccgggatgcccaccgccgccgtcacggaaatgtgctccaccgccaacggcaagctcgtgggcatggacgacgagctgatcgccaaggtacaggcgaagtatccgtggtattccaaattcaccattccggcgggaacctatgacggtcagaccgaaccagtccagaccacggccgtcaagatgcttctcctcaccgatgcttccatgcccgacgatgtggtgtatgatcttgccaaaaccttctgggaaaaccttgattctctcggcaaggcccatgccgtcatgaaaaccgtcaccaaggaaatggccgtcagcgatctttccggcatcccgctccatcccggcgctgaaaagtactaccgcgaaatcgggttgctgaaataaaactcccatccgcgttttccgggaggtatcttccgtatccgcaccatccccgttcttcgcacaccaacacgaaatggggcctccaaacggatagaagcaaccaccgaaggctacaaaaaacatggaaaggaaggctccaccgtgttccctgcatgagcggaaacgcggaaataaggaagaaaacctttcctccaataagagaggcacccgatccgggggatcgggtgcctctcttattgctctttccaacgactttcctcatatcccctcaatgttcgccaac

SEQ ID NO: 7543 - DNA, 766 bp, Unknown
  gut microbiota DNA sequence
atggtcacggtgtatttctccagcagggccacggggtggtaggacagcttgctggtgcgcaggcctaagtctccggtgtcgtcctcccggttgatgaagtggaccccgtcccggacaaagtgctgggcaaactgggccaccagcatctgatagcagccctcgtagtcccggtccgccttttcgatgtgggtgaacagggtgtcccccacgatctcccccagggagaagcccacgatgttgtcctccacctggaggatgccccccaacaggtcataggtggcgaagtggtccagcacctcgtgggtcttggcgatgtcctcgtggaaggaggcggcggccttgtcccaccgggcggcgtagcggtccaaaaatgccttcacctgggggacatctgcctcggccatggtgcggaaggtccagctgccataggtctttaaaaacttgttcacatggttgcgctggccgctgagctttttgccccggaagtacatcaggtcctccgcccgatagagatagtcaaagctgtcccgctcggccacggcggcgctgttggggaaatactcctgcagccggggcagctcgtccttgggcacggggtagaaggacagggggatgcccttttcacagcagtatcgggcgatctcccggaagtgctctgtgcggcccccgcccaggggcagggtgaaggtctcccccagggaggggtactggaccttgaaatacaggctgtcatcgcagatggcccactccgtctcgtacatgtccc

SEQ ID NO: 7544 - DNA, 1492 bp, Unknown
  gut microbiota DNA sequence
aagacttttattcttatcgaatccctgttggcggtcttttccaacacagattctttttggaaaatacgagttcaaaaaggagcctattatgcttgcatcccagtcggttttcgttgtggacgcccacaccacgggcaccccgatccgcgtcgtcaccggcggcatccctccgctcaagggcgcttccgtggctgaaaaaatggaagacatgcgccggaaccacgactggctgcgcacctgcatcatgcagcagccgcgcgggttcctgtccctcgtcggggccatcctgaccgagccctgctcgcccgaggcggactatggcgtgttctatatagatgcgctgacctatcagcccatgtgcggcgcggggacgctctccgtcgccaaagtcctcgtggagacgggcatggtcaagcgcgtggagcccgaaaccaagatcgtcctcgaaccccccaccgggctggtgacggtctatgtgaagtgggaaaaccacatggtcgccagcatcaatctggagaacgtcccggccttcctgtaccgcaaggatctgcacatcgaccttgccggatacggcgacgtttccgtggacatcggatatggcggcaacttcttcgtgctggcggacgtgcattccctcggcctgaccatcaccaaggacacggtcaacctcctgcgcagcctcagcaaggacatcctcgccgccgccaacaaggtcatcaaggtggcccatccgacgaacccggcgatcaactaccttgatcaggtgctcttctgccagaacgtcccggaagaggacggcggctatctggcccagtgcatcttcggggacgcgcaggccgacatctccccctgcgggaccggcacgtccacccgccttgcgcagcggtacttccggggcctcatcgggcttgaggaaacctttgtccagaaaagcgtctgcggcggcgcgttccacgccaaggggctgcgggaaaccacgctgggcggcgtgcccgcgatcgtcccctacgtgtcctgctcggacgtccacatcaccgggttcaaccaccttatcgtggaagaaaacgacaagctgaagaacgggttcgtttcttggtagccgtggcggaaggttaggggaaacgtgccggggggagccttttgggagagcgggaagcccccgcacaggtcccctcccggcccctctccctaggctttcgtccggcgggggccgcgcggaaggcatccgttccggtgcggtccggcgggaaggctgctgaggctgccgggaagatccgccccctgccggaaggcgttcaaggctgtccccaacggaccgtatcataaggaataaagcaaggaggggccccgttccggaacggcccggacagagggatgcggccccccacgggcatatgctcccaagggattggccgccgcgtttttcctgcgccggttccgaccgggcgggcaaccatcaacagcgaaaccctccgccgcctttcggcgggga

SEQ ID NO: 7545 - DNA, 33620 bp, Unknown
  gut microbiota DNA sequence
ccggcaggcgggaagcgcgcgccgcaccgccctccggcccttggatctgaaaagccactcaaacgattaaggagatgccaccatgacattgctgtcccacgccgactacgaacggattgccgcgaacctgtcctacccgaccgaagcctttatcggcgggacattcgcccccgccctctccggcgagacaatgccgaccgtcaaccccgcgacgggcaaggaaatcgcccgggtcgcctcctgcgggcgcgaagacgtcgacaaggccgtcgccgcggcgcgcaaggcttttgaaagcggggcctggtcgcgtatgcatccttcggagcgcaaaaaaatcctcatgcgcttcatcgggctcatcgaaaagcatcaggtcgagctggcggtcctcgaatcgctggacagcgggaagcccgtccgcgaatgcctgctcacggatctgccggaaaccatcgagtgcctcgaatggcacgccgaatgcgcggacaagcagtacggcggcatctccccctccggagacggcaggctggggctcatcgtgcgcgagcccgccggggtggtcgcctgcgtcctgccgtggaacttcccgctcatgatggtgggctggaagctcggccccgcccttgccgaaggcaacagcgtcatcctcaagcccgccagcgtcacctcgctctccaccctgaagctcgcggagttcgccgccgaagcgggcatccccgaaggcgtgttcaacgtgatcacgggccccggctcctccgtgggcgaagcgctcgggctgcaccccggcgtggacgtggtgtccttcaccggctccaccgaagtgggccgccgcttccttgaatacgccgcccggagcaacctcaagcgcatcgtgctggaactcggcggcaagagccccttcgtggtgctcgacgacgtggccgactacgccgccgtcgccgcgcaggccgccgctgccgccttctggaacatgggcgaaaactgcaccgccaactcccggatcatcgtgccccgcaagcgcaaggacgccttcaccgaagccctgctcgccgagctcgaaaactggcgcatcggcgacccgctcgatcctgaaaacaacctcggctccatcgtgagcgaaggccagttcaggacgatcatgggctacatcgagaagggcaaggccgaaggggggcatgtcctcaccggcggcgcgcccctcgccatcggcagcgggctgttcatcccgcccaccatctttgacggcgtgaccccggacatggccatcgtccgagaggaaatcttcggccccgtcaccgccatcctccccgccgacagcgacgaggaagccgtagggctcgccaacgccacagcatacggcttgcaagccaccctgttcaccgaggacgtcaccaaggcccacaagtacgcccgcgcgctcaaggcgggcaccgtctccgtcaactgcttcagcgagggcgacaacaccacgccattcggcggctacaagctctccgggttcggcggcaaggacaagggccgcgaatcccacgaccagtacaccgaaaccaagaccatcttcctgaacctcgacagatagagcctccccccacgcgggccgctgcccgccccgccggaacgttcccgttccccggagcccagcggcccgccccggccggaagcccccgggaaggcgcatccccggcgggacattccgaaacggtggtggaacggaagccccgtgcggcggaaggcgcaggccggctggttcgggcggggaaagggaatcccttcagaagggttccctcgacgcctcattcaaaccccttcgcttccctccagcccccgccgagcgccttgcacagcccgaccacggcggcgagctggcggcggcgcgcctcggcctgttcctgccgggcggccaagagctggcggcgcacgtcgagcaggtccataacgctgctcaggcccgcatcgtactgcttttccatgatctcgttgctgcgcgtgagttccttcacccgctccgtgctggcggcgagggccttgcggctgatgcggttcccggcgagggcgtcgcgcgtctccgtgaaggcgttccgcacgctccccacataggccgcccgcgcttcctcgtacttggcctccgccatgcgctgcttcgccgtgagcctgccgccctcgaacagcggctgcgccagcccgcccatgacgtcccatatccgcgccggatcgaggaatacccgatccagatgcgtcgaggagtagcccccctccgccgtcagcgagaaggacgggaagaacgccgcgcgcgccgcgccgatgcgggcgttggcggccatgaggcggccttcggcggagcggacgtccgggcggcgctggagcagatccgaagggatgcccgagggcacgtccggcggcggtgccagttcgccgagcgtccggccttcctgaaaggcccgccccgccccgtccacgatcccggcggggctgaaccccgcgagcaccgcaagcgcgccttcgcagcggatgcgccgttcctccagatcgtacaactgcgcctgcgtcttgtcgcgttccgccgcgaaccgccgcagcgtggtttccggcgactgcccgaggcggtagcgcgtctcatagaccttgcacgtccgctcgtaggacttgagcatgtcggcggcgatccgttcctgctcctgcaaggtgcggagctggaaatacgccagcgcggtttccgaggccaccgccagccggatcgtgtcgcgggcggcttcggtcgacagcagctcggcgcgggcggcctcgtccagacggcggtacttgccccacaggtcaagctcgaagctcaggaacccgaccgccttgtacgcctcctgcgtccgcgaggcgtagtggtgcgcgagctcctccccttccgtcatcaggcgcttgccgtcctgactccgcaggcccacggcaggcaggcgatccgcaaaggcgacgcccgccgccgcgcgtgcctcctcgacccgggccatcgcctgcgcgaggttgctgttgtgcgcgagggcggcctcctcaaggcggttcagggcgccgtcatggaagacttcccaccagcgttcgcgggtgaacagcgcgccgggctcgtccgccgcaacggaagcggcgggcagatccagatccgggcgcttgtagtccggcccgagggtgcaccccgccgccagcaggcagcacaggagcagccccgccagcgggaaggcggggcgcggcagccgcgaccggacggcggcccacaggcgggacaggctattccgggcatgggcgcgcacggcgtgggggtgcgggtccacgcggcggctcaggagggcgcacacgaaagccacgcacgccaccagcgacaggatgaggaagagatgatcgaacgtaaacacggacgcctgctttttgatggatgaggacacgatgaggagcgcgtcgtgccgggactgggagggcgagagcccctgcccggcgaacagcgccgaccagcgcgagatggaagccgaagccgccgaggagccctgcgtcacctgcgcggcgatgagggcgaaataccacttgttgaggagcacgctcagggtgatgatcgaccccatgcacaagcacatgctgaagaaacgcacgctgttgatggccgggagcgtctgcggctgcttctccggcgggacgttgcgcaacaggaagggcgtggccgaagcgctgcccatcgcatagccgaagctccgcagagccagcggcaccgccatgtgccaccagtccgcgttggcgtcgagccgcgagagcaggagcccggccccggcgatgcaggcaatcccggccaggaggaagggcttggggttgccgtgcgtggcgaccatgatgcccgtcgggacgaccgtcagcacgaacacgcacagcggcagcaggaacatgagcccgatctccgacggcgggtagccgagcacgttgcgcatgaacaggatcatctggatgcgcatccccacatggctgatcacgagcaggagcgccgccatgaccgccggccccacgcccttgatgcgcaggttgcgcaggtgcaggagcggggcctcggcgctgaggcaggagacgaggaacaggaacagcgcggagacggcgcagaagatcatgatcaggatgaacgaggagttccagccgaaggtctgcccgtagcacacggcgatgagcgtcggcacggcgaaggcgacgaggaaggcgaacgagcaccagtcgaacggcggcatcccggcggggcggctgtccggcagcaggaagaagaggatcacaaggcacggcagcgccaccacgggcgagagcaggaacagggagtgccacgtcaggaactccacgaggaacccgccgagcagcgggctcaggttggacccgaacccgatgaagaagctccagatcgccatcatgagcctgcgcgattccgggggcacggccacaaacaggatgcgcgcggaaaggctcaggaacagccctcccccgaaccccgccagcgcgtaccacagggtcatctccgtgagggagccggaggaggccgcccccaccccggccacggacaccacgcacagcgcgaggaagagcgccccgcgcaggccgagcccggcatggatgtggttcaccagcggctggaccagccccatgatcaggaggttgccgagcgccagccgcccgaggtcgatgagatccgcgttgaagtcgccggaaagcgccagataggccgagctgagcatggccatgttggaaatcggcagcatcccgccgatgaaggccacaaggatcaggatgccctgccgggcgctccggtgcgggaccgagccgatttccggcgcggcgaagaaacgggcgagggcgtcccccgccgcaatcagggaagcaggcatggcatcaccttccgggccgtcgcgttagagctggatttcaatggttccctgcatcccgatgcggaacaccacctcgggctcgccggggtccgtttccgggctgtcgaggcgcggcagggaaattttcaccgggacgcgctgcatgatcttggtgaagtagcccgcgacgttttcggtggaaatcagggaaaacacggagcacgccgccgggttgatctcatagatgcgcccggagaaggtgcggcccggatagccgtcgatggtgaaggccacgtcctgccccacgcggatctgcccgatgcgggtttcctcgatgcgggcgttgagccagatgtcgtcggtattgacgagcgtgaacagcttctgccccgccgccaccagttccccggcgctcacgagcttctgggccacgacgccgttgaccggggaagggatcacgctgtcctggcacagcacgttgatctcgtcgagttcggcctgcgcctgcatgacctgcgcttcggcggcccggatgacttccgggcgcgagccttccttcttgagggcaagctcctcctgcgcggcggcgacgttggcctgcgccgcacggtaggcggaactcgcggcgtcccggtcggcctgcgtcaccccgccgtcgttgcgggcaagctgctccatgcgccggaagtcgcgccccgcccgctccagcatggcctgcgcctgatccagatgggcctgcgccgccatgatctcctgccgccggaacccggccttggcgtcctcccagcgggccttggcaagctcaagcgcggcctcggccttggctttgcgggccatgacgctgcggctgtcgatgcgcacgagcccctgccccttgtgcaccgtgtcgccctcgttcaccatgacctgcaccacccggtcggacaggcgggaagccacgccgacgagcgtcccctcgatgcgggagtcgttggtgatcaggacgcagtgggtgcggtaccacagccagatgccgccgatgatccccgcgcacaaaaccacgccgaacgcatacagcacgggctttctgacgcttaccgccatgcttcgccttccttcggggcaacgccgccgatgaatacggacaccgcgttttcgatgtattcatcccggaccagccccgggcgcttgcgcccgatcaccagcgtcatgacgaagccgaaaatgaggttccagaacagcgaggaaacatacaggctgtccagctgccggatgtgcccgcgccggatcatctcctcgaaatacgcccgcaggcgctcacggaacgaggtgacgtcgctgaccagctccgtgctgtgctcgtcgatctgcccgatggcgctgaaataaatccgccagatgccgatccgctgctcggcgatgtccatgtagcggcgcatgaaatggcgcaggtcgtgctcaagctcccagcggacatgcgtggtgaagacgtcctcgatcatttccgcatacggcgcccggcgcatggccgccatcagcatggcgtacttggaagggaaatgccggaacacggtcatctcgctgaggccgacggccttggcgatttcccgtaccgacacggggttgtagcctttcgtattcatgagcccgatggccgcatcaaggatgcggtccgccgtggaagtggtacccggtttcgccgtcatgccgtccatcctgaaagaaaaacgttttgccctctccgccccggcggggagccgcgcgggggatcctgacattgcaagctggcggagggccccccgcgaacccggcgggcgggcagggaatccccgcagcgcgtgagttagtataactaacattccggactgtcaagcggccccgcgcccgtgtatggctctgcgccaagaaagggccagccggggccgctgccccgcgtacgccgcctttcctccatacggcgcagggatgcgcccaacgcacggaacccgcccccatagaggaaaaagcacggaaaaaggggcgctccatacgaaacgcccctcaagggtacggccttccggccttcatcataacgggaacgccgccttcccgcctttgccgcttccgggcttcccggccccttccgcgccgttttccctgcttccggagggccctccccactaccaccagaattgcggatagcgctgcgccttggggatgttgttcacgataagggcgatggcgagcatgatcagcgccccgagcaggcacggcacgaaggcgtacagatagccgagctggtggatgccctccccgcccgtgaccgcgatgagcgccgtggcgcctcccggagggtgcagggttttggtgacgtgcatgagcgcgatggcggtggcgacggcgaggcatgaggccagccagggcgtgccggggaacaggaagtagcacgagacgcccacgagcgcggacaggaaatgcccgcccaccaggttgcgcggctgtgccagcgggctgcgtatggctccgaaggccagcaccgccgacgccccgaacgagccgatcagcagcgggaagcccgagttgcccgtggcgtagcgttccagcagcgcgatgcaggcgatggccagacagctcccaacccacgcggagaagatttccccggccttggcgcggggcggggactgctcgccgcccgccattttcagcaaaagctctctcactgcatcactccaaaggcattgatgatatcggtgcgcgacacgatccccacaggccgcatcccggcatcgacgacgggaatccggttgatccggcgcgtccgcaagagttccagcatgtcgcccagatgggcgccctccccgaccgagacgcactcccgcgtcatgatcgagccgacgggggcttcaaggtccgcgccgctgacgcacccctgccgcatcagcgtgtgcatcaggtgcatgaccgtcaccgtctccccgccgccgacgaaccggacgatgtcgctttccgagacgaccccggaaaggcgcccttccgcgcccacgacgggcgcgccggaaatgcggtgatcgtcgaggaagatgaccagatcccgcacggactgctcctcggcgacgcacagcaccgggacatgcatgatgtcccccgccgtaatggacgagagcagcctcccccgggctatcttgtaggcatgggcgtagatttcttggaaatcgcgcggggtgacgtccagatacgcgccgatttcctccatccccttgtagatgtcctcccggccgagcgggaggggatcgcgtgaagccagactgatgttcctgttcatgggcacgctcctgttgcaagcatgaaggcacggtacccccatcccccccggcgtgatgtgaccggggtcacaccggggaaaaagaggcgcgccggatggacgaagcccccgccgaggcctatagtaagaggaaaacatcccgcgaaaatacggaaaggaggcggacatggcgagcggctgggctggcgacggagcggtacaggatcagattcaggattcgatcaacgacgaagtggcgcgggcgcggcgcaacctgcccaaaggcgagagcctgcatttctgcgaggagtgcggcgagccgatccccgaagcgcggcgcaaggccctccccggcgtgcggctgtgcgtggcctgtcaggaggaagccgacaaggatcagcgcgccgtcagcctctacaaccgccgcggcagcaaggacagccagttgcgttaaagagtggggatgggaagattggcgagagttttggggaggggaggcggcgcggagggaatccccgccggatgacggaatgggagaggcgcggcgtggaaggcggttgtccggcgcgcttcgggcagaggcctcatcaataaaaccacccatcataagcggcggagcggccctgtgtgcgggaagagccgtcagccttcgccgtcgcgccgtccggccgggattgacaagcgcggcatggcgtggaatcacgtccttctcatccatacggatgccaaggaacctgatgtgaaagccattgtcctcagcgtctttctgggaggcctcgccgtgtgcgtcctcaccggggccagcgtcttgtgggcgctcctgctcgggctcgcctgtttcgccgggtacgccctgcggcaggggcacgcgccgcgtgacgttgccctcatgttgtggtccggcgtccgcagcgtgcggaatatcctgattatcttcgggctcatcggcatgctcaccgccgtctggcgggccagcggcaccctccccttcatcatccatcatacgctgcaatgggtcgatcccgcctacttcatcctgtgggtcttcctcctgtgctgcctgctgagcctcctgctcggcacggcgttcggctcggtcagcaccctcggcgtcatttttatgatgctggcccgttccgccgggctggacgagcttgccaccgccggggctatcatgagcggcatttacgtcggggacagatgctcacccgtatcatccagcgcggcgctcgtctgtgcgctcacgaataccaatatatacgcgaatatgcgccgcatgtggacaacctctgcgctccccttcgccctgacctgcgcgggctatctggcgctgtccctctccggcccggcgcggctcgcggcaccggacgccgccggacagatggaccgttttttcattctcagcggctggacgctcttgcccgccgcctgtatcgtcgtcctgagcctgttccgcgccgacgtgaaacaggccatgctctggagcatcctctcggggggcgccgtctgcctgaccgtgcagggcatggagcccggggaactgttcgcctgcctcgccttcggctacacccccgcgcccggagcggaaatactcgccggaggcggcatccggtccatgcttcaggtggcgggcatcgtcctgctgtcgtcgtcctattcgggcattttcgacgcgaccgacctcctgagcggtttcggcggcctcatacggcgtctggcggagcgcatcgggacgttccgggccatgacgctggcaagcgtccccgtgtccggcataagctgcaaccagacgctcgccaccatcctgaccgcgcagttgtgccgcccctgttacgcccgcaggcaggacatggcgatccccctcgaaaacagcgccatcctcatagccgcgctgatcccgtggagcatcgccggcagcctcccctgcgccacgctcggcgtgacgatggcctgcctcccgtatgcgttgtatttgtaccttgtcccgctggcgaacgcgctgcgcaaagaccccggccccgacgggcccgaacccgccacctccatctgacggttccgcctgacggctccggttggtcgctccgtttggagatcccgtttggtggttccgcctcccccagccggagcgggcttccggtgccagccgcccgagtccgggttgcccggccccggttttccaatgcggaaagccttcacccataacccggagaaaaagcaatggaaggattgatcggccccctcatctcctttatcggcgcggtgctcatcggcatcgtcgtcggcaagtacatcgcctcaaaacggaagtaaccggaaacgcgcctttttccgtaccctcgaaaagcctttggcgcaaaagccctcggcgcacgggaagcggcacgcggttgaaaatggaaaaaaacagcccccggcaatcccgctgccgagggctgttttgtgttggaacgcaatctgtgcggttgtccggaaggttacgcgccgacaagctcaaccgtgctgtacgtgtcctgcatcttgaagagtatcttgccgatgcgttgcagttcccttcccagaatatggatgatcacgccgtccactttggcctcggcgtccatcagctccatgagcgaggcgaacgcatccacggacgccgaaacgttggaaaggatttctttcatatcctcagcctgttgcgcttcaagcaattcccgctcgcagcgtatcgccaaggcggggaagctgtaacggcggatttcaccctcgggatgcggaaacaggtctgatgcgggggaaggcggaggagccgcgcgcaacgggcggcggggaacggaacggcggcggcagggatggggaaaggccttggattgcaacgacataggacacctcttgcggtttttttgatgggagcttgcatatgcaaactccgggtgctcaaaactgccgcaagacagcggactatttcccctttcaggttttgtatttcgtccacacccggaggttttcccatagatacaacgcaagagatcacaaaggactcttgtgaaggtaccacgattctttcgggcgtgggccgcttgcggaaggtgttttgagcaccgagaaaagaatagtcgcagaggctggcggagtcaatgcggccttggcccgcccggcgcgttgatccggcgcgtcatgcgctcgtgccgcctcactcccagtttttgaagccgagccccaccacttccgtcacatcggagaaaatgaggaacgcttccgggtcgatttccgcgatgtactgccgcaaatccaccgtctgccgccgggtgagcacgacgagcagcatgtcatggggccgatccgaatacgcccccttcgccgggatgatggttgccgagcggtcaagctcgttgaggatgaagtccgcgatgtccggcgtgcgcttgctgatgatcaaaacctggctgcgcctgtcgaatgatttcaataccctgtcgatggtcaccgtctccacgtacagcaacagcccgcccatgaggatcttttcgatatccacgaccacaaaggacgcgaagaggataaccacgttgatataaaaggacatcgacccgatatccacgccccagcgcttccgggccaccatgacgatgacgtccgtcccgccgctggacgcccccacgcggaaaagcatcccgaagcccaccccgcccacggccccggccagcagcgcggcgaggatggtattgccgatgaccggatactggaacagctcgaagacggggatagccacgctggtcaggaccgtcacgtacagcgtccagagcgcgaaccggagggacagcgccttccagccccacagcagcaggacggcgttgccgacgctgagcacccatgccggggatatcccccacgcataattgctgatcagggcgagcccgagcacgccgccgcccgcgaactgatacggcaccgtcagcgcgacgaccgcgaaacacgtcaacaacgtgccgatggtggcggccaacagggtatgccactcccgccgcagcgacaggtgcggacgccgcaacacgttcccatttaaaaagcccattctcgtattccttaaaaaagatatgccgtacaaagagttagaggaaacaatgccctctccttccataagccatcgccccagccttggcaatccgccccgaaagcgccgcccggacgggagcccacccccgtttgcgcgccgctttttgctctttctttcacgataaaagtcaacatctttttgaaaaaggtaacagggctttttttctaccctattgacctcttttcctgcgtagcttatgatgaagccaaatgaaacggcgggagctgccatgatgttgtccacgttcgccaagaacagactctttatcaagagtttcctgagcatactgatgttgctcatgctgttctgcacgccggacgcgctgaaggcaaacgcctcgtttgacacttcagtcacaacaagcttcgtccccagcgaatacctgcctctggaaacggaacaggccaccgccgttgtccgggcgaacaaggctttcctccccgaaaggggcctcaacagggaaacagggttccctctcctcaccctgcttttccttctgctctatccgctctgcacgcgttcgctcaggacgctttcatgggcggatctcttcctcccacggcttgccgaaatccggggcatgttgcctctccccggcgcgccgcctcttcataggatctccttcgtttccactctcagggcttgcgtgtaacgcacattcccccatgcgtcagggatgccccaacagggcgcgccggacccatggcggctatgccccgccttggcgcaacgctccggcattccctgacaaacgacaaggagttcttatggacatcggattgaaggtcgtcctgatttgcgccggtttcatggctatttgcgtcgtcctcggcatgatcggcaagaagctcgccgaatagatccccacaggcaacgccatatcctcagaaaacccaaaaggctgtcgctccggcggcagcctttccgccttccccggacggcgcaaccgtgcgtttttccgcccactttccccgccgcgccgcccatgacgccgctttttgacggaaaaaagcattttccgcttgacttcccgggcattctttgacagaaaccttctcacgttgttgggctatcgttcaattggcaggacgacggattctggtcccgttaatcgtggttcaagtccacgtagcccagccagaaatttaaaaaggaaggtcacttggccttcctttttttgttgtgcgctgcgcagaatggacttgatgatgatgatgatgaggaggaggaggaggaggaacctttcaagaaaggcttcctccccccaccaaacccaccagcgaggctcgcgtcccccctcctcccgagactttcataaaatggggaggcggcgcgaaaggagtccgttccggcgtgagctggaaaaaaagcgctacggatggtggctttccctctcttcattgttcccccgaacgcggcttgcaggcattccctttgaaaggcgcaccattccaaggtcatccgcgctggaaaaaactgcgaacagggattcgataaagtcgaaagtctttggaaagggagggatggggcttggggaagggaggggaaacctttctggagaaaggtttcccctcccttccccaatcttttctctaacctgacactacgcgataaccccgcgtgcgcgcagctcctcgacgaccttcccggccagatcgggcaaacgcgcctgacagaccggggtcagcccgatctccatcgtgtggtaatcggctggctccatgccgatcacgaccgcatccggcctgtgccccgccaaatcgcagtaaatcagcgtgtcgaccagatccgtctgatgcatggagtcgcggaaactcatactttcgcgcagcccctcgccctccaaacggtacagggtccccggctcgccgccgccaaggacggcatccaccacaatcagcagatcacaccccatgatggcgtccatcagccggatgccgagcgtgccgccgtccatgagctccacatttccgggcagggatgcgcactgctgcagatgctcaaccgtgcgcaccccgatggcctcgtcggagaacagaatattgcctacacccaaaaccagcacctgttcagccatcttccgttctcccgttttcacttacaatatctgaaacttgctgacttcattggtcctgccgtcgatcacgtgcaccgcgcaggcgatgcaggggtcgaaggaatggaccgtgcgcaggatttcgaccgggcgcttgggatcggcgatgggcgtgttcacgagcgcctcttccaccgcgctcgggatgcccttcgagcagcgaggtccgagattccacgtggaaggcaccacaagctggaagttggccaccttcttgttctcgatgaccagccagtgagagagcccgccgcggggcgcgttcacgaagcccgcgccttcgcccttgtccggcacttcgcagttctcgacgatcttcttgtcgccggaagccacgttttccttgtattcctgcaacagatcgccggtcttcttggcgatgacggcggtttcgatgccgcgcgcggcggtcctgccgagcgtggagaacagatcgccgggcgtcaggctgagggtctgcaacacgctgtcgaccaccgggacgacctcggcgttgcccttgagataggccaccagaacctgcgcgagcgggccggtttccacggcgcgcccgtcgtaacggggagccttcatccacgaatagcgatccttgtcgcccatgaaggtgaacttgggttcggtaactccctggaacggcttatgaaccgcatcgcccgcgtaccagctgtgccgcacgtgctcctcgatcttcgagggatcgaaaggcagggcttcgagcttgcggtcgaacaccacgccgggcttgaaccaccgggattcgagattgcgctcgtcgccggggaactcgccgaaggtcataaagttggccgtgccgccgatcttggtccagtccttgtacgcgccgccgacaagcagcagatccgggatgtagacctgattcacgaagtcgttgacttccttgtacaagccttcgaattcggcgatgcgctccggcgtcaggctttcgtagcaggtcacgccgcccgccacgaggaactgggtgtgcgggttcttcgcgccgaacaccgccatggcccgcgccgccttcacctgtagccgcagggcttcaaggtaatgcgccgtggcgatgaggttcgcttcgggatcgaggtagtaggcgggatgcccgccgaggaagtaggcgttggtgaacgggccgagctgcccgctttccacaaaggctttcagcttcgcctgcaccgccttgaagccgtccgccgacgcggggcgcggggaaacggaggaacagattttggcggccttgaccggatcggcctgaagcgcgctggtcacgtccacgaagtcgagggcgtgcagatggtagaaatgcacgatatggtcgtgcagatactgcatcccgagcacgaggttccggatgtaggtggcgttcttggggatttccaccttgatcgcgtcttcgagggcgcgggtggaggccagcgcgtgggtataggtgcacacgccgcaggtgcgctgcgtgaagtgctgcacatcgcgggggtcgcgcccgaccaaaatcgtttcaaggccgcggtacagggtgccgacgctgcgggcttcgctgacgcgcccgtccttcacttccacttcaatgcgcaggtggccttcgatacgggtcaggggatcgatgacgacaggtccggtgaaatggctctggggtgtttttctggcttcgctcatgggtgctccctctagttttcatagaacggggacagtttgtcccagaaaccgggctcgctgcagccgatgcacggatgtcccgcgcccacgggccagttggtcccgttgaatttgaccttcgggcagttgttcatagtgtccgggcccttgcagcccagttcatacaaacaccagccgttgcgggcctcttcggaatcgaaggagggagcgaattcgccgttgtcgaagtgttcccggcgctcgcactggtcgtgcacgctgctgccgtagaacatcatggggcggttgttggcgtcgagctcgatgttgtcgccgcgcaggaaggcgaccagcgtgcccacgagattcagcgggttcggggggcagccgccgatgttgatggccttgatgcccttcgcgccgaagcattcgttgacgcccatcgcgccggtggggttgggcttggccgcctgcacgccgccgaacgcggcgcaggtgccgtaggcgaccacggccttggccttggggaggatgcggccgcagatatcgagcatggtatgcccggcgatgtagccgtatttgccttcattcgccgtggggatggccccttccacgacgcagatgaagccctcgggagcggaaatggcctgctccagagccgcttcggcggcttcgcccgcggcggccatgatggtttcatggtaatcgagcgaaatcgtatccaaaatcagctcatcgatgaacggctgccctgtccgcagcagggcctccgaacagcccgtgcactcggcgttgtgcaggtacaccacggaagggcggcggggcatggtcaacgcccgcgcgacctgttcggcgaatccggtccccatgcccatcgtcacggcgaccatgctacagaatttcaggaaatctcggcgggatactccctgccgttccagccgagcctcgacattctcttttcccagaccaacggcaatacgcatacgcttctccttattcagcggccggcaagatgtcggtcacatgcgtggatcaaaatggtcggaacccctcccgcatcccctcggcgtttcctccgtaaagacgacgaaaccgggccgatgtccccatgcttgcggaagaaacgccgcacattgcagagcgcggcctcaggtccgtgccccaaggcaagcattttccccctcggggagaacaatgccgccctcctccacttcggaacagcccagtataagggtattcgaacgctacggcaacgatagggctgtgtcaatcgggttctcgaaaaatcgtaacgtgaaaaagagcgcataacgggacgtaatgagagtgcttgcgcgcggtgttagagtgcttccggggcgttcttatggaaagggaaaaagggaggcggcagggcaatcaaaaggaaaggaggtgcggcgcggcatgttgcaacagaaagaacatgcccggactggatgcaagagaagcaaaccgcctccgcgccggattggacgaagggcacaaaaaaagcgccctctgaggcgctccgatgcggcattccggtgccgccgcccgcacagtccgccggggctgtgggcgattccggcccgcagtatcccggtgggctgaaagggccgttacgacagcttcaagaattttctggcccgctccacctgctcctgaatgagggcgtctccgacctttttggatttcaggaagtgctcaatggccttggctacgtcatccatcgggatgcgctgctccgagcacaccttgcgcaattccttggcgcgtttttcctcggcgggatgaccggcgaagatatgatccgaaccaccaaagcaaccgggaacgtgcgattcccatgtcttgactttctgtgacatctcaaatctcctttcctttaaggatgcgatcgttccacacgatgtcaagatgcgatgcattgattccctaaaaaggaagtaaggtttacagtgcatgagaggcgaaagcgtccattgcagtgaggcatgatttgttttctctcatgcggttgccttttcccttgccttgggtacactcaggacaatcagtcacagtctaacctttgggggattatcatgaaacacaataacgcgctgctgcacggctgcctcctcgccgccggtctgacgctccttccgttcgccgcccacgccaccggcctgagcaaccattttctcgcggaaaactcgttcacccagtccgtcaaggacggctaccaggacatcaagaaagaggtgaaggaaaccgtcgacgagcttaccggcgacgacaagaccgatacccagaaattccaggaacgccgggacaaggatctgaagaagtatcagaaggaagtccgcgacgcccagaaggactacgcgaagaaacgcgaaaaggcccagcgcgaatacctgaagcaccacaagcagctccccttccaggaagacctgcaaaaggatctcgaaagcgcccccgcgcccacgaccgcgaagtaaccccgatgccccggccctccggggcttttttgtgtctgccgcccaaggcccgcccagacaaaacgggccggagcgtctgccccggcccgttttctattcagcgaactccagcttgatgatgctggccttccagaccaccctgtccccttcgggatcgcgggtcaggccgggggccttccagcaggccgacaccgtcccccgtggattgatgatgtgatcgtcgtcgaaccagttccccttggcaatgttggtgctccggccttcacggtaggcgcccacattgaaccgcacgcccgtcaccgtcttcccgctcccgttcgtgatggagacgagcagttcgccctccccgcacgcgatgccgggcgacgtccgcgaagccgcttccgcggcgggctccacggtgatggcgacaagttcccgctggcgctcatcgtaaacgccgtatccccagaaggcgatgccggcaagcaccccggccgtcccgacgacggccaagcctatcagcgtgttccggggccaaaaccagaccaggacacacagcgcggcggcgaggatcacccacggcatactggcacctcctttccgccggggccaagcgcggcggggggatatgttgacggcactactcgcccgtgccgaagcggtcgtcgagctgacggttacggttgaaaatcccttccatcatcatggccagcgccccgtccccggtcacgttgcaggccgtgccgaaactgtcctgcaaagcgaagatggccagcagcagggccacgcccgccggatcgaaatggagcacgctcgtcacgaggccgagcgaggccatgaccgtcccgccgggcacgccgggggcacccacggcgaagatgccgaacagcacgatgaagaaggccatcgtacccacggacggcagcgtgccgtacagcatcaggctgatggtcatgacgaaaaaggtttcggtcagcacggagccgcacagatgcacggtcgcgcccaaggggatcatgaattccgtgacggtcttgctcagggccggggagcgccgcgcgcaggacagggccacgggcagcgtggcggcgctggacatggtccccacggcggtgaggtacgcgggcaggtaatagcgcagcacccgccacgggttacggcccgacaggatgccgccgatgctatagagcacggcgagccagataaaatggcccacgatgacgatgccgatgaccttgaggaaaatggggaactgcacggtcaagcggccttcataggaaagctcgcagaacgtcgcgcccacgaaaaacggcaggatggggatgatgacccgggtcacgacgctggtcatgatggcttcaagctcggccaacgccttgttgatgatctcggccttggtccagctcacggcgagcccgagcagcagcgccgtgaccagcgcgctcatgacggacatgagcggcgggatgtccagcacaaaggacggcttcggaagatcgacgagcccgctcacttccgtgggcacggacaggtgcgggatgatggcgtagccggaagccgccgagaacgccgccgcgccgacggacgaaaggtaggcgatggccacggccgtcagcagcatcttgctggcgttctgtcccaagcgggcgatggccggcgtgatgaagcccacgatgacgaggggcaccgcgtagaaaatgatctggcccaaggcgtacttgaccgacgccacggcatccatgacctccacgttggccatgcgccccagaaaggcgccgatggccagtgccaccaacaatttgatgatcaatccgaaatcgcttttcttggcggacatcgcccactccttctctcttcatcaaacatgccgggaagggtcccggcctcctcggggcggcccgccttctcctcggggggccgcagaacgccatgccaaaaacaggccggaggccctgccgttccccacggcccgcctccgtcacccgtctccgccccatcatacgtgacacggcccgcaaggacaaggccgcccggcaagcggcggcggatcggaagggaacgtcccggcgtgtggcgatcagggtatccacggtcgccccccttatagacggtttcctgggagttccccgcgcgaggcgatcagggaaatgcaacgccttggcgatcccttcgtgcatggggagttccccgcgcgaggcgatcagggggcagccttcgctggctgcgacgtccatgctggggaacgtcccggcgcatggcgatcaggatgcccggcgacggctcctgtggcatccaccttcctcccgatcagccgggactcttcaaagcattcccccagataccgccgggcttccggagcggcctatgacgcggcgagggcctatcgcggcggcgcggggcgcccccgggcgctttgctgtcggcattcacggggcgcccttatgaagggaatagcttgagattcaacaagctatcatcattgcttcccttatacgtgaggattgttcttgacagacgccttcctccttgggcatcgtacccccaataaaaaccgttttgggcaccacaggaggccatgctatggaactgaaaaagcttctttatgccgttgacttggaagacgccccccatccggctatcgaacacgtgaagatggtggcgtccctgacgggcgcttccgtttcgatcgtgtacgtgctcccttccgaaacggtctatgaatccaactacctctccggcgagggccagcccaacagaatcgcgcccacccaagccctgctggaaaagatggaacacttcctgaacacgaacttcccggaaggcgtcgacgactgtgcgttcctcatggggaagatttcggaagaagtcgtcaaatacgcccacaagagcgacatcgactgcatcgtcgtcggcgcgcatggccggatcgggttccggcagctgttcgccgggtccgtggccacggaagtcgtgaaaaaggcccactgctccgtatccgtcatccgccccagatattgacggaacgccgacctgccctttcccggcaggcaaggaaaagcattacgcgttttggaacctcccgcctggcgggaggttttttcatgcggaaaagcgtgccccgaatacgtcccgccgcacttgcgaggatgggttgacccggacttcccggcggtgtaacaggaaacagtccatgagaaatgctcatgggcgacatttctaagggtggtgtaccaatgctgtatacgcgcaactgattgaggacaaacagaacccacggtgtgaggttctcattgtctgttcggacgcggaaagagcaagcctttcgccgcccttctgagtgtgcagccgaggggaggccgtagaggcgttccttctctttccccgttcaggatggagccatcgtacgcatggtgtatccgccaaaacgtttgggaaggagtaggagatgaggaaaaatctttttgcgacaacgccgggcatcatcattgtgggcgccgtcatcggcctgatcgccgtatggctgcaaaagctcggcaacccggcaaacatggggatctgcgtagcgtgcttcgaacgcgatgtggccggagggcttggcctgcaccgcgcggccatcgtccagtacctgcgccctgaaatcatggggctggtgctcggctcgctggccgccgccatcgccacgcgggaattcaaaccgcgcgggggttccgcacccatcgtccgttttgtcctcggcatgatagccgccatgggcgcattggtgttcctcggatgcccgtggcgcgcgatactccgcctcgccggcggcgacggaaacgccatcctcggccttgccggcctggccacggggatctggttcgggacgctctttttcaaaaaaggctattcccttggccgcagcaacagccagagcgtcgtctccggggcactcttccccgtcatcgccgtctgcctgctccttctttacctcattttcccgcaaatcccggatcagccgcaaagcggccccctgttctactccgtgaagggccccggctcacagcacgcccccttcatcgcttcgctggggctggccttcataatcggcatcttcgcgcagcgcagccgtttctgcacgatgggcgcgttccgcgacctcttcctcttccgctacacccacctgttcctcgggctggcggccatgttcgccgccgcattcattgcgaacgccctgacgggcggcctcaagttcggctttgaaggccagcccgtggcccacagcgactttctgtggaactatcttgggatggttaccgccggccttgccttcgcactcgccggaggatgccccggccgccagctgttcatggcgggggaaggcgacagcgacgccggcatttttgccctcggcatgttggtcggcgcggctatggcccacaatctgggcacggccagttccggtacgggcatcggcgtatacggtatgcaggcgacgatcctcggtttcgccgtctgcctgatcatcggcttcgtccattccaagaaggcgtaaaggagtattgccatgcgtaccattgatacccggggactttcctgcccccaaccgttggtcctcttccatcaggccatagcggaacacgccgatacccctctggatgtgctggtggacaacgaggccagcctcgaaaacgtcacccgcgccgctgaaaaaaagggctggaacgtcaccccgaaagatgagggcgagggcgtcttccggctggaactccgcaagtgaggaacttcttttcccgtttagccgaagtgtttcaagggaagccccggaaaggggcttccccgccttcccgcacatccacggaatacggctttctcgttttccagcatacgggcgaggtcatccgggccgaacggatactgcgggaagcggggtttgccgtggaggtcaaagggcctccccccgaactgcgtacgggatgcgacatgatcatcgtctttgacctgatgcaggagccgcttatccgcaacgcgctgggagccgcccgccttgagccgatccagtccgtccccatgcgcgataccctgctcgaacccgtatcgctgttccatgtccaggattacggcgactggttcatggtgcgggccgcgaacatgaaaatcaccgtggaacgcgccacggggaaaatcgtcaacgtgtccggaggcggatgccccgatgtgccgtatctggcggcgctgctgacggggcaatgcatcggcgaggccgaggagccgcgggtcaaggggcagacgctgtgttcctattcgctgcaacgcgcgtttgaggaggcgaggcggctatggcgtggatgatctgcggtacggtgccggatgcgtcttttcccctgacgggggggcgctggcgtctggatggcggcttcctccatgcggagggcgggggcatcgccccgctttccgtacagcgcgggacacccgccctgctcggaaccgcattgctgacgtgcgaaacgcttggggtggagcctcccacggcactgctcgccggggacaccgggaacggcgacgggagcaggaagctctacagccgccttgcggcctcctccagcctgtccggggttcggggcatcacgtttcattacctgttccccgaccttgatgggcacaaccgcgtcctgatggctctggaagaagcggacccgaagcccgtgctcgtcgccgatgccggtttcatgtatgtcgccaagatgagcggctacgccgacgcctacgatctgttcacccccgatgccggggaactggccttccttgccgatgaaaaggcaccgcaccctttttacaccagggggttcctgctggccgcggatgaggatatcccaagcctcgtcgaacgcgcctatcagcacggaaacgccgcgcgcttcttgctcatcaaagggaaggtcgatcaccttgtggaaggcgggcggttcctcggcgacgtatccgaaccgcaggttgccgctctggagcccatcggaggcacgggcgatctcgtcaccggccttgtgacgggcctgctcgccggcggcatggagatgccccaagcctgcctgaccgccgcgcgggccagccggattaccgggctgcttgcgaacccgacccccgcgacgcaaatcgcggaactgctgcccttcctccccgaagcgttgcgctgcgctttggagggggcctccccccctatgcccccctccggggcgtgaaacggtccagacgggagccgccccatccctcaggattcttacggaaaagcccccttcctcacggttgggggctttctttacaagacagccagaaccattccaagccatccctatggcaactacctttccggaaactcctttccgatggatttcatttgcccatccgaccaatacgaaacatcctgaccgtctatcgatttgatctgcccgtcagcccagtacgagacatctcccgccaacacttgaaaagggaatacgcagaacagcaaaaccaaaaagaattttttcattgcaactatcctgcaacatgctctgcgatttgatgtaaccatgtgtcttaacatcaaaaaaatggttacttgttcagataggcatccacttccttttcagccttgcgccgttcaagctcatccatgaccgcaacgggaacgcagaccttgcccaccgggttgaagaacgtggacagcgactttgcatagggaatcgccatcggcaacaggacaatcgtgcagcacatgacaacgacctgggcaatgccccacaagaaaaaaagcacgcccaagggaaagtacaggatccggacaatgaggcaaagaatggcgtacaggatgtttccgctcttattgggatgcaattcccgcttgtctatcatggaatagctgtacggagcgagagcgaacttggcatattgaatcaaaccaagcccgatgggggcaccgacaacggtaacggttaaaaggatccccgccaaaaaagaaaacaaagacgtcacaaaaccaaagcagggaaaatgccaaaggatattacctaatagtctcatagccactccttgttgcctcccagaccataccatgcctgcaaagtcaagatgccgggcaaggaaagcccctcggcctcctgcgggtgtggggcttttccctttttccatcttttacgccgatagttatgattaccgaacacgcagtgtgggaagctagccgggccggacatacggaaaaggcgtcttcctcgcgggcaagctggatgcccccgccactcactgtggcgtctccatcccttgctccgcaagggggctcccggccttgcctgcgggcagggcctcccgctcggtaagcgtctcgccccggtaggtagcatccgccagtggcgatggccccggcgtcagcggtgcctggctacggcgggaagggaagaagcggcatacgtccaaggagacaaaaaaaggagacaagaaagggaacgcgtgccatctcgtccgcttttaaaaaacaactatatcaatatattattgcaaattgtacaaacacgaaaagtaaactatacccaagggggaatcaaaatgccatttataaggataaaacatgccagaaagacagctgactatccaacaaaaaagatatttaaaatttgcccatctgttttttgccgccctctggggtggcggggcaacaacgatggtactcttgttttgcctctttcatcccagcaccgcacatgaacagatcacattcagcaagattttattttatatagattttatcatagtcggccccggagccggcggatgtctagccacagggctcatctactctttatatgggaattggggattctttaaattcaaatggataacgttaaagtatgttatcaatatcctgttcattacgtacggtatgctcgttttcctaccgtttacacacggccaatacagctactacctatcacaaccgacagaggccataatacctgaagagagcatatggatgaacatattctgtacttcgcaaaacttttgcacgatactcatgtttctctttgtggtttatctttcagtatttaagtcttttaaaaagaaaaactgagagaggccccgccccttcgccacagactggacctcgcctgagatgcatagccccgccctatcctcccaccgggctgcggctacggccttccccggacgcccgtaccgatgccgccgggaaccggcagcgctcctccgtcctcacccgtgacatcctgcccttcctcttcatggggcaggccacaaaacacgaactccgccggatggacgaaaccgcccgccgcaccacataaacgaaaagccccggcggactttctcctgccggggcttctggcgtcatgcctcaattttgaaggttttcccttgcctcttttatggaagccctcttgatgtcggcctgaaactccatcacgcggcccaagaggaacacgaccccgtaaggacggggaccaagggcccgtcagcttgcgttctcggcggcctgtttcatggcccgcttcatggcgtagagcatgccatccgcccgcttgacgatttccgaaaggccgtgatccgtttccggattgaaaaaggcatgtccccaagcggcactcagatgtatttcgttttcctcgttgtagcgcacgatacgttgttccaacttttgctggcactttttcacatcggaaagcgaaacctcgtgcaaggcggcaatgaattcgtccccgccgtagcggtacaatttggcggtgggaggcatggtttcccgtaggagcgaggcgaaatccctaaggagccgatccccggcgaggtgcccccatgtgtcgttgacccgtttcatgccgttgagatcgaacaggatgaggcatagggaacgcacagagtcgaaatcatgggccatcctcacgcagctcgtctcgtaggcgttgcggttgccgagttcggtcaggctgtccgtaaaggccatctggtgcgtctgctggatatagtcgaaggcatcctttccataccggaacgggaacacttcgtccgaatccacgacttcgtaagggtgggacagatgcatgtgcacgacatggagtcggtcgccaatcaaccgataaaagaaggatacccgttgcagagtccgtatgaacaggccggtttcctcatcggaagtaaccgtacagcaaccgaagatgagacaggagtgctcatcctcataggcgacctgataggtttcctgctccatcgtgaaggtgacaagctgctcgatctgcaagagttccctgagcttgtccacgccggtggtgtactgggcgcgtgaaggcccgatccacgtgacgccctctgccatctgcgcgtaaacgaagtcctcgtcacgccgataatgccgatacatgatctcgtgggtcaattcgataccgcgccggcccaacgggcccattccttcttcattttcgatacgatacacgctgctcatcgtttctctcctcttccgcaggacagaagccccgttcccgcaaaaaggcggtcctattggggagggaagcccaagcccccgggcatgtcaacagccccgcaggaaccccaaaagcctgtgaaggcggacggggcatgacatcccgaagccgaaacgcaagccgggcaggccgttctaccgcaagtcaggtgccgtccggtgcagtctgaacagaacgaaaaacgcggcaacctggacgagttgaatacagaggtagcaggcaaaccagccgaaccccgaatagagagctccggggatgtaggagccgagaagcccgccgaaataataacaggaaagaaaaagcccattgaccataccgcggtcgccatgaccggagagcatggcctgatggttgataaggccggggctgatggaatggacgacaaactccccaaaggctatgagccatagcccgccgaacaaggcccaaagggaagggaccgcaagcgtgagacaggaggcgacatagacggcggacgcgaaaagaataagccttgttggcgtcttaaacacgcgcatgagcggcgcaagggacaacgaagcgacaaggccgacggaatacccgaaatacatgagtccgatgagcccctcggagtggccctgcccgagttccgccatacggaaagggataaggttgccgatggcggcgaagacaaagataccgcaggcttcggcgaaaaagagactggggacccccctgcccttgaaaacggcgaggtattcacgtgggctgtggaggcgcgcactggcgttgcgcatttccggaatgcttcggatgaagaggaggacaaggaaaaagaaaaaacagataacggcgagcgtggcacgccacccgaacatctgcgcagcccagcctccgataattcggccgcacagcgaaccgacaagattggaggtcacatagcccgcaagcgcacggttgagatccaggtggcggaacatgacggcaatgccggacatgacggctgtgagcaccaccggaaccagcaatgcctgtaaagcgcggatgccgagaaggacaagaaaggacggggcaaaccaaatccccacgccgcttataccgagcaggagggaagcccccagaatggcacgccgcacgccgatacggctgagcagcatccccacgcagagaggcgagacggcgagcgacagcatgaacacgctgacgagcagccccgtggagcctttgtccacaccgaaatccctgctcaccgagttgaacatgggttgcggagcatacatcagcgtatagacgcaaatggaaatcaacagaagcccggcataggttctcaagatcgcattctgatgagtgcgaggatgacccgacataatcccctcccagtctttttcagctgaaaccctcggaacatgcctctcttcgcaggcatcaaacagggcaagagcccctatcaggcagagaaaaaggtgaacagaccggagcctccgcccatatagttcggtctagtctccatgaaaaaccggctctctgaaaagcgcttttcaagctctaacacaaaactgtttctgtcaatggaatcaccgccgccatttcgacggggcaggccgtaaagggggtttagccccccctccctcctttcttccccctcttcacacatatgtccccacaacggcgcaagacataaaaaagcgcactccgaacatgtttcgacatatatgaagagcctccattgaatgctagaggaatatggtctacgtacaaacaagaaggcctcgtaaaaaggagagatgtatgccccggaaccgttttttccactgtctgacgctggccgccgcgtttttcctgctctgggaaacgcaggcgtcggcctatgaaacgcgcgtcgtaaccgaccatgcaaacacccccctgttccaactgcgcttttttgatcagggggaagagtacggcaacgccctttctgagacggaaggagaagtctccacctggcagttgagcgccgcgcaaaaagacgccgttacccaggccgtggaactctgggcggacattctcggtcccggagcgaacaacgccgtgcccgccgccatcaacgtgggcaccatgaacgaggtaaacgccgatgcgataagcgttgcgaatccgacgtggcaggggactccctgggagggagccagcgggttggcgggagcactcatcggcgatcaaagcatgaatcctccggcccagatacggatcggcaaaatgaatttcagcattccggacatcccgtcgcccctgcccacgggcaacggcataaatctggtcggaaccctgtaccatgaaatgggccatgccctgggcatttcctccttggccctcgtgggggaagacgatgacggtaaccccgtgtatggattcgatacggagatctctccctgggatcgccacttggtcgatcgatacggcgtcacccccacaaccgacatggaagtcgtccggtcagaaccagaaacagcgccgggggccgaccccgtgttcacggtcggcgagatgacggaaagcggcgtcctcttcaaaggaacacatgtgagcgaggtgctggcgggcgcgctgaacggcgggctgccgatagaaggctttgaaggggatagcctggatctgtcgcacatcgagctggaccgcagcctcatgagccatcaggactaccgcaactatcaggttttcatggaagccgaactcgcagcgcttcaggatatcgggtacacgattgaccgcaaaaatttttacggtttttccgtttacggggacaccctgacgttcagcaacggacaggggtattttgcccgcaacgccgacggcacggcgtatctgcccgggcagcccaacaccgcggcctacggcgtgggtctgcatatctacggcagcgacaacgacatcacccagaccgcggatctgctggcctgcggcacagccggaaccggaatccgcgtggacggcgaggccaacaccctgcgcatcgcccccggagtgcgcgtgtccgccgacggcgcctatggcacggggctgcttctagcttacggcaaaggccagaacgtcgtcagccggggagaaatccgggctacagggaccggcggcgcgggtgcgcgcttcgacttcggcggcagcctgctcggcctggactccggcctgaccgccgaataccgcggctcatacatccgaagccggacggaagccgcagaggatgagtccggcaacatcgtcacccagctttatgaacggtacgatctgctcgacgaactgaaaggcccgcttgcggagcgtttcgacgtaagcggccccctgtccgggaatgcggccgccatatacatttcccgcaacgcctgggtaaaaaacatcaacatcgtaaacggggcggcgctgagcggggacatcatttcggactggaaccccggcaactcggacgtgcagcaagctcaagcggccgccaacggcgacgatctgctcaccagcctgagtttcggccgtctggcggcgggcgacggatcggcgacggacgcgcccgatccggacttccgcctgcgctacgacggcaacatactcggcaggcacagcatcaggatgtccgtaggcggcggcgcgctgtccttcaacgggcgggccgaggtgctggatgtgaacgtaagggagggcgcgaccctgagcggcaatgccgagtacaccctgaacgccctcgacaacggctacgtctccgtagacggcaccttcaccaacgcgggtaccgtcgcccccggcaatagcatcggtaccattacgatcaacggcgactatcaccagaccgcgaccgggcgcctgttcacagaattcgacgcttcgggcacgtccgacagactcgccgtcaacgggaacgccgttgtaaacggcaccctgtatcttgctcccctgcccggctattacgcgggaagcctctccctcacgccgatcacagcttccggaaacctgacggaagcttatgccacaaaccttcttttggactcgcccacgctggaaatggccgccacacctcaaggcggcacggccacaatcctctcctcccgcgccgccgacgcctacagccgatacgccgcgaacggcaacgccgccaacgtaggccgggcgctctcctctgctgagggggtacgggacgacatgcggaacctctacgcggcgcttgacttctccgcggctgacgggagcaccgtccgcgacgccctttcccagctttcgcccgacgcctacggcaatgcggcgctggcgagtttcgatatgcaccgtatgctttccgatttgattcttcccggcacattctcccgcgctccgcaaaaggacggggaatggcatgttttcgcacagccctacgcagggacgttcgaccagccgggacgcagcggcatgggcggctacgacgccacgaacgtcggcctgatcggaggtgcggaacggagcacgcccggcgggctgaccgtcggcgggcacgtcgtgttcaaccaccaatccatgaccggcgatgccaatggaaagctgcgcggcgaaggactgtatctcggcgcgcagggcctgtacgccccggcggactgggatggttggaacgtcttcggcatcggacgtctgggcgtggagaactggcgcatgaagcgggccgtttccttcaacggctacaaccgcgaaaacaacaaggactggaccgggttctcgggctcggtccgtgcgggcggcggctatgaggccgactggggtacgatcaaggccgggcccttcgccgcgctggactacgccttctcgtcacgcccgtccctgacggaagacaacggcatgggcagccgactccatctggattccgaaaccttccactcgctgcgctccagcctcggtgtccgcatgagcacgaatgaaaggcagctcggcgaacacgccacctggaaggctcacgcctccgccgcgtggaaccatgaactgctcgacaaggcgggcacgatgcacgcctcattcgtggaagcggccaacgcgggcttctccaacactgtgaaggtcccgggccgcgacagccttggcctcggcgcgggcgtgcgtttcaacacggacaagcacgtctctttctccttaaacgccgggagcgaacttttccgccgtgatgcaacatccgtttacggaaacctcgctgtggaatggaagttctagaattttccgacctcccacacaacaaagcccccttcctcacggttgggggcttcctcttttctgttcccgacagttcacattgggccgctcatcatgatgagcgcaccgaaactgccagccgcagcagcctcacaaacgagggcggccccccggcgcggcggttcccggcggattcaagggaagcaacgcttcatttgaatccgcggctgcgtcatatctcatactatcccacggatgggctaccgacacacctgcccggcaagctgaccaagccggtaggccatctcaacggctccccgtgttccgtatggcgaacggcacccagcatataaaaataccgtcagaactaccgacaaaataacggtatatccatataccaagtgagactcttggagagtatgaaacttggataaaaagccccgcaaggcttttgaggctttgcggggctttttgagattctttttggcggaaacgtataggagtcgaacctaccaacgacctttcgaccgtccaccagttttgaagactgggcg

SEQ ID NO: 7546 - DNA, 9129 bp, Unknown
  gut microbiota DNA sequence
attctcggctgcctgagcggaaaaattccagaggacagttttaaaatcatatctgattacaataaactggatacgcttgtcgccatacagaaagcgtattcggacttcaacgaggatcgggcgggcatttccgaggaggaaagggacaagatcaatgtggagcacacgttccatgaactcatgggcaggacaggctggttttcttgtcccggctttacggttgaaccggtgatgaagctctccaatcatgtgggggctcccgcctcaatcgtcggcaagcttgtctccggtgcggggacgcctcccagtgctttcatactccttcggatgcgttttactgtgcgggagaagatcttgttcataaaatatccggtgggggccggacatgcgatcgcgttggcacagaccccttccggtttgtacctgtttgacccgaatttagggatgttcaaggccctcggacaggcagaactggtaacaatgcttgaattcgtctttcaaatctatgaagtcgaacactatgcctctatctatattacctgagcctggagaaaatgaatgcccgccgctaccctcaccggctacgaggccctttcccgtccgtttcgttatgtgctggaatattaccctgccgagcagccggaactggcggcactgatcggcaaaccgtataccgtacggctgcccatgcccgacggctcgacgcgtccgctcaacggcatcgtgttccgtgccgaacaggggccgtccactgtgcgctccgcccggtatacgctggagctgcgcccgtggttcctgcgccttgatcaggaacgcacctgcgctgtcttccaaaatatgagcgtgccggaaatcgtcaccaaagtctgcactgacgctggattcgggcatatccgcaatgccctttcctcaacctatccggcaaaggagtacaccgtccgttatggcgaaacgtcgttggccttcttgagccgtctcatggcggaggccgggattgtgtattttttcgagcacagtgggtccgcgcacacgctggtcatggccgattcgcccgacgttttcgcggattgcccgcagggtgcgacgctggaatggcttcccgacgcgcaggacaaggagggtgggccgcccacggaaccctctgcgcatgtttttgagctttcgctgtcacggcaggttgctgcggcttcttgctccgtggatgactataacccgctgacccctgaaaccagccttgccgcgtccgcgggagaagggttcccttgcctcggctatccgttggccgggcatatcgatcagcagtccggcgaagggctcgcggctatccgcttggacgcgtgcgagtcgggagggttcaagctgcgcgggcgctcttcttgtccggggctgtccgcaggatgcgcctttgcagtgaaggggcaccccgacgggcaggtgaatgcccggtgggtggctacggaagtccgttttacggcatcgttccccggtgacggcactgccgaaaccgggcgtttcctggcggatgtttccgcggtgcccgcttccgcccgttatcgccccctgccgtttttcgcgcggtcccgcatgagcggcccgcttacgggtgtggtcacgggcaaggaaggtgaagaggtttggacggaccagcacgggcggtgcaaggtccggttccattggcagggcgcctcggatgaaacctcgtcgtgctgggtgcgggtggcacagccgtggaccggcaacggctacggcgcgctgttcctgcctcgcatcgggcaggaagtggtgatcggttttgtcgggggagatccggatcggccccttgtgacgggcatggtctacaattcgggcaatccgccgccgtgggcgctgccggagcacgcggcctgttccggcctgctgacccggagttttccggacggacaggctggcaatgagctgcgcttcgacgatacgaaggatgcggagctggtgtatctgcacgcccagaagatgttttcctgtgatgtggaggacgcccgcacggtgacgatcatcggggagggcggcgacgcgctcacgttggaaaagagcagccggatcacgacgctcaaggaaggcaacgatgcccttacgttggaaaaggggaaccgctccgtcgaactcaaggaaggtgacgatgccttcaccattgaaaagggcagccgcagcgccacattaaaggaaggtgacgacgcgctgagccttgagaaaggcaatcgggccgtgacgctcaaagagggcaacgatctgctggtgctggaaaaaggcgggcgcactgtcgagctcaaggatggcgacgacagcctcaaggtaaagggcaagcggcacgttgaaacgggaggcgatgaggagcgcaagcacggcggcaacgtggtcatcaacgtgaagggtgactatacgctgaaggtttccggcaatctgactatcgaagcgggcgggactctggcgctcaagtccgccaaggcgcaattctcggcaaagcagggtatggaaatttcctcgtcggcaaacctttccgtttccgcgcaaacggaactggctcagaaggctatgatggtcgacatcaaggctaatgccaaggggacactcagcgcgggcgcaatgcttgaggtcaagggcggtctggtgaaaatcaactaaaggctggctccgcccggtatggtggagactgaaagcgttatccgcaacacgccgaatcggcgtaaaggaggatgggccatgccgccagcagcgcgcgttggagatatgcatgtgtgtcccatgcagacgccggggctcccaccgattccgcatgtgggcgggccgatacttccgcccggctgccctcatgtccttatcgggaatatgcccgcagcgtgtatgggcgattccgccgtttgcgtagggccgccggacgtcatcatcaaaggatcgtcttccgtgctgatcgggggccgccccgccgcccgcatgggcgatcagacggcccacggcgggcagatcgtcatgggctgtcctacagtcataatcggcgggtagattacttattggccgggaagtggatggcggccccacaggggctgtgatggttaggtgcgtcttcgggctttacgggcatcgatagcagcgtccctccccgggctccttcctcccaaggctttcgatgttatcgaatccctccttgtcagactttcgggtagacaaaaataaaacccgctcggacatgctgggcgggtttttgatttggaggaacagcgggaaaaggcttgcacataggataggaagtttttcccttgaccggaacggactcctgttgcgcggcctccccacgaatcgaagtttttgcgggaggggttcggggagggagcttttttgaaaaagctccctctccgatctttccccttcatgctgaaatatcgcaatgcccgtcgaggccgcacgcgttggcggggcgtgtctccgagccgccggctcctccgccgagcacggaggcaagcttggcggccacaacgggataatcggcgtaaccgcgcgccagcacatggcgctcgccgtcgtccgtttcaagaaagagcgtgggataaaccacaaagtcacccagtatatcgagcgcttcctctcgtccggcttccgcggcggcctgtaccccggggtcttctaacgctcgcataaagacgtcgccgtccacattcgctatccgcatctggacttcgggggcgagcacgtcgcggccttcgccgtaaaaggccgattgaaaggcctccatctgttcgagctcgtgtcccggggccagttttttcagcgccgccagaggcactgccatatccggggaaaacatgcggagatctccttgccccggctcaaggcggcgcaggaaatcctgcccgacggcttgtcccgtggttttggcgagccggacgaaaaattcccgcatggtcgggtgcttcctcatcatttcgccggtggtggttgggttttccaccagatcgccgctcagcacgcgtacgggatagccggggtgctcggaggaaatccgctgcatgaccggggcaaaaccataacaccaaggacaaaatacgtccgatatataaaggaaatgtgacataagagcacattactccgaaagccgccgcctgtgaaggggggggctttcgggtatcaaaggagggcctaggaagggcggattcggagggccgggcaggaatggaagtctacccccgtgcccgttgcagcgctgcgaaaagcgtctccggatcgatgggcttggcgatgtggtcctgcattcccgcttcgaggcacttttcggcgtcgcccttcatggtgtgggcggtcatggcaataatgggaatgtccggcaggaaggcccggatacgccgcgtcgcttcgatgccgtccagttccggcatctggatgtccatgaggatcacgtcgtaggccccggaacgagccatgtccacggcttcgagcccgttggaggccacatccaccgcaatgcccttcattttcaggatttctgtagctactatctggttgatatcgttatcctcggcgagcaggacccggagcccgtcgagcggcgcgggcgtgttgcccggcgcggtgctttcggcctccttgaggactgcggcaggccggcggaagcggagcgtgaaactgaatgtggatcctttgcctaccacgctgcgcacatggattgtcccgcccatgtgctgtaccagcacccgcgctatggcaaggccgaggcccgtgccgccgtagcgccgggaaaccgacatatccgcttggatgaacggctggaacagagagggaagcttgtccgcggggataccgatgcccgtgtcgcgcacggcgaaacccagcgtgacggtctgcgggtccgtctccacgcaccggacgaaaagggtcacgctgccttcatgcgtgaatttcatagcgttccccacaaggttgagcaagatctgcccgagccgcgtgggatcccccacaagcgactggggcactccttccccaacgtcaaagcgcagggagagccccttttcccgcacggcatgggtgaacatctggagagtgttatcaagcacctccgagaggttgaacgggatttcctcgaagtccattttgccggattcgactttagaaaaatcaaggatatcattgatgatccgcagaagggtcttggcggtgacgtcgattttggcgaggtaatccgcaatggcggcggggcattcgcgctggagcgcaagatatgtcaggccgatgatcccattcatgggcgtacggatttcgtggctcatggtggcgaggaactcgctcttggcacgggtggcttccaaggcttcctgctggcttttgagcagttcggcattgcgggccgcgagttccgccgtgcgcgtctgcacctgcgcttcaagttcagcggcgcgctggagggtgtcgagcgcctcttgtttgcgggcgtggttgtcgatgacgatgcccacccgttcggccttgtgggtcagcgggttgatcgctttttgccctttgaccagtatccaccgccagttcccgttgccgtcccgcacccggtattcgtactccagcgtgccgccggcgtcttcggcggaaaagctttcaaacacgttgcgcacgtgctccacgtcgtcgggatggcaccggagcagaaaatccgggagcgtcatgtgcagcacgccttcgggccagcccagcatccggcagacgtgctcattgtaggaaatgagccctgtttcgagatccgtggaccacaaggggatgctcgcgctgtccacaaggaacttgagcctgttttcgctggcggaaacctgctggacaagcgtttccagctcgcaggactggcgctcaaaggcaagctgcgtttccttctgttcggtgacgtcgatgatgacccatacgccgatttgccccagttcgggatcgttcacctgccgcccccggatgagggcccataagcgggtgccgtccctccgctggaggcggtgttcgagcgacagcatgccgttctgggaaagctggctgaaaatcgcttgcatcgtcgcgttccgctcttcggacgcgcagaggctaacggccgcgttgcgcttttccttgcggagctggcttcgggtatagcctaccatattcaggtagccgtcgttggcgtagaggatggtgaaggaccgatccagccttgtaatgagcaggccaccgagcaggtgggaggatatggcgtcaagttggagatttttctcgcggatctgccgggtgagcgaactcaggagcacccagacgaggaggagaagcagcagccccgtggctccgctgatggtcagcgtcccgtcgcggagtatgttggccgggccgaggatcttgttttcgttcaccgccatgaggatccgccagtccgtggacggaatggggaaccagatgccgaggctggtgtgccgatccctggaggcgaaacggataagctgtccttccggctgatggaaaatattctgcttgccggggctcagcatgttgtctggaggcgcctcgctgttccatgaggccagcactttgccttgtgcgttgatgatgtggaaatagccgtcgctcggagcgatggaggctgtgcgtttccagctttgcagaaaattttccagatcaatgatgacgacaacttcaccgatgcgttcgccgccgcgttcgccgtcgctgcggacaggggcgctgacgtaggccatgaccttcccgtccccgttggtggtgctgccgaaggaaggccgatcaatatcggagaaatcggtgcggacactccgggtgatgccgggcatggccgtggtggagctgaggattatctggccgttcttgttgagaaggttgaggttgggcatatccgactggtgccggatgaacaggcgcgtaagccgccgcgccgaatccatctcttccgccgaatcgggattcttgagcagccggcggatggggccggaggcggcgagcgtctcgacgttctctgtgatgccggtaaaataggtgtggatggcatcgacggcgctttgggcgatcattttttgatgggcgacgagctcctgttcgaggatgtccttggcgttatggtagccgaaccacgccatgatcccgatggacaggactacggcgagcaggacgggagcgaacagcgtaagacgttttggcatgtggtcggggtgcgtttgcggacggcggggccgagagcgttgatggtgaaatcattttagccttttgacttgtaggccgcaaccgattttcggggaaggtgggaggaagggctttgaaagggcatagaggcattggggagagggaactttttctggataaaggtttttcctctcttccccaagcttgccggcggggagcccatgcctttccaaaggctcctgtgcccatcgaatccccccacgcagcttttctggggcgatcatatacatttctaagaggaaaggctctggtatggaagcggatgcttctctcagcggggcttcccggcagtgcccattgtcattgcttcccgccgtaacccgtccgtttcaccggagttgcacagagcagggaaatgccgtatccgttcagcggtcaggctcccgttatttgctgtccggcattgctggggagagcccttggggttccccaggaaaattttttcggcatccgatcgggccgaagccgccggccttgcccagattcccttccgggcgtctttattctcacagcgaaggtcgcatcactttttgtaaggacgttttcccatggatgctttgcttgtccgcatcgccgaacgcatcacgtccggcgccgatccgcttctgtcaccttccgaggcgctggagcttgcccgtcttcccgagtccgcgacgttggacatcctgtccgtggcggggctggcccgcgccgcccgcaagcccgccgccgcgtttacctgcgggatcatcaacgccaagtccgggcgttgccctgaaaactgcgctttctgcgcccaatcagcgcatcatcaaacggattcccccgtctatcctctctatgacacggatacgctgctgcgccgcgccgaagagctcgccgccaacaatgtcgaccgcttcggcatcgtgaccagcggcacggctccgagcgatcgcgatttcgacgcgctgtgcgaatcggctctgcgcatcggccgggaagtgaagatcggcttgtgcgcctcgctcggcctgctgacgcccgagcgggccgcccggctgcgcgaggcgggttttacgtcctatcatcacaatctcgaaacctccgcgagccatttcccttcgatctgtaccacccacgcctacgagcaggatctggaaaccgtgcgcgtggcccgctccgccgggttccgggtgtgcagctgcggcatcttcggccttggcgagacgtgggagcagcgtattgagctttcccagaccctgaccgatctcggcgtggactccctgccgctcaattttctgaatcccattcccggcacgccgcttggggattcccccctcctgccgccttccgaggcgttgcgggtggtcgcgctcatgcggcttctgcatccggaacaggacgtgctcatctgcggcgggcgctccaagacgttcggccagtggcagtcgtgggttttcgccgccggagccaacggcgtgatgaccggcaattacctcaccaccaagggctgcgccttctgtgacgatgccgaaatgtacgaggtgctggggcttcgggaggaacggtcatgaaggggcttttcatcaccgggaccgataccgatgccgggaagaccaccgtcaccgccgcgcttctgcgcgccttgaaggtcgccggggtgcccgccgccgctgtgaaacccgtacagacggggtgcgttatgcgggggggagaggaagagaatcggggggaggccgcgtctcatgagggggctttctcggcgggaggggatggggactccttgcaggcgcgaaaggaagactgtgcttgtggctgctgtgggaaaggtggttccagtactcccgaacacctgaagggttggggaaacgcaggcatgggaggcgtgggcgcttcgttgggagtgtcttcttcttcttcttcttcttcttcttcttcttcttcttcttcttc

SEQ ID NO: 7547 - DNA, 2637 bp, Unknown
  gut microbiota DNA sequence
tcccgacgtggcctgctacgaggcggcgggaggcggcgggatcgtgctggaaacctacgagcccgcgtgttcgccgcatttggcggcacggctggcagggcgtccgctcactgtttccggcttacgggaaaagctggagcggaaggcgccggacgggacgtttctgctgatcgaaggcgcgggcgggatttacgtgccgctgaatgaccgcgaaaccatgctcgacttcatgcgggagatcgattttcctgtcctgctcgtcgtggggaacaagctcggctgcatcaaccacgccctgctttcgctcgacgtgctgcaatcgcacggcctgcgcgtgtgcgggatgatcctcaaccgcccgatcccggaaacggtatgcgatccgggttccggccccgatccggatgtcgggaacgaacgcaggctgctgcgcgacaacgccgaaaccctcgcccgcatgggccgggaacgcggcgtccccgtgctcgcggaaatcccctaccaaaccggattcgcaaacaatgccgaaaacgtatggtccagcctcgccgcccttgtcgggtctgccgtggaagccctgagcccgttgttctcggactgcctttccaatggaatatgccccggcaacgcttcatcacatatcgtctccccgtcttcttcccatgaacgcgggcaaacctcccctgcatcttcatgctccaaccgggaaagctcccgcgtggcctccccccacattccctcatctcctctttccccttcttcgcttctcgccttcgaccgggaacacctgtggcacccgtatacgtcggcgctgaacccgctcccggtgcgggaggcggtgggcacatcgggcgtgcgcatcaggctgcgcgacgggagggagctggtggacggcatgtcctcgtggtggtgcgccatccacggctacggacaccccgtcctcatggacgccgtgcggcggcagtccgcgaaaatggcccacgtcatgttcggcggcctgacccatgagccagccgtggaactggggaaacggctcctgccgctgctgcccgacaatctgaaacacatcttttacgccgactcgggttcggtctcggtcgaagtcgcgctcaagatggcggtccagtattgggcctcaaagggcaggccgggcaaaacccgcttcctcacccccaagggcggctaccacggcgacacgcaaggggccatgtccgtctgcgatcccgtaaacggtatgcatacgctgtttaccggcatcctgccgaaacacctgttcgtcgagcgcccaagctgccgtttcgacagcccgttcgatcccgacagcctccggcccatgcgcgacgccatcgagcgccacgcggaggggctggcggcggtcatcctcgaacccatcgtgcagggcgcgggcgggatgtggttctatcaccccgactacctgcgcgggctgcggaagctgtgcgacgagcacgaactgctgctgatcgttgatgaaatcgccacaggatttgggcgtaccggcaagatgttcgcctcggaatgggcgggcctcaagccggatatcctctgtctcggcaaggcgctcaccggcggcaccatgacgctggcggcgaccgttgccagcgaagccgtagcgcggggcattgaagaggccgggccggagcagggcggcggcgtgttcatgcacggccccaccttcatgggcaacccgttggcctgcgccgtgggatgcgccagcctcgaccttctgaacgcctcgccgtgggccgagcgcgtggaaggcatccgccggggccttgaggaagggctttcgccgtgccgggaattccggggggtccgcgacgtgcggacactcggcgcaatcggcgtcgtggaggtggacaagcccgtgaatatggccgccttgcaggatttcttcgttgagcgcggcgtatgggtgcgtccgttcaaccggaacatctatctcatgccgccgtactgcatcgggcctgaagacctgcggcgtctgacggacgccattgtggacgccgtgcgcggggcctattcctgatagtgttctgccggggagagcagaagtacgggcgtaccttgcggtgcgtccgcgccaaagcgtggcggagagcctctccgtagttcccggaaaggctggggggtatggttcttttcagcaagtgccttccccgaaccatccggcaagcttggcgtcggctttggccttggcctcggcgtctatataggaagcggccatgaccaccgccgccgcgagcacgccgatgtcgtcggtgaagcccacgaccgggatgaaatcggggatcacgtcgatgggtgaaatgaaatagccgagcgcgccgtaaatcaccattttcgtcttgagcggcatggacggattgtccagcgcgtagaacaggcgcagggcgctgcgtatgccctcgcagccgactttctttgcgtgccctttgattttttcccagagcttttcaggggagaactcggaaacgtaggccgaccactggccgttttcctctttcatatcgatgatgtccttgtcgctcatggcggcctcctgcccgtgttttgtctgaatgtgggcacggcggggcggcgtgtcaagaagacgggaagggcgatcacgaaaaggcg

SEQ ID NO: 7548 - DNA, 5911 bp, Unknown
  gut microbiota DNA sequence
gggaggagaggcgcgggagcgggtcgtgccggggttacatgatgccgatgaacgtccagtaggggatggcgatgaccgcgatgaacgccccggcgacgatgcagcgggcgatcatcgtggggatgacgtgcttgagggtcacgcatccggtggtgaagatgtagaggaacatgacgccttcataggggaagaagtactgatcgagcccgtactcgaaggcgtagaacaagggcagcgggttgacgcccatctggacgccgagttcgccgaacgccggggtgaaggccacggtcgccgcgaagggggtcaggagcaggttggtgaccacgcccgcgaggtaggagcagagcacgccgagcgtggggggcagttccttgaggaacgggatgatggacgagacggcccacttgttggctccgacttcgcccgccacaaacccgatggccatgcagcccgccacgaagacgaggaacacgatgttcaggttgttgaaggaggagggctccatgatcttcatgccgggcatgtagcagaacagggctacgaggcaaagcacatacacggcgttcacgccggtccacggctcgaccataaagccgaggatgccgaggatggcgaggacgaggaggcgcttttcggaaaccgccatggggcccatttcggcgaggcgctcttcgaggatgagcttgagcttcccgccttcggggagccgcaccttgccgcgcatgaaatagatggtcaggaaggacagcgcgacatagatggtgttgatgaaacaggcgtggttcaggtattcccaccagtccacattgccgccgatggccttcatgagcacctgaaacgaccagatgaaggactccgaggtgtgcaggaactgcatggtcggggccgccgccgcgaagaaacaggcgatgacgatgatggaggacaggcgggacttgggatcgatgtccagcgccctgatgatgcccacggcgatggcgcagaagatgaccgtgcgggcgaacccggaggccagcagcaggccgaggatgatgccgccgatggcgaacccgatgagcatcccggtgaacgtgccgcccgtgaggagcatacagcgcagggccacgcgcttggcgagcccggtcttttccatggcttcgccgaagatggccgcgccgaaggtggtccagatgagcacggtggtccacggtccgagcacgacttcgggcggggccatgttggtcagcaggtagaggaaggtcagcgcggcggcgacagccacggcgggcaagagatcgaaggtccagatgatgaccgctgcggaggtcatcccgagatagaggggtatttgaggcgaaacgtcacggggagccagcaggtagaacaggctggcgaggccgagcacggcgaaccactttaaggtcagggcacggttcatggggactcctgcgggaggcgggttcagaggtcggggagccgcgccgggatgcgggattccggcgcggcggacgctgccttagatggccgatgttttggggaaggcgaagttatccatatagtagcggtgcggttttaccggataacggtccagcggaacggggtcggcacgcagatccatgccgtcgtgcccgtcgcggatgacgatccatgccggatcgccgtggcgttcggggaagtcctcgcggtaatgcccgctgcgcgattccttgcgcatgagcgacgccttcaggtacatttcggtgatcagcgccatggagcgcgcttccacgagcttgaccagatagtgcggctcgggggcggtcatgtacggcaggatgttccgtttggcgtcttcaaggcgttccagcgaacgggtgaggcccttgccggtcttgaggatgcacacgtccatcggggccatgagctcctgcatgagccggaccacgtccttgggatagacgccgggtttgccgagcagggacagggtggcgccgagcgtgccggaagcgtgggcgtcgtcgaactgaggtgcggaggtgagcccggaaacgtactcgcccgcgctgttcccggcgatgtagccggtcgtggtggtcttgcaggtgtcccagccgcccatgtagacgccgggggtgacgctgcgggcgcgtccggccacgaacaggcccggaacgccgctccagccgtctttgtcggccacggtgccgccgaatgaggtgagcacctgcggcatccattcggttttgctcttgaagaagtcgatgccgagttccttgagcttggtgtcgttgagtttcatccagccgccggtgggggtcatgatctcgacgccttccgggctcatggtgctggtgtcgaagtagatcggcccgcgtccggcccggacttcaaaggccatgccgcgcacgttgtagtgcgggtcggccttggctccgagcttcggggaatagcggcgcatgaaatcctcgccttctccgttgaggaagcgcgcgccgtaggggagcatcccggtctgcccttcccacgcgaacagcttgggcacgttccagttttcgatgaactccatgttgcgcagggaagcgcccgcgccgtaggccagcgccgcgccttcgcccgcgcaggtgttcagcaggtacgagcccttccagccgccgttgtgggcggcgaggatgacggccttggcccggaacaggcagggcgtgccgctctgggcgtggaagcccacggccccggaaacggcgtcgccgtccttgacgagatcggtgatctcgatgcgcccgatgcgctggacgttgagccgctgaagctcggcattgaggatctgcgtggtgtgcgcgccgcccttgccgtagggatggtagaagtaatagcgcatgagttcgagcccgcgctgggggatgctcatgagcctgccggaatcgtcgcgggcgaactcgtggcccatcttctcgtaatccttgaagcgctcgtaggactggttgaggatttcctcaagcacatcctgctcgcacagcccgtcatagtaatagaccagctcttcgaccagatccttggcggcgaactccggctgcttgacgatcatgtcgccgccggacatcccgccgaggccgccccagtcgcgggggcccttgtcgacgatgagcacgttctccacatgttgccgggccgtcagcgcggcccacgaacccgaaaagccgccgccgatgatcagcacgtccgtatcgaaaacaaaaggtttcgcgctcatggctagtcctcgcaatggatttcaagggtacgcgggagcggttccttgaaaggatgcacgttgatggcttccgccgggcagcggagctcgcaggtgaaacaggtcatgcagtcgtcgttgtaggcgatgcgggccttggccccgcaggtcatgcagcgcataccttccgccagcacggcatggagatccagcccccgccgccgttccccgaatccgggggcgtcggtcacggcgcgttcgttgcgcggggagaggagcacgccttcgccggggagcctgtccttgtccacggtttcgcggacggcggcgcggttggcgaggatctggcctccgcgcaggtagcggtccatcgagaaggctgcctcgcgtcccccggcgatggcttggatggccgaggccgggccgctggcggcgtcgcccgccgcgaatacgtcggggcgggaggtttcgaaggtgacggcggcggtttcgatggtacggcggggcgtgatggccacgtcctccgcgaagggatcgagatcggcggcctgcccgatggcgaagatcacggcatcggcggggatggtgcgggtttgcgcttcatcaaaggacgggcggaacgcgccggaagcgtccttgacggaaaggcaggctttgacggcgaggccggaaacggcgtccgtgccttcgacgcgtaccgggccccagccgcactgaaaatcgatgccctcgtcgcgggcgtcggcgatattgtgcggataggcgggcagttcggcttcggactcaagggaaaacatgctcacggacgatgctccgaggcgcttggcggaaatcgccgcgtcgacggcaacgtcgccgccgcccacgaccacgacatggcccgaaaacgtaggagcgtgatcgccgcgcacggcgcgcaggaactccacgccccacagcacgccgggcagctccgcgccttcaatggcgatcctgcggctgaggctggttccgggggcaagaaggaacgccttgtagccgcgccggcgcaaatcgccgagagctaggtcgccgcccttgccgatgcgggtgttgcagcggaagctgacgccgagggcttcaagccgggccacatgcgcctcgaccacggcgtcgggcaggcggtaagccgggatgccgtaacggagcataccgccggggcgcggcgcggcctcgaaaacggtgacggggtagcccatgcgggccataaaacaggcgcaggaaagccctgcggggccggaacccaccacggcgaccttggccgtatgccggacggcgggctgttcttctggcaggtcgagatcgccgaggaactgctcgacggcgttgatgtttaccgcaccgtccacggcattgcgcgcgcattccttttcgcagggatggaagcagatgcggcccgtgatgccggggaatgggtttgcctgacggagtttttgggcggcttcttcaagcttgccttgctgtacgagggcattgtagccgcgaatgtcggtccccgcagggcacgccgccatgcagggcgaaaccttgctctggtcggtgtcgaggcggaacacgtcgaggctgcacgacttgaagcaggtcccgcatccgatgcatttgtcttgatcgataacattgatcacgtcctgtctccttggcgttccccgcgtcgcgggggacggctatgtgaagggtgaggggatgggcgggcgcgcatccgccctccggctcacttcccattgtgcgaaccttcacacaaccgttctcaagaaaatggcgcatctgcgccatttgtgaaaaaaagtggaaaaaagatgagataggacgaaacagtatggattatatgggtttttctgtagatgttccgggttattccccggctattttttgcaggagcgcgaggtctccgatacggaggcggttcttggtgagctggaggagggcgccgcacccacgcaggaccctcagggccctcacaagcgtagccctgtgcatcccaaggaaaatcgccagttcttcctgggtcatctgggggttgaagtcgagcttgtcaccgtgcagacgtgaaagcccgcacaaaaagaggctgacctgcttcactgccgtaccgccgcccgtttcggaaaggttggcgtgcatcacgagcaccttggtgctcatggataccatcaggttgatgatgagttccgggtattcggcaacgaagcgcggatcatggagcagcgtgccggggaagcggtacagttccacgtcttccatacagtagaagcggcagtcgggatcgtcgaatccggctagtgccgtggcctcattgaatacattcccgctgccgatatagaccatcgcccgttcgcgtccgttctccgcgccgtgcatgatccggaggcgccctttggcgaggtagtagaagtcgaacatggcgtcgcccgccagtacgagggggtagcgtttcgggtaggtgtagcgcgtcgccagatggagcaggcggctccacggcgcgttcatgtcctcaagtttcccggtgcgggaggaatcggcatccagcttgagcggtttcatggagcctcctgtcgtcacagccctttgtcgagtgacgctccctgatagcccgtgcgggttggcgaggcaagcgatctcacggggctccgccccggaccctgccgaggggctctgcccctcgggaccccgcaaggggcgagccgcctcttgacccggcggcgcgat

SEQ ID NO: 7549 - DNA, 784 bp, Unknown
  gut microbiota DNA sequence
agccggctttttccgccgcctgatatgtacctgacgatcccgcaagaaaggactgattcggatgaatatcctggcctttgaatcctcgtgtgacgagactgcggcggcggtggtgcgggacggccgcaccgtgctgtccgatgtgattgcctcccaggcggatatgcacgccgtctacggcggcgtggtgccggagatcgcctcccgcaagcacgtggaggccatcgcgggcctggccgaccaggccctggcccgggcggggctgacccgggcggacatcgacgccgtggcggtcacctacgcccccggcctcatcggtgcgctgctggtgggggtcaacttcgccaaagcggcggcctatggactgggggtaccgctgatcccggtgcaccatgtccggggccacatcgccgccaactacatcactcaccccgagctggagccccccttcgtctgcctgtgcgtctccggcggaaacaccatgctggtagacgtgagggactacacggacatggcgattttgggcgctacccgggacgacgcggcgggggagtgcttcgacaaggtggcgcgggtgctgggcatcggctaccccggcggcgcgcccatggacgcgctggcccaggggggggacgaccggcgctatgagctcccccgtgcccacgtggccgacgcgccgctggacatgtccttttcaggcctcaagacggcggtgctcaacctggcccacaacgccgcccagaagggggagacgctggatctccctggcctggccgcctccttt

SEQ ID NO: 7550 - DNA, 423 bp, Unknown
  gut microbiota DNA sequence
actatcgccttgccgggaagacccgaggataaaatgcaaaagcggtacgctgccggactctccggcggtgtgccgcttttttgcgcagcatatttctttttttggcggttcgtggtagaatatactgtattcatctgcgcataaggagggggagaagatgcagcattcgaccattgcggccattgctaccgctccgggtgcgggcggcatcgccatcgtgcggctgtccggctcggaaagctatgaagtggcagcgaaggtgttccgtccggccaacccagccaaaaaagtcgcggacgccaaaggctatacggccatgttcggtgcgttcgtggaaggggaagaggctttcgacgagggcgtggcgctgtttttccgcgcgccccacagctacaccggcgaggatgtggtggagctttcctg

SEQ ID NO: 7551 - DNA, 749 bp, Unknown
  gut microbiota DNA sequence
ccggaaagctatgaagtggcagcgaaggtgttccgtccggccaacccaggcaaaaaagtcgcggacgccaaaggctatacggccatgttcggtgcgttcgtggagggggaagaggctttcgatgagggcgtggcgctgtttttccgcgcgccccacagctacaccggcgaggatgtggtggagctttcctgccacggcggcagtgctgtcgcccggcggctggtggaagcctgcattgcggcgggcgcgtcgcctgccgctcccggcgagtacacccgccgcgctttcctgaacggcaagctcagtctgacccaggccgaagccgtcatggacatcatctccgccgatggccgacagggggcggcgctggcaaatgcctccctgaacggtgcgctggcccggaagatagcggcccagaaagatgctctgacggccttgcaggcccatctggccgcctgggtggatttccctgaggaagatgtcccggaactgagccagagccacttgtgcgaggtcttaggcggggtagagcaggagctggacgccctcatccagagctacgatgcgggcgctgtcctccgcgagggcgtggactgtgccatcgtgggcaagcccaatgcgggcaaatccaccctgctcaatctgctggccggatttgaccgggccattgtcacgccggtggccggaaccactcgcgacgtggtggagcaggctgttcagctgggcgacgtccggctgaatctcttcga

SEQ ID NO: 7552 - DNA, 930 bp, Unknown
  gut microbiota DNA sequence
gaacgggaacactttgaagatacggacaaacgtcctggcggcctcaggccccagatataaacagggggtcccgagtcagcctgaaccgccccggaacccctgtccgcgcccaaaaacatacctggcgcaattctcttcatttccagcttaatccgtcatttcgatatgaacccccaagaagtgatcagataagtcagctggttcgctgacatatcgatattcacggcataaacgggagcggcggtatgttcagtgaggatggcttcctctttggaaggatctttgacggtggaggcaagcgccttgaaaaagccctgcgtcgtgaacaagacggaacaggccccctcagtggcggtggaaaagacattgaggcgcttgcgcatggccgtccagcattcgtcgtcgctctttccctgtgccgcaagctgataaagatcggcatggcccatcgcgggctgcacggttatcggcatacaatcctgggcgcgcaggtcgtcgaacacccgcgcgaggagcggatcgctcatattcgcatacaggattaccgcaaccgccttgccctcttggaactgcaccacgcaagtccaatcggcctccatccacttgaacggaagctggagcatgtcggcgttgtcggtgggttttgcgccgagcgctttcgcctcatcttcggacatgccgagcgagaaagccccgatgccgcgctccccggtgggagcgggcttttcggcggaagcggctgattccgagtttgcggtatggacgtcggcatcagcgccggaaggaaccttggcgggaacgggggcggagggttgggccgcctcggcggaggcaggtttcacttgagccgtaagctgatcatccgccagtgcgacggaagaggcgaacagcacggcggcaaggccgaaaaggatatgtttcatgattgag

SEQ ID NO: 7553 - DNA, 3961 bp, Unknown
  gut microbiota DNA sequence
gggatggggtttggggaagggagggaaaagcttttcttcagaaaagttttccctcccttccccaatcttccacttctacttccccatcaaccccgcgatctcctcccgcaggacgcgggcggcggcctcggcggcaatgcggtcaagctcgttctgaatacggctcataacgtcggcggtgatggcttcggtgtcggggagatccggcaggataagctgcggaagcgggcggctctccaactcctgcacgcgccgctccaattgctccagggcgcgggccgaagcttcctgctcctcggaggctttttccatgtccacacggacgagggcaaggacatcctgcacaatgccggcggcgtcgggagcctgcacgggccggctctccaacagcgcgagccgccgctccagcgattccagcgcaaggccaagcacatccgggccgtcatcgggatcggcttccggagaggaggattcccaagggatctcagcggaacgggaggggacggaagggaatgtgggctcttcggccacctcggcggaggaaccgggaagcggtgcggcttcgggggcctcagcggaaacgcccgaaggcgtggaaccaagctccgccgcaagcgatttcaactggccgcacagggcattgccttccgtaagcagagactggatgtcgccggagatcgcagagacgttgagatcctgctcagcggcgccatccgcgcgctgttccaaggcgaccacccgttcattgagacggctcaaggcttcctccagccggataatacgttcttccatttcatggccgcatgagggctccgcttgcggcacggcggcgctgacgggaacgtccggcacagccacgggcacgaacgcaagcgcccgatccgagccgtccccggaaggttccggcaacggctcggcaacctcatccgccgatacggaagagggcaacgcttccgacggttcctcaacagccccttccggcgcggcctcggcctgttgggaaaggccgggttcggctttcgagccctcctccccttctggggaaaccagcatgggagcctccatagcgggctccggcgcaaccggcgagggcccaacctgtggggcatccgcaaccggagcgtcgccgaacaacaattccagatcctcggcatacggtctttcagcgggttccgggacggggggttcctgagcttcgaggtgcatctcggcaaactcctgatccacggcgccggtggatagggccggagcttccgtctcgtccggaaccccggaggcatcggccatgccgggagccgtttccacaccatacccgtgtacgaccgccccggccttcgccatttccgcttcaaaggcgcggatcagcgcctcgtccggctcttcgcggacgggttcgccaaggctctcggcgggagcctcttcttccgcgccatccgaaacaggctcctccggcaacgcggaagcctcgcccttcggaggcagcagcgtcatgaggggcgtcttttcgatctcttcaagaaaatcatcgctgttctcaaaaggataccgggacaccacccgttcggactcttccccggtcggggtttccggatcggccgcttcgggctgccccggcagggcttgcccgccatcatcatgaagagccccgcggggctccggttcaggagacgcctcggggtcatcgacgatatcaaaaaggtctatgatgccttcttccgggtcgtagggatctttccgcgccatactggcctctcgtcggcaaaaaatataaatggatacgagtagagtacacgcatcctgcgcgatctggcaagcgccaaccggaggacggtttacaggccgcccaccaccctgtagactggatgcggcctttcatcctgcctctttttcagactttttttggagatcgcatggagcgtccagcatcctcaactcttccgaccacgcccggcatctatatctataaggacgcgcaggggcggatcatctatgtgggcaaggcccgaaacctccgcaagcgcatcctttcctatttccgggacgcttcggccctgaccccgaaaacggtcgccatgatcgggcacgccgcctcgctggagacgctttccaccaccacggaaaaggaagcgctgctcctcgaagccagcctcatcaagaaacaccgcccgcactacaatatcgtcctgcgcgacgacaagcagtatgtcctgttccgcatcgccaaggacgccccctatccgcgccttgaggtcgtgcgtcaggcccggcgcgacaacgcccgctatttcggccccttcacctcggggcaggcggcccgcgagacatggaagaccatccaccgggtcttccccttacggcgctgcgtggaccgggccttcaaaaaccgcgtccggccctgcctctaccatcatatcgggcagtgtctcgcgccgtgcacggaaaacgtccccgttgaagaatacgcctccctcatacaccgcgtggaactgctcctctccgggcgctcccgtgaattgctcgatacgctgcgccacgccatggcggacgcgtccgaggccatgaattacgaacaggccgccgtgttccgggatcagatcaaggccatcgagcgcacggtggaacgccagagcgtggtcctgccggaaggcggcaacatggacgtggcgggcgtggccccggccaaaggcggccttgccctcgggctcctcttcgtgcgcgaagggcggcttgtggacgggcgcaccttcttctggccggatctggaactggcggaaggcccggaattgctctggagcttcctcgggcagttctacggcccgcaaacatccattcccccgcgcattgtcgtgccgtggctgcccgaagacacggttctgcccggaatgtccggcgagcaggacgctccggactccgcctctccggcaaaagttcacattgcaacactcgaaggcgaagcggaaccgcctcacgccgccggaacggattccaacgggcacgcccccgacgaggtggaatccctcgaagcgctggaagcggcccttgccgacgcgcgcgggggcatcgtccgcatcgccaagccccgcaatgccgccgaagcccggctcgtggacatggccgtctccaacgcccgcgaagccgccgtcaccaagtcggaagtccccatgtccgaccgccttgccgccgccttcgcgctggacaaggtgcaatccgccctgcccggggccgtcccgatggcatcccgccccatccggcgcatcgagtgcgtggacgtttcccacacgggcggcacgtccacccgcgtgggcatggtcgtcttcgaggacgggcagccccagaaatccgattaccgcacctatgcccttgaaggcgaagcggcctgcaacggcgacgactacgccgcccttgccgagtggatgcgccgccgcctcgaatccgggcctccgtgggcggatctggtgctcatcgacggcgggcgcgggcaggtttccgccgtgcagcgcatcgtcagggaatccaatgccgaagggctgttcctgctggcgggcatcgccaaggcccgcgacgacatggggcgcgccgaccgccgggccgggaacgtgggcgaccggattttcctgcccggccggagcaatccactgccgctgcgcgacggttccgccgagttattgtttctccagcatatccgcgatacggcgcaccatttcgtcatcgggcggcaccgccgggcgcgggcgggcgcggcgctttccgccgaactgctccgcatccccggcgtaggcaaggccacggcccggctgctctgggatcatttcaaggcccttgatgccatcattgccgccacgcccgcccagcttgccgcgatccccggcatcggcccccgcaaggccgaagcgctggcgggcagtttgaagaggttgaaggaatgaattggggaggggaggaggggcctttctggagaaag

SEQ ID NO: 7554 - DNA, 2695 bp, Unknown
  gut microbiota DNA sequence
gaggggaaactttttaagaagtttcccctccccctctccaattgtcattctctttccattcctaaaaacgccgtggctttctcctgcgcctcccgaggaagcagcggaagccacgcgggaaggcggaaggcttggaaatcgggaagcgagacccgcccgtgatgcaaaagaaaaccggaagggcagggcaattccgcgccatagagggaatctccggccagcgggtgccccgcggcggcgagatgcgcccggatctggtggcgcgcgcccttgcggatgcggcagccgacgagcatgagcggggcatcgggatcatcggattcgacgaggccggggacgtcaccggcggtcaggggagccagcagggtaacatcggtatgccgcaccggatcgggatcgtcggtatggcgcacccgcgtcttgttccgcgtgtccgtatccagacggcgggccacggtgaaatcgtagagcggctggccttctatcagggccaggtacagcttgtccgtgttgccgatgcgctcggcccgataccagcggcgttcgccgccatcggtacaggatgcgagcacaaggccggaggtcggcgcgtccaggcggttgagcaggcgtgatgcgtagccttcctcttccgaaggcagcagatcgccgagcagggtttcgaggcttggggaaaggcttcccgccagagcggcggtgtgcatacccgcaggcttatagagcgccgcaatcccgccgtccttataaacaagggacggagcgtccttcggtatggccgcgccttccgggtcgggcaggatgatgatttcctgccccgcgcgcagtttgaggccggggatgccgggtttgccgttcaccagcacgagggaacggtcgcaaaggcggcggcgtgcccgaaggccgagatcggccagcgcgaacaggccgggccgggcggcttcctgttcgggggaaggggaggccagcaagaggccgagggccttgtccagacgccagccctgcgcttcttcaggcacacgaaacgagatgccgccgttttcggggcggttcgcggaagagggcatgaggcgggcttagtggttgtttggggaagattttttgatatacgtcaggccagcggctacggcggcgatgccgaggaagaaccagatgaaatccatgtggggctccagcgttgaaatggttgcggatgtcttgaagtgtagcgtaaaggagaggacggagcaagggaacgctcccggctcttgcggcggtttcccgccggcctttcccgttgcgcccggatcgggcgcgtgaacttttttccccagagtatccatgaccacacagcgaatagctcttgtcggtgcgggacttgccggttgcgaatgcgcgttgcagctggcccggcgcggtttcgccgtcacccttttcgagcagaagccggaggcctattccccggcgcactccatgccgcagcttgcggaactggtctgctccaattccttgcgatccgacgagctggcatccggtgtcggcctgatcaagcaggaactgcgcgaactcggcagcgcgctcatggccgtggccgacgctacccgcgtcccggcgggcaaggcgctggccgtggaccgcgagctgtttgccggaaaggtgacggagcttgtggaagccgagccgaatatcacgcttgtccgcaaggccatcgccgatcttgatgatcccgctttggagggattcgagcgggtggtcatctcagccgggccgttggcgagcgaaagcctgtcggcgtccattgcacgggccgtcggcgcggagcacctctatttttatgatgccatcgcgcccatcgtggcggcggattccattgatatgggcatcgctttctggggctcccgctacggcgagccgggcgagggcgattatctgaactgtcccatgaacgaggacgagtacaaggcgttttatcagggcctgctcgacggcgagaaggtcgccagccgcgaatttgagcaggagaagcattttgagggttgtatgcccgtggaggcgcttgccgcgcgcggcgagaagacgctggccttcggtccgctcaagcctgtgggcttcacagatccgcgcaccgggcggcgtcctttcgcgttgcttcagcttcgccccgagaacgggaacaagacgatgttcaatctggtgggctgccagaccaagctgacctatcccgcgcaggcagtctgcttccgcaaggtgccgggccttgagcacgcggaattcgtgcgtttcggcagtatgcaccgcaatacctatgtgaatgcgcccgtgtccctgaatgaggagctcgccctcaagtcccgcccgaacgtgcatcttgccgggcagatcaccggagtggaaggctatgtcgagtccatcgcctgcggcttgtgggtggggcagatgctggcggcgaagctggctgggcgctccctgccgaagcccccggcaacgacggccctcggtgctctgctcaaccatctgtccacgcccgccaagcattttcagccgtccaatgtgcattttgggctcatgccggagcccgaagtccgcgtgaaaaagaaggaacgcaagcagtggtatgccgatcgcgcccgtgccgcgtttggcgagtggttgaaggggttggagaaggaaggggattgaaggttggggaggggagaggccccctttttcaaaagggggc

SEQ ID NO: 7555 - DNA, 805 bp, Unknown
  gut microbiota DNA sequence
agtcgtcggcctgtggattgaaaagctcgacgcaaggagggtcgcatgagcgccgccatcttctgcccgcactgcaagctcaagtacgacaaggccgtgaggctcaggaggcaccgcgacttctggatctgctcgtcctgcgcggaatactacaccgccgagacgctggtcacggcgtgcgagaacgccgcacggtcgtttctggcaaaggccaactaccttaaaatcatggcacggagggcggcggcatgaagatcgacatctggaaaaggccgtggctggcggtgctcctcctgttcctctgctttctgctcgtgggctattttgagcggcaggatcaggaactctttgaacgaatggccccattcacggaggcaatgcgatgaactggacggacgacgcctacggcgaagaacacggcccttggacggacgaggaactcatgatcgcggcgggcaatgccgcctttgcgcggaaccggcgcaagcacacggaaacggaagaaggcggggagtaagtatatgtgcgatacccatagcgaacagatcaacgaactggcaaaggcccttgccgccgcgcagggagagcttgagcccgcagaaaagaacgctacggcagccatcggggaaaaggggaaactctcgcgtaaatacgctgacttgacggcgatgatcgatgccgtccgcaaggtgctcccgaagcacggcctttccatcgcgcagattgtcctccctaccgagggagtcgcgcacgtcaggaccatgttgatgcacgagtcggggcaatggctggcatcggaatgcag

SEQ ID NO: 7556 - DNA, 818 bp, Unknown
  gut microbiota DNA sequence
gaaggcccttgccgccgcgcagggcgagcttgaacccgcagaaaagaactccaccgccgccgtcgggaaggagggaaagctcaagcgcaaatacgctgacctgacggcgatgatcgatgccgtccgcaaggtgctcccgaagcacggcctttccatcgcgcagattgtcctccctactgagggagtcgcgcacgtcaggaccatgttgatgcacgagtcggggcaatggctggcatcggaatgcaggatgccatacgacaatacaggctccaagaacactgtgcagtcaatgggcagcgccatcacctacgcccggcgctattccctttcggcgctggtcggcgtggtggccgacgacgatgacgacggggaaggtgcatggaggcgggacgccgaccgggaaccgccccggcgtaacgcccccgagcccgcccctcagcccaagcccgagcgcgtgaaccttgccgccctcgccaaggcgttgagcgaagtgcgggacagtgcggggttcgtcgcctgttacaaccgccatcggattactgaggaacacccggactacgaggcggtcaagaacatgttcggcaagaagcgccgggaaatcgaggccaaggccgaagccgaagccggaaccccgcccgaattcgtgccgctggacgccgtgatcgccgcctttgaagcggcggaaaccgtaaccgcgctcaaggaggcggcaacccggctcggcatcccggaaaaccacccggacagtggggccatctacgccgcctaccgggaacggcagcgcaagatcgaagcgcaggacaaggaatgcgccgcgt

SEQ ID NO: 7557 - DNA, 361 bp, Unknown
  gut microbiota DNA sequence
gcgtaaccgcgctcaaggaggcggcaacccggctcggcattcccgaaaaccacccggacagtgaggccatctacgccgcctaccgggaacggcagcgcaagatcgaagcgcaggacaaggaatgcgccgcgtaacaacagccccgccctgataatcaggcggggcttttctttccctcagcaggagattgtatgagcagcctcaacaaggtgatgatcatcggaaggctcgggcgcgatcccgagatgcgctacacccaggccggaaagcccgtatgcagcctgaacgtggctacggatgagggctacaccaacgaccggggcgagaaggtcgacaagacggaatggcacaaggtcgtctt

SEQ ID NO: 7558 - DNA, 3468 bp, Unknown
  gut microbiota DNA sequence
aagattccggtaaattattcccttcgcagcagcaaggggataagccgccaaaacgcaaagaacagcgcgatgaggttggcggtccacgcggcgaggaacgggtgcaggatgccgcgctgcccaagcgtcgtaccgagggtatacaccgcgaagtacaggaacgtgcacagcagcgcgacggtcacggcgatatagatgttgtccttccacgagacaatggccgtcgccacgaaggccatgaccagaatcgatgccgcataggccagcttggcgtgccacgccgtacggagcgcctccacattggaaccggaagatttcaactggctgatggcgtccccaagctgccagagcggcaactgctgcggcttcgtgcccgtactgacgagccggaaggtttcgggatcctgcctgagcgggaggacgaaatccggctcttgctcctgcgtgaagatgtcgggcgtgtagacgcgcacatcctgcaaggcccagtggttgggctcggcggtgaacgtggacgcctgcacgatgcgcttgatgctcaggccgtcgtcggacagttcatacccggaaaagcctgtgccgtgcgcctggggatcaagcgtgccgagcgagacgatccagtccccatccgtaaaccagacatcctcaagcaccgttgccgcgaggttcttctttcggacctcttcctgccagatgcgggcggactcgcgttccccggcaacgcccagatactcagagaaaccaagctggacgccgccccagaaaatgccgcaaaggatcatggagttcgccaccacgccgagtgagatgcccccggcctgcaacgccgtcagctcgcggctgcgggccatgatgcacagttggatgaccgtggacagcaggaagatcaccggcaggatctgcgaaatcacgagcggcatcttcacgacgaagtaggtgagcaccatgcccacggacagcccggcctcgatgaagttgtcgagacgctcgaacaggtccgtgagcacatacaggccgatgccgacggcaagggtcggcagcaggatcatcgcgttgttcttggtcagatagcggaaaagcaagctcatgacgtcctccgtgtccgcaggttgcggaagaaggtcgccacgtgcggcgttcgctcatgcgccgtcagccatagcccgtagatgccgaggcagaggaacaggatgttcgggacccacaaccctatggagggggggatggccccggactcgcccgtactgaacccaagcgacatcaggctgtaatacacgaagaacatggcaagggccaacatgagccccgtctgcctgtgcagcccctcaaaggccgaagccagcggcagcacgaagagggtcagggcgatgcacgccaccggataggcccagcgcttgtggcgctccacctccagcttgttggcgtagttggcgtccacttttagcgcttcctcccgcgtgatgctggagagcttgctccatgacatctcgcggggccgcacatctccgagatcaaggctcttgaagagggaatccagcggcagccgcactttgtattcgtcgaaggccagcaccgaggaccccttcttatccgtggtgtagatcttgccgtcctcaagcaggaataccagctcgccgcgctcggtatcggtatcgaagcgcccttccggggcgaggatggtcatgtggcgctcagggtgcgaacggtcgtccaccagaacctgcgacatatccccgtcaccggggttcacctgccgggcgaaaagcaccagattggggaagtccgtattgaagacgccgggctgcaccacgacacgggcgcgtgtattggcgatttcaaggatcgtttcccggaaatgccccatgccccacgccagccaatgcagggatacccagagcgtcagcaacatgcagatcacactgaacaggagcggcgcgggaagcatctgatagatgttgatgccccccgcacgcagggcgaccagctcgcggtccgtgctcatgcgcaggaaggtcaggaagacgctgagcatacaggcgatgggaatcaccagcatgaggaacagcggggtcatatagccgaacagcagaacggtatccaagatgccgagatccagccccagaaacagttcccgcatctgcaccgcccggctgatgaggatgagcgtcagcagcacccccacggcgagaacgaacaggttggcgatttctttaaatatctgtctctgaagaagcgaaggcatcgggcaacgtcctgtaggggaacaaagttagcgtttgcacggggcggaaggctcctgtcctgtttcggaaaaaaggcgggcaagctgggccgcatccagcggcgtcagattgaagcgcatacccgcttcgtcaagcagggaggaaagcggcgcatccgggcggcggcagcgttcttcctgcacatattccaaagcgcggcggaccagttcgccgtgttcgatgagcgtcatgtgatacctccgtgattagaacgcggcgctatcaccgggcttcatggagaccaggcggacatctggagccacggaagcgagatgcgacgcaaaggccgaggtgtccttcgcaaggaccgggaatgtcccccagtgcatggggatcacggccttgggcttgagcagacgcgcggcatgggcggcctgcaacccgtccatcgtgaagaagccgcccacgggcagcagcgccagatccagcggatacagcgaacctatcagctccatcgaggagaagaggccggtatcgcccgcgtgatagaaggtaaagccgtccggcatggtcacgacgtaccctgcgggggccccggattccgaagtatggaacgcctgcgtcatggtgacccggacgcccttcacttcgatggtgcccccgatattgaagccgatcccggcgggaatgctggcttgcggcatcccggcgtcgatcaggcgttcggccgtgccgacgatgcagccgcaggttgcgccgctgcttttgcagatcgccacggcgtcacccgtatgatcgccgtgatcatgggtgacgagcaccaaatccggcttcccggcctcattccacgtcacggggcaggaagggttatgcgtgaagaagggatctatgaaaacagtcacgtcgccgcaagaaaccttaaaattggaatgaccgtaccaagtaacggaaacgctcatggaatactccttaagataaagaaaaagaaggggaagcgtaacaaacggatggacacaaaaacacggctccgacaccaaacgagccgcagcacgctcccggtaccggagcatacagcttgacaggacgcggcacaagagctagcttcccaactctgtagtgtccccttccggggaaactccgcgcccgtagctcagtcggatagagcgttagcctccggagctaaaggccgtgcgttcgaatcgcgccgggcgcaccatgaaatcaaccccttacagatagcaatctg

SEQ ID NO: 7559 - DNA, 583 bp, Unknown
  gut microbiota DNA sequence
cgcatgaatccgctgcaatccacgcctttcgatgaagttcccgcccaaagataaggtatccccatcatggtgtgtgccgtacggataatgccggcggcatcctgctgcaagccggaacgccatttcttctcgggcatggctatggatttggagatgtatccccggcgaccgtcgggataggtcaccttgtagaaagctcccttgctcccttcccacttcaaacggttgccggccacaacgtccgaaaccgtttgtgaagtttggttcggttcggaatagacaaaaccgtaatgagcagtcacaacgatcttttccgccttgttccacgcggccatttcttcttcggtcaccggatgtacacctacacgatgcacccaggcgatataattgtcgggagtctggatacgcacccagccatcgcgctgcaatacgcgcactggcatccccatcagactctgtgtcatcatttccgatgagaaatccggagcgacacgcatatttgccacagacacattgataataccgcaggttttgccttccagccccttcacatcgggaagcagttcaagacagtccatcacgg

SEQ ID NO: 7560 - DNA, 2375 bp, Unknown
  gut microbiota DNA sequence
tatgtttccgcgcagcaatgcgaatagggggttactattatgaaaatggtactggctatcatcaattaagatgattcgcaggatgttatctccagcctgatgaaagcaggcttctctatcaccaagctggcgaccaccggcggcttcctcaaagcaggcaacgtcacgatcctgatcggtctggacgaaagcaagctggatgagtgctttgacatcatccgcgagcactcctcctcccgcaagcagatcatgccggcaaccgctgagctcggcatgggctttttcccgtccacgccggtgcaggtcgaggtcggcggcgcaaccgtatttgtactcaacgttgagcgttttgaaaagctgtgatctcatttgacgcacttgcgggcaacaatgcgctcaaaaacagcctgaagcatgcgctgaacgagcgttttccgcagaccgtgctgctgtccggtgacgatccggcggcgctcaaagcccttgcgaatgtgcttgcagccggtattttatgcgaaggcgcgggcagtcatccgtgcggaagctgtctgccgtgccgtaaggtggagcagggtgtgcacccggatctgatgatcgtggacgaaggagaggccgaactcaaggtcgatctagcgcgtcagatcaaggcggaaaacgccattatcccgaacgacggcgaacgccgtgtgacagtcattcaccatgcgcagaatctcaaccccatggcgcagaacgcgctgctcaaggagctggaggagccgcctgcgtatgcgttcttcattctgaccgccgagcagccggattcgctgctgcagaccgtgcgctcgcgctgcactaaatttgcgctcgagccgtcgcatgcggcggtatcggacgaggaggcggcaagcctgctggcaccctatctctctgcggttgccgaacggcgtgaggaccgcatgatgctcggtgcaatgggtctggaaaagacgccgcgccgtgcactgttaggcgtgctcggcattctgcaggccgctgtccgggacgcgattttcgtctcaaaggctctgccgcaaaagccgctgcagccggcactccgcaagcagacgcaggcactcgccggcgccgtcagtacggaacgcctgctggcggtctacgattttattgatgtgctgatcgaccgtgtgtcgcgcaacgcggcatccgcggctgtcacctgcgcattaacaagcgatatctaccgcatctgttacgcttcctaagcgtttccatcatacaggaggaaaactttttgacaacaataatcggagttcgtttcaaatcgaacggaaaaatgtattatttcgacccgcagggtctggaaatcgcacccggtacgggtgtgatcgtcgagacggcccgcggcgtggaatacggcgactgcgtgcagggcaacaccgatgtgcccgatcagcaggtcgtgcagccgctcaagcgcgtggtccgtgtggcaaccgagaccgatatgaaaacgctcgagcgcaacaaaaagcgtgccgacgaggcgtttattatctgcaagcagaagatcgaggaccgcggtctggaaatgaaccttgtcaccgcggaatgcacctttgacatgaacaagctgctgttttacttcaccgcagacggccgtgtggacttccgcgagctagttaaggaccttgcgagcgtgttccgcacccgcattgagctgcgccagatcggcgtgcgcgatgaggcgaagatgatcggcggtctgggctgctgcggccgcgagttgtgctgcagctcatatctcgatgatttccatccggtctccatcaatatggcaaaggatcagaacctgtcgctcaatccggcgaagatttccggtgtgtgcggccgtctgatgtgctgtctcaagtatgagcacgaggcctacgccgagctgcagaaggtcacgccgcgtcagggcagcgtagtcgatacgccggaaggccgcggcaaggtagtttccacccagatgctgcgcggcacctgcaaggtacagctggacgacagtccggagcactcgctgaccgagttccagtgcacgcagtgctgcatggtaaagggtgcgtgccgcaaccgtcagaatgccgccgctatggccgaggaacgccgtaagcgcgaggagcaggaggatgctgccgctcccgcacccaaaaaggatgcaccgaaaaagagcgaggctccgcatcagaagccgcagcagccgcgtccgccgcgcaagcttgccccgcagcagactgccgcagacgaactgcccgaagaggctcagaatgagctgtctccggacggtgaaggtgcgccgcgccgtcgccgccgcagaggcggaagacgccgccgcaagccgaatggcgagaacggtg

SEQ ID NO: 7561 - DNA, 308 bp, Unknown
  gut microbiota DNA sequence
tacgtcgtatccttggcggcgatggtcagcttgtcgttcgcagcatccggcgtcagggtcacgttggtcccggctacgaaggtcagcgtgtcggttttcgtgtccgccgcaatggtggtcgaaccgacaaggatgttgctgaacgcgttctggttcacttccgcgcccggggccactccatccagctttttcttgtccgcagcgctcatgaggccggctacggactgcgtggccgcggcatacgtcgtatccttggcggcgatggtcagcttgtcgttcgcagcatccggcgtcagggtcacgttggt

SEQ ID NO: 7562 - DNA, 17170 bp, Unknown
  gut microbiota DNA sequence
ggtcgctcagcttgggaacatataatcccgtagggttagcggcgttggggcgccatttgccgaggttggcggcgatggtggcactggtggcgttgtaggcgagcagcattccggtgaatcctccgccatcatagacttttttcagctcgggccagtcggagaacaggacgaggtctccgttcgcccagacgtgattcgcggggagggtcgtcgagcgccagtagcgcggcacgccgatcatcgacaggcggagcgcttcgcaataatcaacggacttcttgtccgcagcgctcatgaggccggcgacggactgcgtggccgcggcgtacgtcgtatccttggcggcgatggtcagcttgtcgttcgcagcatccggcgtcagggtcacgttggtcccggctacgaaggtcagcgtgtcggtcttcgtgtccgccgcaatggtggtcgagccgacgaggatattgccgaaggcgttctggttcacttccgcgcccacggcgatgccgtccagcttgcccttgtcgcccttcgccatcaggccgtcgttggaagccgttgcgagggaataggtcgtgttcgtgtccacgtcgccgacaagctcgtactgcgcgccggtgtagacgaattcgtaggtccggttcgcggccagcgtcccggcggcgatggcggccccacggtactggatgggcttcgcgcccgtgccgttgacgtcgagggtcgggttggcggcgctgttggttacggtgaacttcacaaggacgcgggccccggtagccagcgcgaacccagacagcgcaacggttttcgcggcggtggcggcagccgtcgagcaggttgcgtagtgatggatgttcgccgagccgtcgaaggccacgccgccgatggtgcgtttcgtggcgaggcgggtggcggtctgggcgttgcccgcggcgatcagggccgtgatggccgctgtgatggccgtttccagcgcgtccagatcggcatcgtcacggacgcccggcgcgtagcgtttggcgacgaactgggcgagcccggcggcgacgaaggacgactggcgcagggccatgttctccagttcgcgtctggcgatccccggctgatgcccccggaggcgctgcacgtcgttcttgtaatcctccagcgccatgatgtcgccgctggctatggtcccctgtgggcaaaacgaaagaatttcattgataacggatgtgggcatgatgaactcctcttccgcccaccatgcccgcccatgccgccttttccgaccctgaacaagttcctccgctccgcgcccctcctgctcctcccccggcttccggcccctccggacaaacaaaaagggcatggcggacgcccttccgtccgccatgccccctttcgattatcgccgccctgatgaacccgcacctacggcagcggctccagcctgacgggccagatccccttgccccatccggacaggccgcccgtttcgcagttccagccgagcagcggtccgcgctccggggccacggcgtaccacgccacccgcacgccttccggcttgagcggcaggtacccttgcaggaggaggttgcgcatcaccgcgtcgagcggcgtcccggcaagcccgatgaccacggacatatcctgattgtcctgcatgaggatgaggctgcccgtgtccgcaaaggccgattcccagacctcatacgcgccgggcacggtcccgtcccagcggttcgcgccgatcttcgccttgagcagcaggcggtacgtctcgtcgggcaggcgcaccatgcccgtttcggggtcgtacagccccttccacgagccccgcgcccagcccacggcctcgcggccccattcgaaatacacgtcgtccagctcaagccgcaggtggcggctcctgccgatccattcgccggtacggtcgagctgcccgcccacggcggaatccacgtcaaaggcggcgcgcatggtttccagcagctcctgcagcccgcacagcggatcggtgaccgccgcgaccgtcgccatgaaccggggacggttgcggtgctccgaggtcacaaggccgagatagccgctcatggccgcaccaccagcttgacgcgatccaccgagcaggacgccacggcgttgaaggcgacggccacgtttgcggcggactgcgcgccctgcgacgtcccgagcgtgatggactcgatgtcgtaggaggcggcgttggccgcgttcgcgggcgagtacaggcgcgaaagcgacacgtcgtccccgatgttcaggccgttgatgtgttccgccacgttcttcctgatgctttccccggtggtggaaaggtagccggggaaaggcctgatggtgacggtggcgtacacgggcgtctccaccgggcggaagaacttgatgacgttggggacgccgaacttgtcgcgcacgagcgcctcggtcgtgccgtacgtcccggcccccggccccttcttcgcggcgatggcctccgcgatggccgccgtatccccgccttcgacgaccatgcagatgctgtggccggggatgccgtcggcgtcgggcacgcctccgtcgttctcatagccccggctgcgggtgacgccggggatggacgccacggcccccagcgtgccctcgaacacggtcagggacgggagcgcggtggagatggcctggcgccgcctgagctccgcgtccgtctccacggcggcaccgggcagggccgcggcggggttgcccacggactgccagccccgggcgggcgtgaggatcttgacgatgtccccggcggcggcccggatgtccccgctctcctccgccgtggcggtcacggtgatctcgccgctttgcgggatggccacctcgtcggggagcagccagcgtttcccggcggcgtccccggccatgccgccccggatgaccgtcccggcctgccccacaaggcgcaggtcgacggtgctgcggcccgagggcttgcgccggaggccgttgatcttgaccatgcgggacagcccggtcccctgcgccgtggcgggggaataggcgttgtagacgctcccggcgagggtataggcgtcgtgcagggcgagggcgaagacggcgcagagctgcccgtcctggctgtcgggcccaagatagaggtcgtcgccgtaaatgccccggaaacgggctttgacgtcctcaaggaccgtgggatagtcgggcaggtgcagcccggtttcgtcgatggtggcgagcgccattagaaaacctcctgtatcgtcgtttccccgtagaccgtgccgatgacggcccgcacggagagtttgcgggtttcgccgtcgaaggaggaggcatacgaaacgatgccggtcacgccttccgtatccagtatccgctcgcggaaggcggggtcatacgtgtcctgcgtgtgcttgccgagcacgccggggacgtagggcgtcccttccttgaggtcgacgaaccattcccccgcgaacagcctcagccgggtcaggacggcctgccccacggcttccggggtgtcggcgtgcatgtccgcgccgccgcgcccgaaggcgtagtcgccgttttccgtcagtttgcggtatttcattgcgggcctcccgtggtccccccgctgtcgccggggtgcgtatggctgttgaggctgatgttcgatgcggtcacgtcgcccgtggcgttgagcgatccggcgagcgtggccgtggtcgcgccgccgccctgcgactgcatggagagcagccccttgatgacgatccgcggggcgtccagcgtgatggagccgccgcttctgacggtgacggacgagggccccaccgccgtaaccgcccctccgggcgtgatctcgacgtaggcgctcccgtcgtcggcgcggagctgcgtgttccccgtgtgcacggcgggggacagcctgtgcggctggctgcgcacgccgacaagggcgaagccgtccgagaggtcgtgcatccggggctccatcggctcgccgacgccgccggactgccaccacgcgtcgatgcagcgggaggcgaacaccacaaggcactcgtcccccgccgccaccgggaaggtgagggcaaaaccgcccccgcccgggaacaccaccggcacgtccggcaggatgggcagatccacggaagcggcctttcccgcctcgtcggagatccgcccggcaacggcgggctgtacggaaaccgtcatcgccgccggatcaaaggactggacgatgccgggcagcgccgtccacatttccgcctgcctgccgtcgagggccgcgcgcagggcttcgacgggctcggcccatctttctcgtctgtccatcaccgtgcctcgtccaaaggaagctgagaggtatcgtcaatgccgacgcacgacagggtggcgtaccagtccgtgccccgcgtgtcgccggagaaggttatcgaaaggatgcggtagaggccgtcgtggacgtccctcggctcccgccccgccccggccttgagcccggccccgcccgcgttgtcgagccggacgcgcccgccgatgcgcaggcgggggttgagcaggcacttgatctcgatgcccttgtcgttggccttgggcgtgccgatgagcccggttccggcggaaagcaccacggcctcgccggggaggtagccgctggcgggcaccatctgcatcttgcccttctggaagctccacgccgtgccggtgcgcctcgcggtatcgcgcatgtaggcgcgggccatgccgtacatgaccttgccccgggggagcttctggccggggaggagagggatgtagccgggttcgatccccttggcggaaaaggccttcatgcaggcgcggacgtggtcgtcgggggtggagcccgccgccagcgaggtattgaccagcgcgtagttgtaggccctgtcgccgtccccggcgctgatctcgaggcaggtgtccaacccttcgccctcgccgccgttcttcccggctccggggccgccctcctgcccgagcgccaccttggtgatgttcccgtcgaagatgacggaacagttgccctgatacccggcctgaaggatgacgcgggtaaattccttgcggatccgcccggctgtggcctcggagaggttgtagaccctgatcgaggcgctgttgggggtttcctgctcgctcaccttgacggtgaaggcaacgcgcagttccccaaactccagcgcgccgccctccttgggcccgacgagcagcgagcaccggcgcagccactggcggccctcatcgcggcgttccccgctacggcttgttgcctcagccatgatcagccacctcgaacagcaggtccacgccccgcccgagcgtatccggggagggcggctcgtcccccgagagcaggagcgcgcccccgagccccagatacgcatacggctcaagcaggtcgcaccccgccaccagcgggatgccggaaacgagggggacgccctcggcgtcggccatgtcgagcaaccagccgccttcgggcgcgtccatccagcggacggcaagcagcagctcgcggcccgccagaacgatgctgaaccgctgcggctcaggggtcaggggaatgacataacgcattgtcgcactcactttggttgtatcttcaaggccatgcagaacgtcacctcacggggacggcctgcttctggcccttgttcgccgtcccgccggtcttggcggggttccggtgcctgccgggttcggccgggaccgccatcacctgcgtcctcacgatgatcacctcgcggcactccgccgtcaccatgagcgcgtgctcggagtccggggtggtggtcaccgtcagcttctccagcagcatgttgccgtacttgcgcttgcccgtaacgatgtcgaagggctcacgggcgttttgcagcgccagcagcgcgttgtagagggtggcgttgtacgggtcccagaccggcaggccgtaggtgctctccgacgacgcgcccctgatgaccaccttgcacggattgcggtaggcgtgatcgctgatgttcgcgccctgctccacgggatgcttggcgatggtcagggtgtcctcgtgctcctcggaaacgaccacgtcgaaggagagcccgccgaggctgcgcagcgggcgcaggaaaacgcgttccagcggttgggtcagccagttcatcgggcggccccctgtgcgtagcggatcagatccgcgttgatgttgtcctgttccacggcgacgcggcgggccacctcatccggcgagcttgcgccgctgacgttgatttccgtcctggattccagcgaaaccgcgccgccggcggaggccatcgccgccgactgccacggggcggccatcaggtaggcttccgtggagggggagaagaacggctgcgtcccgaagccgggcccgaaaaggcccgcgcgggaggagccgcctcccggcgcccttccctgtccggagcttcccggagcgcccccgaaggagccgccggaagcgcccgggaagaatggaccgccggggccgtccgccccaaaactgcccgccccggaacctcccgtacccaagcctcccgcaggagcgcccgcgaaagcgccatccgaaggcgtgccgcccacagagcccgctccccaagcgccgccggaggaaacgcccgcagcggaacccgccccccaagcattcccggaggaaccgttcccggaggaaaggccgccgtatccggaaccgccgttcccggcggggacgccctgccctccgtgggcgtacggagcgcggaatccgggcataccgtcctccgcgcccgcatcggggagccgcttccagccgagcttttccagcgcccagtcgggaagcatgtcgacgagcccgtagagcttttcccgcacccagccgagggccttgccgaacgccccggcaaccgccgaagccgagcttgccgcccacgcgccgaagtccgggaaggacgccgtgacctgtccccacacgaaggcgaacacgccgagcacggcttccccgagcgccgcgaaaatggcgaaagccgtttcccggaagcccgagaacagcccgagcgccgcatccagcgcgccggaaagatcccccgagaacacggaggccacgagatcgcggatgctctggaactcgctggcgagcccctgccccactgcctcagccgccgcgccgaggctcgggaaccgatcggatacgaacgccaccgcgccggacagcgccgaagaaagccgatcagcggcttccgaagccgcgggccccaccatatccagcgcaccggagaaggccgaggacgccgcgccagcgacgtccccgaaggctgcgcccagcgtgtccgcgacgcctccgaaagccgaaaccgccgcttccgctaaaccggaaaccgccggggccacggcttcagccgcaccggagaaggccgaacccacggattccgcaacgcccgacgcccacgcgccgaagtccgggaacgcctccatgaccctgccccacagggaggacaggccgccgaggatgccttccccgagcgccgggaagacgccgagggccgtttccccgaagttccggaacagcccgatccccgcatccagcgcgccggaaagatccccggagaagatcgcggcggcgagcccgccgaggagccggaagccgtccatgatcccctgcaaggcaatcccgatcgccgcgcccatgcccgagaacaggccggacaccatgtccgtcgcgccgccgaacgccgaggcaagcagatccgccgcgccggaaacagccgcgccggcgaagcccattgcggaggagacggccgggccgacagccccggcaatggcggaccccgcccctgttacgaagtttactgcgttatcgaaggccgatgccaccgcatccacggcggcccgcacgccggacgccacggcgtcccagacgccgaggaggaacgccttgaccgcgccccagttgtccatgacgaccaccgcgagcgttacggcggctccgatggcgaggaggtaggggttggcggaaaaggccgccgtcagcagcgcccacgcttccttgaggttggcgaacccgatgatcgccgcgcccacggccccgcgcagggcaataaaggccgcgatccccttgccgatcccggcgacgagatccgcgtccagcgtcccgagcaggcccgcgagctgcccgccccacgagacgagcaggccgagcgccgcgccgatggccggggcggcggcggaggcaagcgcgaccacaagctccagcacgcgccggatgtcgtcgaaatgcgccacgaacgcatccccgagcgcctcgatgccgctccgggccgtgcccagcagcgaaagcgccaccgtcttcgccagcaggtcgcacaggcccgccagccgcgccatgccgtcaaggaagcccttgccgtcctcggcggctttcgcggcgtccgtccccgccgtggcgtagagcgaccggaacatgtcgcgcagcccggaaacgtcccgcgtgagcatggggatgagggaaggatcgatgcccagaccccgcgcatacgcctcgcgctgggcatcgcccatctcccgcatcgccccgcccgcgcgctccagttccgaggccgcgtcggacaaacccggattgttggcgagcatggccttgagggaggccccgagcgcgtccgacgaagcgcccgtctgttccgcgatgaaccgccattccgcgaaccgctccacggaaacgccgagcgcgtccgcctgcgcggcgacctcggcctcccccttggcgaccccgacgaacgcggcggacgcgtcggcaaaggcccgccggagagcggagccgaacgccgcggccttctccaaggaggacttgagcgagatcccgtcgacctcaaaccccagtctggtgagtatctgctctccggctacagccatcacgcacgttccttttctttcgccgccataaagcggcgttcgttctcttcctgcacggtcagggcgtcgttcatgagcgccacgtcctcaagcgaaagcgtgccgtccttgaggccctcataccggcacagcccccgcaggaccggcctcatcagccagtcctgcccatcggggagcgttacccatcggattccgcagctttccccgcacggttcaaaaccgaggggaggtctgcgaaaaaaccggacaggttgtctttcaggacatgcgccgcgatgccgagcagcatggtcagatccagcgggaacatgatcacgccgttcacgcgcagcctggcgaaaccgcccgtatcctgccggatctgcgtcacgtcgaggcaggcgttcaggatgtagtccacatcggcgtcgggcagctcgcccacggtgcgggccagcgggccgaggaaggcttcggggtcgcccgcgcttccggcgagggccacgagccgctcggtcaccggggccagacgccgcaccacatggagctgctggaaggcgttcagcctgccggaatcgaaggtcttgtccttgatggtaaactgcatggctacatccccagcaggaaggaaatggacccggcgttgaacgtccactccacagccccggcatcggtgccgtaggtgatggcgggctgcttggcaaaggcgcagttctggcaggtgatcacgtcgccgcgcgcaacgtcgcggatgacgatggtgttcatgccgtgctgggcgccggtggtggtctggaggttgtacatgatctggagcgccgcgttgacgctggaggtcttgagcagcttgaccgacacggtgccggatttgtcgccgagcaggctgtgcatcacggagccgtcggccccgacggtcatcttgctccgctcgccggcgggcgtgacggtgatgccgccctgttcgaccccggcctcgtctccggcgagggagacgttgccgcccggcccgtagatggaagcctgcacatcgagaaagctatacgaatgtcccatgattttccgtcctcaatcagcggttgacgtcgatctgcacgtcgacgaaatggatggccccggcaagcttggcggcgatctggatgggcgggcacttgcgctgctcgcgctcggactgcgcctgttcggccacgggggtcgtgtatacgtagtagcccttgtcgagataatcgccgcgttccagcaggccgaaaccgtcggcgttccacgtgcccggagccacaaggccgttgttcacggcttcgccgagcacggcctcgatgcaggtgatgatctggttggcgcccgcgtcggtctgggggatcttggccttggactggtagagcaggttccaggtttcggactggatggcgttctgaagccagtcgaggccgtggatctcgtcgaagtaggccggaccggacatcacgccttcctggaagatggcggtatcgttgtcgtaggcggcgaacacgttgcagcgcttggcttcgagggcctgcgcctgcgtttcggtgaggccctcggcgacgacgccgggaagctgcttgaacttcagggtgatggtgctgcggttggccgagaagttcacggtgaaggcgcggccgagcgcggagacgatggcgtaggggttgcggctgtaggccacgatggtgcgcttgcgggccagctccttgagcttgctggcggcgtcctcggcgtatccggcgtccagcgcgcggctgtcggtgacggtgacgccgtagatgcgggccttggcggaggcttcgacaaaggcggccacgtcaaggtgatcctcgacggccaggccctcgtcggcaaagacgcagccgtaccagtcgccggacttgtcggccagcgcggccacggcttccttggcggtttcgccgtcggtgcccgcgaccgggggcaggccggtggaggcggtcatgcgcagcatggcggaaatgtcggtcccggcgggctcggacagcggggccagatagccgatcccggcggaagcgcccagcgtgctggtcttcatggcgaagcgctgcccgtcccacgcgcaggaagccccggcggaggcgagggcggcgctgacgacggcggcgacgccgttcatgttggtcgcgccggagaagtcgaggccggtgatgtccttggagacgccgcccacggaaacggcgaagctgccgtccttgacggaagcccacgcggaagcgtcggcctcgccgtcggagaggatgccgcccttgaggatggctggggtgggggttttgccccagcgtcccacgcagagctgcgcggggcggggggactgggagaaatagagttcggcggcccggtattccggggcgtccatgccgaagtcggcggccacgccgtcgatgccggtataggcgcggaggcgttcctccatgtcgatgacgccggaagcgccgatgatgagcagcgtaccgaaattgcgccgggccgccgccatcggctggagattgatgccgacgcggacgacgcggtccacgctcagagctcgtgccatgataaaactcctgtcagttgccgcggatgccgcaatcgggctgttccgcatgggtgattgccacagtgccttccgccgccttgccctgcggggacgagggcccccgccggaaggtcagcgtcagatccgcccgcccgctccagcgcagatcgtcaggtacgccgggtgcggaggaagccggaggcgtgatcacgtcccctgcctgcaccagcgcgatgttggcgtgccagagcggttcgcggttctgggaaatgtgaagccccgccttcagtttcagggccatgtcctcgcaggcggggccgaagaagctggccgggaccgtcagcgtctcaagggtgagcacgcggctcatgccctgcccgtcctcggtttcgtaatgccgcacctgcgatttggattcggaacgcttcgtgatgccgaacgagcaccacgtgaccccggtttccggatcggcctgaggcacggcgatccgttcgcggacgagatcccggggaagcccggtgatgcccgcgatcacgtccccgatcagccgctcgatgtccgaacgggccagaccgggttcgggctgaaggaagccgcctgtagcgctagtgttcatgaacgctccttttgtgatccggggcctccgcattccggagcgcccctcccccttgcggcgaggggccccctgtcatcagggcccggctttatgcgccgatcgacctgcccctgtgcggcgaggggcctccccatcgggaggctgtccccacaatgcggcgcaacgccccaaaagcgcaccctgaacaagttccggcggacggaaaaagccgaaaacgccgggccgcgggaaaccgtttgcggcggaaaaccgcccccggagaagggcatcgaaacagggggctgggcaaggggaaagggatgaaggcacggatgaaagccggagcgcctccctacgggcgggaaaggggcaacctgtccgtagagggccaaatgagaggccggaacgcctccctacgggtgggaaagggcgtgcgtagggaagcttatcggatcgggctatgggaacgccccgcggccgggaaagggggtatccattccatagctgtccatgttgatcgtaaggacgccccacgggtgggaaagggttcccccggacgggagggtcccggagctgcgcctcggcctcaagcgcttgcaggcccctccagacggggatgaaggtctcatgcgggctgaggaagctggtatgtgtgtgcaggcccctccagacggggatgagggggtgccggatgcgggacgccggagatcagccgaagaccttcatgagcagcgccccgacgcttccggcgaccgtggcgatcgccgcgagcgcggaaatcccccccgcccgcctgttctcggcctgctcaagggagctgatgcggatatcctgcatggccagccgcttgccgtgatccttgagctgggtaatcacgatgtcgtcgaggcgctggttcgtgcccgcgacctcggccttgagcccggaaagctcggccttcacttccccgatctcgcggacaagccggatgttctcttcttcgctcaccgcgccgcctccatacccttgaaccgcagcccccacccgccggaaccgggcacgggatgcgcccgccgccccggatacggggcctccgggcccgcttcccgcgccaagcccagcccttccccgccggaacaggggcttgccggggagacggttccccatacgaacggcagcccctccgcagagcccgccacgcaaggctgagacggctccgggaacgcccccgcagaaggcaagggcgggtccggtgtatgggccaaaatgcccgaaagccgcccctccgccccagaagccgggaggcccggaagcggggccggttccggtataatcccctccaatgtatctgagagcggggccggcataccccactccgatgcggaggccgggaacgtgcaggccggacgtgccgggccttccggagcggtggcgtccgccaaggccagccccgtccactgggcgcagccgcacgcccccggcagcagcgcgcacaacagcgccatcagccgccccacggcgggcacgcgccaactccgggattgccgccagccgcgggccttgccgcccggagagccgcttgggggatacgacggcccgcgcatcacttccccgtcacggctttgacttcggcctgcacggtttcggatctgccgtccgccaccgcgccccggttctgcccgaaatgcgcggcaaaggcatgggcccagcggtacacggcggcatacggccccgccgtttccttgggcacgggcatccagacggtagccaccgcgcacagcccgcagacggtcatgaccgcgctcagggcgacggcaagccacgccgcgtcgggatactgggcggcgagctgggccagtgccgaaaaaaggaaatcaatcacagccgtttccatcagtatgcgcccccatgccggtaaaaggccacgtcgcgcggcttgtccgggtcgttgtccacatggatccacgtcggggccagctcgatgcgccggaaaccaacttcaagcaacgcttgaaggatcacgaaacgggaatgggaatccacacagcggatgtccacggcatacccgcgcgtgtgggcggacgtgggcacgccccctacggccttgttgtgcttggggcaacggtaggcggacgtcagcgaaaacggcgtgcccgccagatcgcgggcctcgtcgagcagatgcagcagatcggcgtccattttttccatgcccgcgccgcacccgcacttgcagcggaattcgaccggggaaaaatgacgcaaggtaaaaccagccataggaacctcctccccccaccttggcgcgtccggcccggaagccacaccctgaacagtttccggcggagccccgccccacgcccccaaacgtacgccccacgccagctcaggagcccccggggagcctcaggttcaggcccgcgggaagctcgccccacgccgtggatcggcaagaaaaaagaaaggggcacctccccgcgcctcgggcaacaggctgccttgcgacgtttccagggttgcggcggaaacctcccacaccccgcgcacgggtctttgcgaagccccgaaccgccccctcccaacccggcaagccgtgcctgccggaaggggctcggattgaagcgggcggcggacaaagcggggcgcgcccttccccttctcagtccgggcggcataccgaaccccgcccgccgcttccgccgctcccgatcttgcagcggcttgcaatcatgcgcacataccgttccgtgacgccgatttcgagggcgacggcccccggcgccttgccggattccagcaggcgcgcgatccgtaccttggagggctcgctgcgcctcctgttgggcagcgtcacccgcaacccgccgaacgccgagcacagccgcctcatccgttccatgccgatgaccccgcagagcggagaaccttccggctgcgtgcgcggaatgtacgtggacaccccgcccacggcgcggcacagcttttccgccccgtcttcgccaatggcatcagccagttccgcataattcacccaaagctcgcccatcacgcctcctttttgtttccgtattccgcttccccgttccgcagggctccggcacccccggagcccgcgccatcccgcgccgtgccccgcaccccccagcccccgcgtccacggccttccgccaccgcgcaggtgcgcttgcccgcccggaaaggcaccgcacgcgcaggcgcgtcaccccgcgcgtccgcagcctccccgtttcccgcgctccatcttcccccgcaggttcgcaaggattttggcgcaccagtccgtattcagggcgatctgctcgtcccgcgtcagcgtcctccccggcagggcccgctccgcctcccggcgcgcctcaagcccccggcgcaattcctcgcaacgccgccatatatccgcaaccgtagggaaatacggggattcgcggcgatgtgcctttaccgcccgctccacgatgtcacgcgggaacgccgcaagatcctccgcccagtcctccgccagaatccgcagctgcgcgggcgtcctgcccgcctgcgggtagtgcagcgccaggttgaccagcgtttgaagcataaagtccagattgtgcatgagccctccgcacctgcaaaagcattttcgccatgtcgtcgttgtcctgcgcccgccgcgccgccgtgccgacacgcggacgcccggcccccgcgcatccctccggctccacgaacgggcggtcattccagcccatcccggccagccatttcgccatcttggggatcttgccccgcctccagcgcgtgtcctcggccagcatgagccggatggcctcccgcacggcgcagggttcgggaagcgcccggcgctcccaaagccgcagccactcgcgccatgcgtcctcccgcccctgctgcacgggatacgccgaccagcaggacaggaacccctcccgctgcgggtgcccttccaggagaggcccgcccggaaaggagcccgacgaggggaaaggccgctccgccctttggggtgccggatgcccagcccggagtcctgccggatgcccagccgggtacggggcctgatgcgggagcggatgcgaagccgagcgcgccgccccccgcgccccgcaaggaagccgtccgccgggcaggggcatccccgccgcaacgcctcccccctgtgggcgttctcccgatggatattcccccggcaagcgcccgtccgcaggggccccatcccgcgggcttccgtccggcgaaacgcttccggcgcaagcgaaggccccgcccggagctccgcgcccgccagacgggaaagccccgggccccccatcccggatcgcgccgcccgcgcgcgtgccccttccccccttccgccgctgttcctgctcctgttcctgattgggcataccctccggaaaggcttccccgaagggtatgggcaaggcttcggaaggagccccggcaagatttccgggacggctggcggaaacgccgggcgcggcccggcccaacacgccggggaacgcctcggcgaacgcgctgcggaacccctccccaagcgtccggacggcctcacccgtgcgctccagcatggcccccttcagcggggattccggcaagtccctgaaggcccccacccacgagcgcacaacattgggcgattccggcatgttgtggcggaggaagttcgggaaccatacgagcggggccttggcgtcctccttggcgatgccgagcgcgaggacttccccgaacgccttccggaacaccttttcggaccacccgagctcacaggcgaggccgggggcgttcgcccggatcgcgccgagcggggtcatgtgcgggtgcgtcagcaggaacagcagcgcgagcttgcccttgtcggaaagctcgcggactttggcgtcgttccagatgcacggcgatatcttacggtatttcatcacctttcctcccgtatggcgtccggggcggccctgccgtcccccctaaacctcaagtgttccttcaacttttccgctcccttgccccgcgcgatgaaacgccggcgaagcggcaacggcgcgccgatgatgccggcctcgcccctgattgggccgggcaaggggtgccgagcgccggggcacagcctcaggccggttcacgaaagcgcgccctatcccatgtacggaatggataattccatatatgaaaataaa

SEQ ID NO: 7563 - DNA, 18901 bp, Unknown
  gut microbiota DNA sequence
tgaaaaaacttgctacggttccgggatgaagaccgattatgaaaaggccatagaatggctgaacaaaaaggcggaaaaggcgggcgggatcaccaatctgggcaagacggtgggagccccggcctcgacgtttttccgtgtgctcaagggcggatcgcctcccggagccgacaagctgctggactggatttcccagctcggcgggaaaatcgtattccctgacgagcggatggaaggctataccctgatccccaaggtcgtggcccaagccggggccgggtcgtcgctcatcacttcggacgaggttctggggatgtatgccttccgcgacgacttcctgcgcagggtgggcgtccacgccaaggaatccgtcatgctggacgtcatcgggcacagcatggagccgatgatccgccataaggacaccatcctcgtcgatcagtccgtcaaggagctgcgggacggggacatcttcctcgtgggcttcggggaggagctgctcgtcaagcgcgtccagcgcaccccgcgcggctggctgctcaagtcggaaaaccgcgatttctccgacatcgtggtcgaaggcccggatctcgaaaccttccgtgtctacgggagggtacgctggttcgggcgggtcgtctgagggctgccccttccagcgggaaagcacccgccacacgcctatcccggctcacaggaggagttccccccctcccctttgcagcccccgccaacctacacatatcccggaatgcggcccgcgcaaggctcctcggaggcacgggccgcctcccggcacagcccagtgcgggcacgccctcctttttccctccctctctaggatagcggggcaccctttgccgcccccgcctcctccccctccacgttcctaccttcatggcaggggattccccgccgtatccgcgcctttcctttagggaaaccgtaccatcaggcatttccgctcccctgcccgtgcagccctcttatcggtgtccgcaagcctcaccatgattggctgccctgcgcccccggaaccgcctccccccaaccgcctctctcctcaaggcccagatgcccagccgccccaccgtaccgctccctgcccggcccggagcccgttccggtcggccatgcccctacgcctcccccgtccacggccgcccctttccgggctttcccaccaaaccgggctgtgattccttcttatcgccttcttctgatcttttttcgcatggttgggaaatggattcccatacataatgctgtgtttggaatccatacggcggtttttaatctcatatatggaattttatcttgacttgatactctatatatggaacgctctcttcacggcacggagctgaaagcccgctgccgacgtaatcccgcggagtgcagggaagggcccgtcctccaccgggctcaaggttcccggctcccgggttacgtcagtgccccgcccacatgggcagccttcccgccgcgaaacggacggaggccgcacaggggaaaacggcggcgcaacccggttcctctccggcggaatggcggatgcaaaggcacagcccaagcgccgcaagcccgcacaagtctcattgtatggaagcgccccgcccgctagactcccggcaaaggagtacggctatgcgaatgtggatgcttcccccggaaacgatgtgccgtaagcacctgctgggcgaacatgttgaattacatatgcttctcggaagcttacggcgcgggaaaaacattgacgggttcctcgccgggaagctggtggacccccggcgcatgttccggcggcacgaggagcttgtgctcgaaatggagcggcgcggctacaggcacgcgtcgccgctggatgaggccgagtgcgaaacgctggcgcggcggtacgggcgcacgggcacggggatagatgccggagccaatgccgccgaactggcgcgcagatgcccggagtgcgcaaaacgcctccgccgcccctagcacgggaagccccgggaccggggctttttgtccccgtcaggtttccttaacaatccaaggaggatgccatgcgtaacccttatgaggcggaaccggctgaggagccccgcgtatgcgccacctgcgcccggtatttcgatttcgaccggatgtgcaacgtgcccgaagcggtggaaaagctgttgcgcgagcgcttcggcatcgtgctcggcgggtctgaattcgccgtcgaacctgaaaaaatcaccgactgcgccgcatgggtaagtgcccggctgatcgaccggtacgccctcctccgggccaagcaggacggaaaggccgcggcacgggccgcctcagcccccgccgcgaggcatgttgcggatgccgcatcgggcttcgcacgggcacgcccctatcctccggccgggcgccgtgcgccgtacgggcagccgggcggcgcgcggcctatggcatagcgcgtccctgccagggaaagcggggcccttttcacgtggaggaccggtcccgctccgaaatccccgccccgttccacgcaggcccgacggcacggacagtccgccattcccctacgcggcgtcggcgatggacagcctgccgttccagccgccatgccccacggcgggcattcatcagggccaagggcgggacagtttttccgccagccgccgatgccccacgtcgggcataccgcacgcacaacaaaaaaagcccaaggagattgtccttgggcttcttcatgtcgttgtggttgcgggggcaggatttgaacctacggccttcgggttatgagcccgacgagctaccatgctgctccaccccgcgtcgtgtggaaagagtcctacgcttaccatgcgggaatggcaagctttttttcgccccgtggcaaaaaaatcccgccccgctgccgtccgtccagcccggaccccttcgagagcctttccaacaggccttccttacaaggctttcctccagctcaggcgcctttcccggttccggcgcacgggacgagatcgttctctccaagccagcggcgcagcggctccagcgtttcgggccggaatgccgacaccgtgaagaacggcccccgcaggcccatgcgcgccagcccccgctcggcacgcgggatgtccgcgccgggatggtcgattttgctgatgatcccggcgatgaggaggttcggcacggtttgcagcagccccggagggacatgggcgggctccgccgtggcggactgcacgtacaggatggcccgcacgtcctcagccgccacaaggaacgccgtgcggcgctgcgggtaggtgatgtactcgccgggcaggtctaccatcagatctttatggaatacgggcgattgcgtcttgatgacccgcctttcggaaccgggctccagaagcgcggcgcagagcgtgctcttcccggcctcgggcggcccggcaagcagacatttccagcgtttgggcatgatttcctccgtagcggcctctccccttcagcatcggcgtaaggccgcccccagcggctccagcggcctcagcgcgccgggcccgcagataagcgatgccccccgcttccggattgaaagcggcatggcgtcccccaccccggaaggcgggaggcacgcaacgtatcgctctgctggcatcgccccgcccgaacccactccggaacgggggcgggcccagcgctgcccggcgtcagtgccgggtgacggggcaaatggtgaattgcagcagccggttgagcatgtcgttgacctgcgtgagggcctgctccaccgcgcccacggaaccgtacaggatcagcgtgccggaaaagcggtcgaggaaggccacgttcacgtccgccgaacgcaccgccatatccccggcgatgatcgccgtctcgcccggcgtcagggtgaggatgccgatggcgtccacgtcgggaatcccggccttttcgcagatttccggcgcggggtgcgcgatgaggtgcgccaccgtcacctgtttccccggcacataggcgcgcgtcccggtattcgtctcattgggcatgggcttccccctttcccgtcccggcatcccggcctgcggacggcgtcatgcgcccgcgtccccggcctgacgcctgttcagcttgatgccgctggccttccaatgcagcatgtcccggacaagatccacaatgacggctgctgcttccacaggcggcgtcccttcccggtggatgttcgaaagcaccgagcggtcggattcgagcgtgtccgccgtggggcggtagaccgcgtagcagctcatgctttccgactgcccaagccccggcctctcgcccacgagcatgaccaccacgtcgcagcccacggcctccccgatacggtcttcagccttcaccctgccgtgccgcaggaacagcggggccccggcccggatgccggcctgcttgagcccgttcaggagcgggggcaggatttcctcatagttggcgagcagcgcgtccgtgctcaggccgtccgaaagcacgatcaccacctgcggggcgtcggcatagcggcgcttcagctcccgcagcgactcctcggacagcagccgcccgaggtcgggccgcgtgaggtaggtatccttgtcctccgccagcgtggaaacgctccacaggccatgcccgctgatccattcttcaggtacttctttaaagaccgtccccttcgagcgggcatgatccgcaaggaaacgcaggcaggcccgcgtcgggggccgcgtccccacagtcccggtggcgatgcgcgccccggtgtgcgaaacgaaatcatcaatgacgtcacgacgatggggtgaagcgatgaaacacccccggcggaattccggccccgccagatcgggaagcgtaccgtccccgtcccggccctcgtcctgagccgtgggcatcccggtatgcgccgcttccggctggcctccccgcccggcgggcgggacaaggcccgcccccccggtatccccccggccggccggacgatccgccccggccggagcgccttccctcagcgcggcgagcacttccgccgcgatacgctctacatcctgttcccgcatgtcctttccttacgaatggcgacgccgcgccttaaaagaggaatgaggcgtccccggcccgcgccgtgagcataccgttttccatgatgccgtgccgctccagccattgctcgaactccggcgcgggccgcaggttgagcagctggcgggccgtggcgatgtcgtggaacgagttcgtctgatagttcagcatgatgtcatcccccatcggcagggagatgatgaaattgaccccggcgacggccagcaggagcatcaggttctcgttggaattctggtcggtgtcggcgtggttggtgtagcagcagtcgcaccccatcggcaggccgtgcagcttgcccatgaagtgatcctcaagggcggcgcggatgatctgctgatggttgtacaggtattccgggccgatgaagccgaccaccgtattgaccatgaacggctggtagcggcgggccagcccgtaacagcgggcctccatcgtcacctgatcgcagccgtaatgcgcgtccgccgacagcgcggaaccctgccccgtctcgaagtacatgacgttgggcccggcggcctggcagtaatgcccggcgaggtcatacgcctcgtcaagcagccccacgctcacgccgaactcgccgagccccttctcgctcccggagatgctctgaaaaatcatgcccgcattggccccctgccggatggcctccatctgggtggtcacgtgcgcgagcacgcagttttgtgcgggtatccggtgccgctcgatgacctcccacagggcgttgagcatggccttggtgttttccacggtatccgtcaccgggttgatgccgatgaccgcgtcgcccgcgccgtaggacagcccctcataaacctgtgccacaatggaggaaacgtcatcccgcgtgtcgttgggctggaggcgcgaggagaaccgccccggcaggcccacggtattgttggagcgcaccaccacgggcatcttcttcgccgcgcagatgaggtcggcgttggacatgatcttggacacggcggcggccatttcggaggtgaggcccttgcggacgcgctcgatgtcggcggcggacgtgcgcccgtccagcaggaattcccggaactccgcgacggtccagttcctgatgctcccgtaaaccggcgtgtgcacggcgtcctgaatgacccgcgtgatggcgtcgtcctcgtaggggaccacggggttttcgcgcaggtcgccgagcgtcagctcgctgagcacctgcttggcggcgacccgctcccgcatggacgaggcggcgacgcccgcaagcacgtctccggagcgcaactcaccggccttgttcaggacttccttgatcgaaccgaatgcatacgttgtcccgaaaaggacggtcttcagcttcacggctgctccacgaaaaaaacgttgccccgaggcggcacgccggggatggcggcgccccggaaggggatggacgggcctcccgccgcgcgcctggggatgcggcggccttcgggaagcgggcatgtgcggaggcaagcggccccagccgggctgggcggccccgcccgaggggggcgcccctgcccgaaggtccccttgcgggacgggccactctccgccccgcaaggctgccgggcctgcgccacacgggaacgggctccgggcatattcccaaaatccaaagcctatcggacacaccaacggggaaggggttccagtcccagccaccaagcgggggacggaagagccgccgggacgccctcagcgcgaatacagccaccgccccgcgcggggaacggctgcaaacccaccttccgcaagcccgccgcccgcgcggggaacgggccgcccgctggctcacattggaggggccgccctccgcacaggaacggggagggaacggggccgggagcgccggaggcatccgctgaaacccaggcccccgccgcccgcgcggggagcggcaccccgcgcgcttcccggaaagggaacggggctacttgtaggactgcatcaggatttcgaccacgtccgcttccgtgacggtgtagcggtcgcactcgaacccgacttcggcggcggcgatatgggccaccttgggcaggtcgtccttgttgatgttgaagtcggacatggcgagcttgtccatgccggtacgctccatgagcttggcaagggcggtcacgaaggcgtagccgggcttggcggggtcggccttttcgcccatgatttcgccgatggcgtcgaattccgtgggcagcagcgagcagaccttcttatagtaggcgtcggcgatgagcagcagggacgcgccgtgcggcacgttggggaagaacccgccgagggcctgcgcgatgatgtggtgggaggtggtgcacacgagggactgcgtgaacccgcacaggatattcgcggcgtaggagatgttgctgcgggattcgaggttcgagccgtcctcggagacgatgggcaggtgcttggcgacctttccgatggcgtcgacggcgaaaagctccgtgaggcggttctcgttgccgttgttcacgtagcattcggaagcgtggaacagcgcgtcgaagccttggaacagggtcagcttgtgcggcagggtgagcatcagctctgggtcgatgatggaaatggcggggaagatctcgtcgagcgtgaagtcgagcttttcgttggtttcctcattggtcacgacggcataggggtcggcttcggtgcccgtcccggcggtggtggagatcgccaccacggggaacgcgccggagaccggcttgcgcccgccgcttccggcggaggcgtaatcccacaggtcgccggggttggccatcatgatggaggcggccttggcggtgtcgatgctgctgccgccgccgagcccgatcacgaagtcacagccgctttccttggcgagcgcggcggccgccatgacgccggtgcgggtcgggttgggggtgactttgtcgaacacggccacggacacgccgttctgtccgagcagttcgatcacgcgctgctggatgccgagcttttccatgagcttgtcttcggtgacgcacaggagggccttcttgccgggcagggaaagggtggcgagttccttcaggcggcccgcgccgaagacgatccgggtggggatgaaatagtcgatgcgcttcatcatggctttgtgctccgtataaggtttggcgttttcagaggcgtagcgccttgttctcatgccctttcagtgagcaataacggtgccaaactcctatccgttcaaattgcttatctcttttcacaaagccctgtttgtccgctcaaagtatctgtagcggagcacgcggaacctgtagcgcaacgctacacttttcacaaggaacggccaaactgtagcgttctcggacaaagagacgcgggggaaggtgggagaaacgtttctgaagaaaggggggagcgcccccacgcttctccccccttccccagccttctctccccatccgctcgctcattcaataatcccaaactttcgcagccttctgtacagcgtgctgcgggccacgccgagctgctccgccgccttgctcaggttgccgttgcaggcgtccagcgtgctgcggataagctcgtaatacaccgtgtccacgcttccggacgcgacaacctcgttccgggcgggcgcatcgcccggcgcaccctcccgtgccccggcatcgaagccctcgccaagcccgccgccctcctcgccgggctgcgccccgtgcgccgcctcaaggatgcgcgggggcaggtgcgccttggtgatggccgcgccgccggaaagcaaccacgcgcgttcacagacgttctccagctcgcggatgttgccgggccacgcatagtcctgcatgaccttgagcgccgggccggaaatctccggcgcgccctgcccgctggcctgactgagccggtcgaggaatatgcccgcgagatagccgatgtcggctttccgttcgcgcagcggcgggatggcgatctcaatgacgttcagccggaaatacaggtcgccccggaacgtcccctgcgccacggcgtccttgagatcctcgttggtcgcggcgatgatgcgcacgtccacgggcgtcggcttggtgtcaccgatgcgcacgatctccatctgctgcaacgcgcgcagcagcttggcctgcatttcgaggggcaggctgttgacctcgtcgaggaacagcgtgccgcccttggcaagctccatcttcccgatcatgccgccttttctggccccggtgaacgccccgcccacatagccgaacagttcggactcgatgaggtcgcgcgggatcgccgcgcaggaaaccgccacgaacggccccttgcacaccgagctgctgttgtggatggcctgcgcgaaaagctccttgcccgtgccgctctccccggtcagcagcacgcgcgaggccgtgcgcgccgtgcgccgggcaaggtcgatctgcgccttgagttccgggcttttccccctgatggcgtcaaaggaatatttggcgtaattgccccccgcatggttggcaatattgatgatctggctcttcatgctgatggagagggtcatgccgaagtcgccgttgctgagctggatcggctcgaagcggcagaagtgcgtccgctcgccctcgtgcgtcaggatggtcacgtcccccgtctccggaaccccccgccgcatgaactgccggacgcgcggcagttcgggcttcgggaacagatcgtcaatgttcttgcccacaaggacgccgttcttggggagcaggtagttggcggccttgttgttcgcgtgggtgatggagccgttcccgtcgatggccacgaccgcctcggggagtgagttgagcacgcgctggagcatggcgttgaggcgcttttccgtgtcgatgagcgcgctctcccgcagccggatgctgatgcagttggcgcaggaggtcgtgagcgtcaacgtgtggatgtccttgcacgaaatatggctcgaaatggtgagcgaggcgatggggatgtcgttgtcgttgaagatgggggccgaggcgcatttccactcgtggaaccagcaattatagtgttcatagccggttatctggatgggcgcgcgctccacgatgctcatggacagcgccgacgccccaatggtcttgatgctcctctgcgcgccggggatgttgtattggctccgcgcctgcacaagcaggttgtcgtcgcccacggcggccagcaggtggcccgaggccaccgcgaggatggcgatgtacccggtgtcgcggatcgagacttccagcatgtcgaggatgggcttggccgagtcgatgagcgtctggtgctggcggcacaggctcgccagttcccgcttgttcaggaccggcggcacctgcgggttcagcgggtccatgcccgcctcgcggctcagtttccaactgcgcaggatgtgcggcgggatgtccttctccctgatgggcttgttggcgatgaactgtttccacgcctcatggacggcggattggtagcttttttcaaggagattgcgtttttcgtaggtatccatgcggggcctccggaagtccgggcgaaagggggaaacggggcggcgtcccgtagacgcggacggcgccgacggctgaagcattcaacgccgtattggacagcggcgggcgatgatcgccctgtggggcttctgccccgtgcggcatcccacggacggggcggcgcaacaaagacgccccgggggacaacctcaaaacggcgtcccgtagacgcggacgacgcggcggcggagcggacgccccaagtgtagcgcgccggtgtccgcctgtcgtgtatcgctacactcatacgcccttttagggaaaagtggagcgaaacgcaacactcaaaccacgcttttccggacacggttttgccgtccgccaaaaaaggtttcctctttccaaacgattctcatacgatagggaaaccgtcccgttttggcattttccttgctgtcagtgaagaatccgcagcaaccaacgcaacacggaatccgcgccctccggctcccggcttccgcaacggacaacggcggccgacgccgcccgcatcgcggagccggcgcgcggaatccgccgcaaccaacacaatgaggtgttcttcatgaaacagatccacggcattttcgccgtcaccgtcacccactttcaggaaaacggcgagatcgactacgccgcctgcgccaagcacatcaactggctcatcgaatccggcgtgcacggcctgctccccctcggcgcgaccggcgaattttccgcgctgacccttgaagaacgcaaagccttcgcggaattcgccatgaaggaagtggcggggcgcattccggtcatcatcggcgcggtgtccaccaacgtggacgtcaccctcgaagtcgccaaacacgccgcctccatcggcgccgacggcgtcatgatcctcccccctcccggcctgcatcccagccaggacgaaatctacgccttctacaagcacatctccgaaaacgtcaccctgccggtgatgatctacaacaaccccggcagcagcggcgtcaacatcctcccagaaacgctggacaaaatcgctgatctgccgcacatgggcttcctgaaggaatccaccggcgacatcatgcgcctcacccgcgccgtggacgagctggccgaccgcctcgtgatcttctgcggctgcgagagcctcgcctacgagagcttcgtcatgggcgcgaaggcgtgggtctgcgtcctcgccaacgtcgccccggcccagtccgcccgcctctacgacctcatcgtcaatcagggcaagcttgaggaagcccgcgcgctgtaccgccagatcctccccctgctccgcctcaccgaggaaaccggcgagctgtggcagatcgtgaagtacatcctcaagcagcgcggcttcggcaccggcacgctccgcctgccccgccagcccatttccgaaggcgtgaaggcccagctcgacgaactgctcggcaagaccgacttcgcctaaatcccccgaatggggagccctccccgaccgccccggcaggccccggcccccgggcgcgccgccggagggcccccgcgccgggctggaaaccgcccggcaagcctcccgccgctgaaaggccaaaggaacgaacgatgaacaaacacgaaaacgcggaaatcgtcgtcatagggggcggagtcgtagggaccgccgtcgcctgctacctcgcccgtgacggcgcggacgtggcgctcgtcgagcgcggcgaatacgcctggggctccagccgccgctgcgacggccacgccgtgacctacgacagcgcgcccggctacttcagccagttctgcaagatcgggcaggacatgttcccggaaatcagccgcgagctgccctgcgacatcgagttcgagcccgaaggcctcggcctgctggtcgacgacgagcgggacatggaaaccgtgctcgccaactatgagggcaagaagaacgaaggcgtggacgtgaccttctgggaccgcgacgaactgctccgccacgagccgcacgtctccgacaaggtcatcgcctgcctcaacttcaacggcgacgccaagctcaaccccatgcgcctgtgcttcggcctcgcggagctggcccgccaaaagggtgcgaaagccttcaaccgcaccgccgtcaccgggatcaccgtcaggaacggcgcggtgcagagcgtggaaaccagcagcggcagcatcgccaccaagaaagtggtgctggcctccggcgtctggacccccggcctcggcgacatggtgggcgtgaaagtcccgatccgcccccggcagggacagatcctcgtcaccgagcgcctcgacgggcttgtgagcaagaactacgcggaattcggctatctggcggccaagagcggcaagaagcgccccggcgtgaccccggaaatggagcagttcggcgtggcgatggtgcttgagccgtccgcggcgggcacggtgctcatcggcagcagccgccgcttcgtgggcatggacacgacgccccaccccgccgtgatgcaggccatagcgcagcgcgccaagcattttttcccgtccttcagcggcgtgaagctcatccgggcctacgcgggcgtccgccccgcctccccggacggcaagcccatcatctcccccacccatgtggagggcgtgtatgtggccgccgggcatgaaggcaacggcatcggcctgtccctcatcacaggcaagctcgtatcccagatgctgcgcggcgaaaccccgctggtcgatctcgcgcccctgtgcatcgaccggttcggcatgaacccgccgtcgctgccgtcggcctgaccggaacggcgggaacggtcccgcaggcagcccggaaacgggcatggctcccgaggcgggccagccggaaaagcccgccgcactgaaaccgggggccccggctccggcccggaaagcggaccgccggaccctgcgaaggccgccttccggcaggcccttgccggaggccgtcccccctccggcggaaagcgggccggaaggccacagcaggccgcccgcactggaaacggggcaagggcggcgatgccggggcaaaggacggcggaaggccgcccggaaaggggggttccccttcagggattcccctccctaggaagcaggccgcgggatgtcccgcagacaagcagccgcagccggttccggcacggaaacgacagcgcaggagagaggttttttcatgttcaagtccgtttttcccccccagcgcgcactggtcaccatcacctttgaaggcgaggccatacaggttgaggaaggcacgaccgtcgcggcggcggtcctcgaccgggcgggcggcgaaacccgcaccacggcccgcaaacacgacgggcgcggcccgtactgtcacatgggcgtctgttacgaatgcctcatggagatcgacggcgtcccaaaccagcagtcctgcctcatccccgtgcgggaaggcatgtcggtgaaacggcagtccggagcgccttccttcaggacagaggagaacaagtgatgcgtacgcaatgggatatcgtcattatcggggccgggcccgcgggcatgagcgcggcgttgcaggccacgcggcacgggctttccgtcctcgtccttgaccggcaggccgagcccggaggccagatcttccgcagcgccggttccgcctccgccgacaaacgcaagcagatcggggccgattacgcgcgcggcgaagccctcgtccgcgaattccgccagtcccccgccaccttcctgggcggggcgaacgtctggcaccttgccccgggccgggcctatgtcagccatcaggggacgagccacgtcatgcaggcgcggcagctcctcatcgccaccggcgctatggagcgccccgtgcccctgccgggctggaccctgccgggcgtgctcggtgccggggccgccgacgtgctgctcaagtccgcctccatgctgcccgaaggcccggtcgtgctgtgcggcaacggcccgctcatcctccagaccgtcgtgcacctgaagcatttcggcatccccatcgcgggcgtcgcgctgacgggcagccccgccagcctgttcaaggccgcgctgcgtatgcccggcgcgctcctgcgcccgcagtacctgctgcacggcatgggcatgggcctgcgcaccttcttcggcgcgccctgccaccccgccgcaaatgacatttccatccgcagggacggcgaaacgctgaccgtggacttcaccagcttcggcaagcgcaagtccctgcaagggaccgccgtgctcctgcatgaaggcgtggtcccggaaacccgcatcacccgccttgcccgctgccgccatgcgtggaacccccgccagcgctactggcacgccgagacggacgtatggggcaagaccaacgtctgcggcatccgggtcgcgggcgacagcgcgggcgtgcgcggagccgacgccgccatcgccagcggcgaggccgtggccctcgacatctgccgcgagctcggcgcgctgacgctggaaacccgtgaccgtctggcaaaggccgcgctgttccggctgtaccgctgcgacgccatgcagccgttcatggaaacctttttcgcgccctccccgtcggccctcctgcccgccgacgacgccgtggtgtgccgctgcgaggagctgaccgcgggcgagctgcgccggaccatcgaagccgggtgctactcccccgacgggctcaagtcgcaggcccgcccgggcatgggcacctgccagggccggatgtgttccgccgccgtagccgaaatgatcgcccacgcgcacggcctgcccatcgagacgctgccgccctaccacgcgcagccgcccctcttcccgctcccgctggaagagctggcctccatgtccattccgcccgaaggattatagccgtcaggccgtaatctctcataaacgttcgggatttcttttcccgccacggcccgcgccccggttcccaccccacggggaccacggcgcgccgtcggcgggcgggtattccattccccccggagtacctgaaccgtcagccggaggcgcgttccccgcgtgatccgcaggccaagccggaagcgcttcccccgcgttttcgtcaggccttccgccggaggcgcttcccccgcgacctccggcggacacatcgacggcgaagaaccccttacacccccggccccctgcctccccacggcaggctgtccttccccggaccccccaaccccttccacaggagcctttcatggacggtaacctctcgctcatcctggcctttcttgtgtccatctcggtcgtcttggcgctggtcatcaagttcaaactgcacccgttcctctcgctgttcatcggctgcctgctgatgggcgtatgctccggccttgacccgatggccatcatcaagacgtcctgcaagggcttcggggacacgatgggcgacatcggcatcatcatcctgctcggcgtcgccatggggcagatcctccacgaatccgggtgcacccgcgaaatcgccaacaccatgctgcggctgtgcgggcgggaaaaatccgcgctggccctgaacctcaccggctacatcatctccatcccggtgttcttcgacgcggccttcgtcatcctcatcggcctcatccgcgaaatggcccgcgaaggcaagctggccctcaacacgctggtcacggccctcgtcgtcggcctcacctgcacgcacgccctcgtcatccccacccccggccccgtggccgtcgccgggaacatgggcgcggacatcggctggttcatcgtctacggcgtgctcatcgccctgcccgcctcgctcatcggcggcgtgctgtacggcaagttcctcggcaggaagtcccccattttcctcacggacgaggagtccgacgccgcccttgtggagcaggccctcgccaagtccgaccaccccagcggcgcgctcggcatcgccatcatcttcctgcccatcatgctgattttctttgccaacatcctgaacgccttccttgacccggcctcgtccgccagccgcgtcgtctccttcttcggcaacaccaacatcgtgctgctgatcaccgtgttcgtggcgtatttctccctgcgcgagcacctccccgaacctttcgacaccgtggtttcgcgcggcgccgaatccgtgggctccatcctcgccatcatcggcgcgggcggggcgttcggggccgtcatcggcgcgagcggcatcagcaccgccatcgtcgacgtcatgcagagctggagcatcccggtcatcctgctcggcttcctcatgagccagtgcctgcgcatcggcctcggctccattacggtctccatcgtgacggcctccgccgtgctcgccccggtcgcttcccagctcggcgcctccccggtcctcgtgggcctcgccatctgctgcggcggcatcggcctcggcctgcccaacgactccggcttctggaccatctgcaagatgtccggcctgagcaccaagcaggcgttcctcgtctaccccatccccacgctgatttccggcctcgtggggcttgccgtcctcctcatcctgaacatgttcgcaagctccctccccggcctcatgtagccgtaccgcgcggggcctcgacgggccccgctctttttttcaagcactactttaaggagtcgttatggcaaaacttcccgcaagcctgttcaacgacgtcatcggccccgtcatgcgcggcccttccagctcccatgtcgccggggccgcccgcataggcgcccttgtccgccagtccctcggcggggatgtccgcagcgtcctcgtcgaattcgacgtcaacggctcgctggccgaatcctaccacgggcacggctcggacatcggattcgtcagcgggctcctcgacatcgacctgaccgatccccgcgtccccgatgcctgcgccatcgccgagcgcgaaggcgtcgaggtggccttctccatcctcgactacggggcctcccaccccaacaactaccgcatcgccgcgaccggcggcgacgggctcaccctccattgggaagccgtctccgtgggcggcggcatggtggagatgcagcgtttcgagggcttccccgtgagcatcgacgggggctaccatgaatacctgctgctcatcgacgcccacgccgcccccctcgaacaggccgccgcgtccgtgaaggccgtggcctcctccgacgaactgcgggcggaaagcgacggcgcgcgtctgctcatcaacctcaagcgcgcctccgcgctcgatgcggaaaccgtggcccggctgcgggcgctgcccggcgtgaccgggtgcatcgcgctcgatcccatcttgcccacgcgctcgtgggagggctgctccgtccccttctccaacgccgccgggctccttgaatacgccaagcaggacggcaggccgctgtgggagcttgccgcccgctatgaaagcgtgcgcggcaacaccaccgaagaggacattttcaacaagatggatcggctggtcggcatcatggaaaaggccgtcgaggacgggcttgccgggaccgagtacgccgaccgcatcctcggcccgcaggcgcacctgatcgacgcgggacagcggaacaagacgctcctgcccaacgacctgttcaacaacgtcaccaagtacatcaccgcgatcatggaagtgaagagcgcgatgggcgtcatcgtcgccgcgccgaccgccggatcgtgcggcgggctgcccggcacgctgatcggcgtgggccgcacgctgggactgccgcgcgaggagatcgtcaaggccatgctcgccgccgggctcatcggcgtgttcatcgcggagtccgcgaccttcgccgccgaagtcgccgggtgtcaggtcgagtgcggcgcgggttccggcatggccgccgcgggggttgcgctcatgctcggcgggaccgtggcccagtgcctcgatgccgcttcgatggccctccagaacatcaccggcctcgcctgcgaccccgtggcgaaccgcgtggaagtgccctgcctcggcaagaacatcatgtgcggcttcaacgccgtggcctgcgccaacatggcgctggcgggcttcgacaaggtcatcccgctcgacgagaccatcgccgccgtctacgacgtggggctcatgcttcccctcgatctgcgctgcaccctcggcggcctcggcaagaccccggcctcgttcgccatccgcaagcgcctgagttagtagaaagattggggaagggagggaaaacttttctgaagaaaagctttt

SEQ ID NO: 7564 - DNA, 467 bp, Unknown
  gut microbiota DNA sequence
cccacccatcattttccttcaattctttaaagaggttcttaaaagaaaacctcccgctaggcgggaggttccgaaaagcttacagctttgcatatgttataaaaactccttttgatttgttagtaaagcttgcggtctggcaactgcaagcggcaacaaatcaaaaggaggtcacaatgagtgacgttcaaagtttagcccacacaaaatggaactgcaaataccatgtggtatttgcccccaaatatcgcagacaggttttctatggggaaaagaagcgtgagatcggcgagatattgcgcaggctttgtgaatggaaaggagtgacaattctcgaagcggaatgctgcccggatcatgtacatatgctgctggagataccacccaagatgagtgtgtcgggatttatggggtatctgaagggtaaaagcagcctgatgctgtatgaacgatttggcgatctgaag

SEQ ID NO: 7565 - DNA, 10757 bp, Unknown
  gut microbiota DNA sequence
ctccccacgcccctccccttcctccccaaagactttcgtaagtggggcgaacggagtgtggggcggcccagcggcttaccccggaaaacagtttcccggcagcgtcgtccacaaaaacttgaagggcgtcaaaaaaacgacgcgcataatcgccttttcagcccgttaaaaaaattttccgacccgttttcccatccatatcccgtttttacagcagagagcctattgacgcgcaatatcggccccggctcctgaacgcccggcgctgagcttgtgcgttcaggagccggggccgcactgagggggtccggggggaatcattcccccggcggggccaaggggcgggccccttgccgccggaggcatcccacggcggcatccccgctacttcaccgcttcgatgatccccgcgcaaacggcctcgacatcctcccggctcaggccgggatgcaagggcagcgtcaacagttcgccgtgcaactgctcggttgcgggcagagacggcttgcccccgccatacagcgacaacaaatggttcggcttgtaatgctggcccgtgggaatacccttggcgtccagcgcgccgatgacatcatgctggcgtccgttcaggatgcgcaccgggaaaatgtgcggcactatccacgcttcgggctccgccgtgagcagcgccacgccgggcacgccggagagccgttcgcggtacagctcggcaagctcgcggcgcttgggggcgaattcgccgtccagccgggtcagctgcacccgaccgatggcagccatgacgttgctcatgtggtaacgccagccctgccgctccacgtcgaactcccagctgcgctgtccggagaaacgcttttcggtgtccttttccacggaaagcagacgcccgtcgcgcgcggcttcagccacggcctgatccgaggtcacgatgcagccgccttcgccgcaggtgatgttcttgatgccgtcaaagctgaaacaggccacatccccgaagctgccgatcttgcggcccttgtacaggcatccaaacgcatgggcggcatcttcgatgacccgcaggccgtgcttttccgcaaacgcatacacgccgtccagatcgaccgggttgctcgcgtagtgtaccggcatgatggccttggtgcggggagtaaggcgcctttccgcatcggcgagatcaatggtcgccgtatcaaggcgcgcatcgcaggccacagggacggccccggccccgccgatggcctgaaaggacgccacgaacgtcagcgaaggcaccagcacttccgcgccgctcccgtgcccgagcacggcctcgacagccagatgcagggcggctgtcccggtattgacggaaatgacccagctcgcgggcacgcccagataggccgccacatcagcctcaaattgctgcacttccctgccgatgcccaagtagccgtcttcgcagatgacgcgatgcacggcctcggcttcggcctcgccaacgatggaacgggaaagtctcatgctcatgtcagtctccgggggttccccccctgccccgccgtccggcgggcgcataggtcggcgccgcgtggcggacgccagaaaaaggggcaggaaaaccctgccctgacgtgttaccaatgataggggatatcccgcgaatcaaagtccttacggagcccttccgccggatcgtgcgggatgtccgggcagttgcagataaccgcaggaacgctccccgccgccgtaaagccgtaccagacacgcggcgggatttgcagcagcgcgtagttgtccggcctgccgagcagcacttccatgatccgcccgcgcgtcggggactcggggcggtcgtcatacaggacaatcttcagctgccccacaggcacggcaaaacgctgcgtctggcgcgtatggcatttccatgccttcacgcatcccggctccacttcggaaaagtacacttccccgatctccccgaacagcggggaggccgggcgcatcatatgcatgaccgggccgccgtccgtggggatgacggccagatccagcaattccacgtcgttaataacggattccatcggaactccacggcagccccaacgcggcggccttgcggcagtaatcctgaatctgcgattgcgtgaacgcgtaaatgtccgcgccctgttccctgtaaaacacttcgtaccacttggcggtgaaccgcatggtcgtgtcgaaatccagcgtggcgcgccagttgaggcaggccagagccttatcgcagcacagcttgagcagggtgcattccttcatcccggcctgccccgccagatccatcttgctgccgaacccggaccactggctttccagcgactggaccacgtcggctacggtgtggctggcgtcggaagaaggcccgaagttgaacgcttcgccgtcgagcctgaaaccttcatggcagccgtcgccctttcccgccttcacggcgtcgcggtgcgcggcgaacagcttcgcgccgagccacagatagccggaaagcggctccagcacatgctgccacggacgggtggcgtgcgggctgcggatttccacttccctgccctcgctccacgcgcgggcgcagtcgggcacgatgcggtccgccgcccagtcgccgccgccgatgacgtttccggcgcgggtcgtggcacagtacggtgcgttcaccggatcgccgaaaaacgatttgaaataggaatgcgcgatgatctcggcacagcccttggaagcgctgtagggatcgtagccgcccagatggtcggtttcacggtagccccacacccattcgtcgttgcggtacgccttgtcgctggtgatgctgaccacggcctcaaccgaaggcgtcacgcgcacggcttccagcacgttgagcgtgcccatcgcgttgacttcgatggtgtcggcggggttgtcgtaagaagcgcgcacaagtgcctgtgccgccaaatgaaagacgatctccggcttgaactcccgcatggcttcgacaagcgccttgcggtcgcgcacgtcgccccggcagtcgcggatacgcccgccaaggccgatcacgtcgaaatgcgacggaccagtcggcacggcgtccgaaaaaccggcgacttccgcgcccatctggagcagccacgccgtcagccacgaacccttgaatccggtgtgcccggtgacgaacacccggcggccttcatagatatgaccaaacatagattgtccttgggggagaatgcctccggcggccagagggctaccgccctctggactcctgtccggggggaatgattccccccgggccccctcagcgcctccgcatcccgcacaggcttgcgcctgcacaggatacggcggttctgtgggcgtcggacatcctttttcaggatgacgcaacggagccgccgggaaactgtttttcaaagaaaggcgtatcggaatgccctacccacaacccgccccgcttacaaaagtcttgggagggagagggatgggggtgcgggggaagggagagggaagcccttttctccagaagggttccctctcccttcccccgcatatcaaaatgctatttgcaccacggggcgttgcccttgtcccagagggagttgagcgcctgcgcatcacgcaaggtatccatgcactgccagaaaccggtgtggcggtacatggaaagctggccttcggcggcaaggcgttcgagcggttccttctcgagatcgcaggactcgtcttcggagagatagtcaagaaattcgcgcttgaacacgaagaacccgcagttgatgtattcgtccagaacgggtttttcctgccaagacaggatgttgccgttctcgtcggtcttgacggaaccgaagcgggaaggcatccggacgccggtgaaggtcgccatctttccggatttaatatggaaatcaacaagttcactaatattgatgtcggaaacgccgtccccataggtgaccatgaagcgatccgtgtcgatgtgctgtgcgatgcgcttgatgcgcgcccctttcagggtttccggcccggtgtcggacatggtgacgcgccagtcggtcacctgcgcggtcgggtggtaggtcgtcgagccggtggcgagatccacggtgaagtccgcattacgcatacggtaatcgtggaaatactgcttgatgacctcccccttgtagccgaggggcagcacaaaatccttgtgaccgtaccgggcgtacatggacatgatatgccacagcaccggacgcccgccgatttcgaccatcggcttgggtttgaactcggtttcttcgcggagccgggttcccttaccgccacacagaataataactttcatggacttgcctcatgtttccagatataggaagctccgtatcccgaccggatcatcggagtccggtcacactagcaaaacacgcggcaaaggtgaatacccccgtccttccgggcaaaaatccccccaccccgcaatcccttttcggcctcttttcgacgccatccgcatcaggagaaatctcatgtccccatccgttcaggccatcaggcggttcctcgaagcccacgaccgttttgccgcacacaacggcatcaccgttgaagatgccgactacgattacggcaaggtcagcctcgcgttcgaggatcacgccaaaaattctctcgacatgctgcacggcggcgcgctgttcaccctcgcggacatggccttcggcctcgcttccaatttcgggcaggaagacggcaccatgatcagcaccaatgccaccatttcctacatgaaaagcgccaagaccggccccatcgtcgccgaagcccggctcgccaacggcggcaggcatctcgccacctatgaagtcaaaatctacgacgggcagggaacctatatcgcctgcgccatgatctccggctaccgcctcgacaccaagctggcgattgaagaatagagaatgtgggggaagggagggggaacttttctagagaagaggggagcccccccccgcggttcccctcccttcccccatatccccatcctccatctctcaaggctttcgactggcggggaggccgcgcggaaggagtccgttccgccaatgtgctgaaaacacgtttcctcgccttatcaatctccgtgccgccgagcccttaaaaaagacgactcctgacggcatcggggcgaatgaaaagagttccgcatcctgcttgcgccggatgcggaacccttttcattcgccctgagggggtctggggggcatcatgcccgcactgccttttatctccctacgcggcgggcgtggcgggcgatgatctcgttgtaacgggccttgaaggccccgggctcggcaagctcaaaaccggactgcaccggacggaacacaaagagtgcctgcgccgccttgccgttggaccagctcatgggagccatgctccactccatgttctgggcggaagccaaacgctggttcacctgcgcgggcgtccacggggtttgaagattcatgaccgaggccatgcggacaaagtcatacccgatgccttcccagaaatccggggtgcccttgccggactcggccatcgcacgcacgagggcgcccgccgccggggacggggacgccggattccacgcgccggggaaaatcgccagatcaagattcgccacattgacgctcgaacggttggaaagcccctgctcccaaagggacgtccccatcagcacgaggcgatcctcgccctgatagaacaggaacggcacgagcagctccagattcttccagctgtccggaatgaaagccgcttggaaggtcgacgtcgggacgggggttttgccgcgcatggttccgcccacgaaaccgcgcatcacctcgccccagctggtggtgtcgccggaaggataggtcgctatcttggccgtggaaccgttggtgcgcacggccttgaggaacagatccgtcatgcgctgcccgtaagtatccgtcggagcaaggacgccgtaactggaaatgccgagattgcgcgtaaaattgaggaccgcgtcgatttgatcctgcgggctggcgaagaaacgccacgcgaccgtcccttcgtcgcttccttcaaggctcgggagaaaggcgaagacggcgcgcgattgctggatgctgcgggacttcatcgcggtatagcgatccgcgcgcaaggggccgcccaccatcacgcactgcgggggcagctgagacagcttgtccagccagtcggaagattccgtatcgatcatgcggacatccatcatcatcccggatttggacaattcaccctgcgcggccgtggcacccgcggcgatcttgttgccgaacggcccgtacgctccgctcagaggcaaggccaaggctacacacccggaactgaacgacggctgccctgcgccgcccgcgccggaaagcttgctccgcacatcaagccacgcggagctgttttccgctccggggaccagatccttccaaaatttcagggcattctgggcgccctgcatgttgccgctggaaagggccgcccgagccacacgctcccacgccagcgcacgctgttccgtgggaagggccgcgtcacgggccaccacattgtacaggcgctcggcttcggcataattgcccgccctccacgccgcatcggcctgttcggaaagaggctggccgctgacggcatggccgggctgggacgaaggatacccgccgccggagacaaatacggtacggccgcacccggcgagcagcagaaggcacgccaaaaccaccaaagcgcctgcccgtgcaggccgtttcagacaaccgttcatgattcccccaaaaatatggttccatccgtatgcgatacgccgcacagggaacaaaaaacccgcaaaaaagcagggttcgcaacctgaaaaaggcagacgacaaggcgtatccgttcctcataggcgtttcaaggctacagcatggcggaaagcgaggcaagcccggttcgcctaaccacagggctttgatgccggtttacgccatttgaccggcgttcgcggcaagggtacaaggcaagggtaccctctgttttcccgtaaccaccgcaccttctcacggagcgttttatgaacctcatcgacctcatcagcaagcaccccgtcccggtcacccgcttccagcgtccctacgtcatcgccgaagccggtgtgaaccatgaaggcagcatggacatcgcccgccgcctcatcgacgaagccgccctcggcggcgcggacgccatcaaattccagacctacaaggcggggaccctcgcctccaagcattccccggcctactgggacaccagcaaagagccgaccccgagccagtacgagctgttcaaaaagcacgactccttctggaaaggcgaattcgaaaacctgaaaaaacactgcgatcaggccggtatcgccttcatgtccaccccgttcgacgtggagtccgccaaattcctcaacgacatgatggatgtgttcaaaatctcctcttcggacctcacgaaccgccccttcattgaattcatgtgcgacttcaagaagcccatcatcatgtccaccggggcggccagccttgctgaaatcgccgaggccgtgagctggattgaagccaagggcaatccgctggccctgctccactgcgtgctgaattaccccacgatggacgaaaacgccgcgctcggcatgatcccggccctcgtccgccatttcccgcagcacgtcatcggctactccgaccacaccctgcccaacgatatgaaggtgctggaagttgccgccctgctcggtgctcaaatccttgaaaagcatttcagccacgacaagacgctgcccggcaacgaccattaccacgctatggattacaaggatctccagctgttccgccagaatttcgagcggacgctgtccatgatcggggaaatgcgcatcgaagcgctggcctccgaggagcccgcccgccagaacgcccgccgctccctcgtcgccaaccgcaacatccccgccgggaagatcatcgacaaggacgacctcacgtggaagcgtcccgctggcggcatcagcccccgtcactactatgaagtgctcggcatggccgcccgcgccgacatcgaggaagataccgtcctccagtgggcgcatctggaataagaaacgcatgtgcgggaaggggctggagaaggtcccctttcctccgccctatccgttgcgggtcgcctctttccccagaattccgcatggaagaagggaatggagagcgcccgccacagtgaacggcaagacaatcattgagcattcggttcgttgtgtttcaatcttcctcaagtccggcgcgatccggcgtttcccaagaagggaaacggggaaacgcgcacatcttgcaggaagacaggggtgggggcccgagggaggggagaagcaaagccaagggaaccttctttcgggaaaagcgtgcctcccctcccccgggattccacaacacacagccaaaaaggaaacgccatgaaaaaaatgctcattgccgccgtatgcctgatgctgctgagcccggcccatgcgggcgcatcgctgttcggttcggacggcccgaaggacaccgacgagatcacgcctctgcaatacgcctccctgctcggcctgcgggacatcgatcccgtgatgttccgtacgaagctgatgccgctcattgacgaagccatgaaagacggcaagatcaccgtcggcgaatgcaaagagatcgaaaaggcggccgggaacgtggccccggccttctacgcggccgcgaaggccccgcgccttcaggacagcatctcggaaacgatggacaaggcgaagaaggacggcaaggaattggggtcgaaacttgaggacaccctcaacaaccagcttccgcagttgttcgacgacgccatgaacctgttccgggatcagatgcggcagtacaacaaggaaaaaccagaagcgcccacaaacctctgattgcctgcggcgcggaaagaggcatctcctgtgaccactcaatccatcacgacgctgattcttggtacggccccggaaaacgcgaccccggccacccacatcctggccgggccgtggtgtacggccccggcgtcagccgaagaaaccggtttcgacatgccgccggaaccgctggccgatcccgaacggctggaaacggccgccaggcaggcgcgccagctcgtcacacagcttgccccccggctccgggattacctgaacggactttacggcacgcagcacgacgaccgctattgggatttcgtactggccccgtggcttgtccgcgccgtggaaacgctgatcgaccggctgtaccgtgccgccgggattctggaaacgttcggcggccgccccctttccgtgcccgtgctggacgcttcggaattcgccttcgcggatacgcaggacttcatcatgggcggcatcctgaatccgcagtggaaccactggctgttttcccgcctgctgaaacgggactggcccgccgcatggacagccgaggaactgccgcccgtccggcgcgaggccgccccgaccagacgggaaaacctcttgaagcatgtcgcgcggaacatcctgttcagcctgccctttccccgcgtcaaagggttcagcctcaggcaatcgttcgatctgtccgtcgtgctcacgctcaaccgggaccggcgggacgacaccatcccgctccggctgctcggcgatccgtccgcgccgcccctgcctctcggattcacggaggacgaagcctttgatctcgccgtcgccctgctccccgaatccttgcggaaagcgtccatcccgcagacgctcggccacgaacaggcccgcatccgctcgcgcgtggtcagcgtggcggcctgcgaggacgacgcctaccgcatcaagatggccctgcaccgggggcgcggctgccggatgatcttcatccagcacggcggcgagtacggctatgtcaggacttccgtggcctatccgctcgtcgagtattgccagcaccgcttcatcacatggggatggaagcgccacggcctcatgcccggcaacttcctgcccctgccgcatccccagcttgcggccctgcgcgatgcgcaccgtgagaagtcgcccacgctgctgctcgtcggcaccgagatggccttattgccctacacgctcaagtccatgctccgggggcggcagcaattcgcctaccgggaagacaaggcccgcttcatggccgccctgcccgaagcgctccgcaagcagtcccagtaccggccctatttcgacgtcccttcctcgcttgaggacgccccgtggctgctccggcggttccccgaagtaacgcgctgcaccggcccccttgagccgcgcctgctcggctgccgcctgcttgtgctcgatcacgcggggacgacgctggcgcaggcgcttgccgcgaacatccctttcctgctctactggaaccccgagaccgccagcttcacccctgaagcactgccgctgctcgacaagctccgtgaagcgggcatcctgcacgacacgccggaatccgccgcagccaaggccgccgaagtctggggcgacgtgcccggctggtgggcctccgtccgcgccgcgtgcaagccctgggcgtcgcagcacgccctcacaaacaaggacgacgtcccgcatgtgtggaagctcgtgttgaaggatgtatagaagagaagattggagggggcgaggggccctttctggagaaagggcccct

SEQ ID NO: 7566 - DNA, 24764 bp, Unknown
  gut microbiota DNA sequence
atttatcattttatatatatcaaaaaatcgatataagatatctcatcttatgtatgacggcgttaggaaagcgccccaccgatgggggacgtcggcagcgacgattgaaaggagaacggacatgcatgaacagcttattaaagagattcagaagatggtaagagatggggaggtccccgccaagagtgtcgctgaagcagtcggcaagccctattcgacgctgatgcgggagatcaacccttatgacaagggcgcgaagctcggcgtggagacgttcatggcgatcatcgaaaccacgggtgaccccacgccgctgaaactgatggcgtacgaacttggctataggctcatccccgacaagtgatgttgggctccgctgtaggggatttcccccgtatcgagaggggcaatccattacggtgggaaggccccttccggagctcatcccccgattccgaaggggagaggaagccctgcggacgatgggggcgaaccgttgtgaagctgtaccgcttggaggtgtggaaccctgccgttggtagaaggacataaaaaagaggagaagcaattccttctcctcttttttatgcgaagatatatgggatttccattccacggcaagatttccgtaggcgaatgcgttgttacgttgaagagttcacttccggtattcagcaagaaagttacgcctttgtctgtattgaactcgcgcccgcagcacatattccgtcccgcctcagctgattaccgggaatacatgagaagattcctgtctcatgtattccctttttatcttttgaaattattcgtggtgaggaggtctgtcttgggagaggggctcctgtgaaaccttagaacagggccacgcccagtgcaacgacaatggccgagatagtggcccatgttgcgaggatgacgatgggcacggtcctccagatggctttcgtattcgaccattcattgccgtgcagcagcgaggcgctcgcgctggcggccggagtgaggaacgcgatgtggacgcccatgaccaccatgatgatggcaagctcgggaggaacgttcatgcctgtacagtagctgtagacgacgggcatcagggcgattcccgttgcgccgttgttcatgaactgcgtgaggacggtagcgaaaaagcccatgcacagcgcgaataccagcgaagattcgtttccgaagaagggtgtcatcaatgccatgaggaacttggtgatcccgctttcgtcgttggccatggcatgggaaaggggcatcaccacggcgaggatgaggatgatcccccacgtcacgccggaatccaccatcgtcttgaaccggagcagcggcttgccgtcgaccttgaggagacacatcacggttacgaggagcatacagatgcccgtgttcccgatggtcttgaagaagcgggcgatgccggacgtggcgggcaggatgttgggcaaaagcagcaggacgaccagcgcgaacaggaaccccagcacgattttttggactttattcagccgcagcgcgccttccgtgtccagccctcccgtatccagcgagatcagtttcttcatgtcgggcttgaacacgtacttggccatgacgatgaacagcagggagcacagcgcgcagcatgttatcgcaatgatcatgtacttcgcgtaatcgatggtcatgccggacatgttttcatacgcgccgagtacggtaaacggaacctgcttgaacgggatgatcgacatgccgatttgcgcggcgtacacgatgccgaaaaccatcatcgtcggatagccttcgcccttttggtagccgcacttgtcacagatgccgtacaggatgctccagccgataacgaccgccggggatgcgctggtcagtgctcccagcagcatgatggacaggaaaaacgtataggtgaacagccaaggcttccccgcgacgcatttgcgggtgatgaaccacagcgagatgaatttggacaagccgtaatagttgatggtcgcgcagaagacgaaaatgaagaacatcatcataacgagcggatcgccgaaacttgtctggaacagctcgttgggcttcatgccgccgatgagcatgagcgccagcaggcccgccatgctcggccagatgatgtctatgaaaatccagccgtacagcacgccgagaaagatgccgatcagattcatccccagcggggtcaaaggggttatgggcgtgagctggccgcagccgaacatgatcaggaggcttatcagggagtgggcgtagtaggcgatttctttgtctttgcaagagggaggaagtggcatgaccggttctcctcgcggggtgcctctgtaacagggttgttcttgcctgttggcaaaaaggggggaggccgtttcccgtcctcttgcgaagacgggaaacagagggtctcaaagccgggtggaaggggggggcggaatcagacggccttgggaggcgtcggccagctgaagttgtccatgtagtagcggtatggcttgatggggtagtcgttcaagggaacggggaccgtatggacttcccgcttgccgtcgacctgcttctgctcgatccacttgagccagtgttcgttgtcccgttcggggtaatcttcgcggtaatgtccggcgcgggattccttgcgcatcagggccgcattgaggcacagctcggtaaggagcaccgtggacgtggcctcgaacagcttggcgagttcgtgcggatctcgcgctcccagatgcggcagcacttccgcacggatttcctccacacggtcgagcccgcgcgaaagccccttgcccgtcttcatcagcgcgatgtcgggggcgctcatgacctcgcgcatgtcggagatgacatccttgggcgcgatgccgtccttgccgaggtatccggtgaacgcttcaagccgggaggcggcgtacgcttcatcaaaggccactgcatcgtgcccctgtacgaactgcgcggcggcttccccggccgaatagcccgtcgtcgccgtgatgcatgtggcccagccgcccatgtagacgcccggatcgggattgcgggcaagcccggcggcgtacagcccctttatggcggtggagccgtcgagatcggccacaatgccgccgtaggtatggcgcacctgcggcatccattccagttcctgcccgaagaagtcgatgccgagttcgcgcagcttcttgtcgttgaggcccatccagcccgctctggggcgcatggtttccacatcctcgggcttcatctggctgcaatcgaaacggatggggccgtttccggctctcacttcgtgcaccatgccccgggtattgtaatggggatcggccttggctccgaattttggggagtatttcttcatgaaatcctctcccttggcgttcaggaaccgggctcccttgggaagaaggcccgtttgcccttcccacgcgaaatcgacaggcacgttccacaccttccagaattcgaaattccgcatggcgcaacccgcgttccaggcgatgctgacgccttcgctggctggcgtgttctgatggtaggagggcttccagccgcccgtattggtggcgagcaggacggcgcgggccttgatgaagacgggcaccccgctctggctgtggaagcccacggccccggtcacgcgttcgccgtcggtgatgacgtcggtgatgaccgtgcgcccaagccgccgcacgccccgcttttcgcattcctgcttgagcaggcgggctttttcgatgccgcccatcccgtaggggtggtagtaataatagcgcatgtaatcaagggctcgctgggggatgaagcacagttcgcccttatcgttgcggacgaatttgtgccccagattctcaaaatccatgaaccggtcataggattgtgtcagaatctgcccgagaagcttctggtcggcgaggccgtcgtaataatacacgagatcgtcgagcagatcgtccagcttcatatcaggctgcttgacgatcatgtccccgccggaaagcccgcccagcccgccccagtctcgggggcccttgtccacgaccagcacgtcgcccagaaagtccctggcgcgcatggcagcccacatcccgctgaaaccgcagccgataaccagcaggtccgtcgtatattgatagccttgttctttcatatgcgcctcgcttaccggttgtcggcttcgatttgatcaagggtacgggcaaaacgttccttgaagggatgcacatagatggccccggaggggcagttcagctcgcagttgaaacaggtcatacagtcgtcggtataggtgatgcgggacttgctgccgcaggtcatgcagcgcagcgcctcggcgaagcaggcttccatatccagaggccgcagggtttccgcaaaaggatcatcggccggggcggggaggctggcgcgctcctgtctcggttcgtggcggatgccttcgcggggccattgttcttcgggaagctcgggacgcttgcgttcgcgttcgccccggatgtccgcgcccttgagcatccgatcgatggaaaaggcgcattcgcgtccgccggcaatggcgctgacgacggaagaggggcccgtggcggcgtcgccagcggcgaagattccccatgccgaggtggagaaggtgacgtcttcaatcacgatgcgtccctgttcagtacgcacgtccttggcgaacccgtccagctcggatgcttggccgatggcgaagataatatgatcggcccggatgcgcatggtggcgttttcatcgaacaggggcgcgaaacgtccctgctcgtcgacgacccggatgcacgttttcagttccatgcccgcgacgtgcccgttttcttgaaggatggtgccggggccgaacccgcaatggcattcgatgccctccctcagggcgtccgcctgattgtgcggatacgcgggcatggtttcgcgcgactcaaggcaggccatgctgaccttggcggcaccgagccttttggcggtgatggcggcatccacggcgacgtctccgcctccgatgacgagcacgtctccggacaggcggggctgttcgtcgccccggttggcgcgcaggaactcaaggccccagtggacgccgggaagctcgacgccttccatgcgtaccttgcggctgaccgtcgttccgggggccagcatgacggctttgaatcccaaccgtttcaggtcggaaaggctcaggtccgcgccttcgccgatcttcgtattgcagcggaaggcgatgcccatcgcttcaagccgggcgatgtgggccgcaacgatcgcgtcgggaagccgatacgcggggatgccgtaccgcaacatgccgccgggaagcggcatcgcctcgaaaaccgtcaccgggtaccccatctgtgcgaggaaccacgcgcaggaaagccccgccgggccggaaccgattaccgcgacctttgtgatgtgccttcgggcgggcctttcgagaggagccttcagatcccagtcgcccatgatctgctcgacggcattgatgtttaccgcctcgtccacatggttccgggcgcactttttctcgcagggatggaaacatacccggcccgtgatggccggaaacggctggacgctgcggtagcgccgggccgcttcgccaaggtgcccctgctggatcaggtaatggttgccgcgaatgtcgaccccggcggggcaagccgccatgcaaggggaaagggcctcttgcgcgggttcgagcctgaaaacatccagtgggcatgttttggtgcaggttccgcagccggtacaggccgcaggatcgatgctgtggatcatatgaactccttttacgcatctgattgggaaggtgactgtccctgtggggacagtgtgtccgaaacatggctgccgccgtggtgtttttctttggtcgggaaagcaatatgaaagggaccctcctctaggctgcatggggacggacgtcacggcagcgaaatgttgtgcgtcgttgataaagagtaagcaaagggtgttccagctcgttattgtatcgtttttattgttttttatttaaaaaggaagaatccgcatttctttttttgtcttgaaaacggacaattttgtatattgccgtattgtttccggacggctatgttggcgagggctgaacggtcgatgggccgcggtgaaggagaaggatatggcgaaagaaaaggcgtggtatgcggacagtgctgtcgggacgttgctcgcggatctgtttgaaggaaaatggtcccccgaattgctcgcacagcttgcccagatcccgctcgctgaagcggagcggggtgcgttccccggctgtccgccttcctccgggaggaaacgccggttccgtctggtggagcgcgtccaagcccacaaggaggcgtgctcgtttttgctggcccggccctccggctccggtatcgaatcgtttttgcggctgtctgcggatggggaagagcttggggcactggaaacgatgttggggctgggcttgagccgcatgaacaccttgcgcccggcggggatcaatctcgtcctccgcctcgtccatcgaagccttctgggagtgggcttgcggggactgaacgccgatggggcgaagcggtaccggcgtctttgccgtgacgtgcacccgctcatcgtttgttcgggcagcaatacgccttcgcttgcccggctctttttccgggcgcgggggctggccgtgaagttcggggacagacgcgacatggcgctcttcgacctgctcgtcggttccataaacgtctgcaatacgccggaacacgggaacccgcgtttccacgctatcatggcccgcgggtatgcggcgcttgaggcgctcaaagaaccggacctgttcgaacaggcggcaccctatctgggcatttaccatttcattgaggggaactacgaacaggcaatgaacctcttttcccgcgcaagccggaaactgcgcgcgcaggagcaccatctcgtcgaaatgttttatgtcaggcactggagctttgcggcttcctgccgggggaattttgagctggcggccgggctgctgctctcgcggctgcgcatgttcgccgcgcgcagcgacaaccagctcgcccgttccatacgcgggcagcttgcggcgttgtatctgcgcatggggcaatatgaaaaggcgctggaacagctggacatagcgcaaataggcgtttcgccgcaggtggatatcgtcagcggcgtcaccaatgcgcgccacctcgcctactaccatatgctgtccggaaatccgaaggcggcctacaaggtgctccattcggcactggatgaggcacggcgtcaggggtatgagcgcccgatttatctggggggcgcactgcttgagcttttgtgcgcctttcaggagcagggatgcccgccgcttccctgctattcggcggagcaggagctgcaacgctgcctcagggggcccaaccgtatgttgcggggcgttgcggcccgcttgtccggcaacgcgctgatgcgcggaggaaatgaggatggggcgctcggcttgtatcaggacagcctcgcactgcttgaaaagataggctgcccgcttgaggcggcgaaaacgcggctggcgctggcttcactggcgttacggcgcaacgacaaggaaaaggccgtgctgctcgtgagcgacgcatggcccatgtacgattgtctcaaggattttttctggccggaggaactgcttgctctggtccccacctacatgcgcaagcatggggacgccaatttttcctcgcgggcccttctcgaagcctaccgtgaaagtttttccccccacaggacatgggaacagttcgaggccttttcgcaggctttgttggcggagtcggcccgcatcctcggcactacgcagggatacctctttcatgtcccgtatccacatgcgccgctccgccttgtggccgttctcggaggcaagctcgaatccgtgacgtatccttatgcctccctgcccgatctcatggagctcgtagccgagggagctccgcttattctggacaatgtgcaggaaggggggatggggttcggaagcatgttgatcggcatccccatagactgccgtcccgatggggtttatgcgctgtgccatgtcggggcttttttgccggaggtccgcaccgtccttgaagagaatgtgctgaaagatatcgggcgtgtccttgcatgggagtgttcccgcgtcatggagcgggagcggcgtcatgcggagcgccttgagacgcttgcggatacgtctggagagatgatttgcgtttccgatgagatgggacggtttctcggcgatgtggaacttgcggcgaaaaccgacgcttccatcctgctttgcggggaatccggcgtgggcaaggagatggtggcccggtacatccacgagaaaagcggcaggagcggcaggcttgtcatcatcaacatggcgagccttcaggacgagttgttcgagagcgagttcttcgggcatgaaaagggatctttcacgggagccatgaccagcaagcccggtctggtggaaatggccgaaaacggcacgctgtttctggatgaattcacggaggccagcacgcgggtgcaggccaagctcctgcgggtccttcaggagcgctgcttccatcgcgtgggcggaacgcagaccatcagcgtgaacttccgccttatcgcggcctccaacagggacatcacccatgcggtcaggcaggggctcttccgcgcggatctctactatcgcatagccgtgatcaatctgaaaatccctccgctgcgcgaacgcaaggccgatatcctcgccattgcccgctactatctgcattttttttcgcactggcatcatcgggaatgcgttcaggatttttctccggaaaaccgccgtatcctggaaagctggagttggccggggaatatacgcgagctgcgcaacgtcatcgagcagtcggttgtcttgaccggggggcgacacctgacgcttcctgatccggtggagcataccgaggcttcccgaggcgtcggggctctgggaggtggggagatgcccgaagagttgttttccggaaatccgtctctggcggatctcgaaaaacggtatatcgagaggacgctggagcagtcgggctggcggattgaagggaagaggggagcactcgccgtgctgcgtataagccgatcagcattgtacgacaagatgcggcggtatggagtgaagaggcccttttgaggactgatgcctctgaaggccgtcatagctaaagtaaaacatgaaggatgagcgacataaaaaacattcccaaaacggcgaagggaggcaaacgcgggacggagaaaagaggctgccagcctttgcgtgaacggctggcagccgcggagatgatctcaggattcgtagacgatgcgccctccggagatggtcttgagcacggaaagcgtttcgatggactcgggcggcacggtcagcggatttccggaaagctgcacaaaatccgcatagtatccgggagcgattgtaccgacggcatgatcccgtgcgctgcacttggcggcattgacggtgtaggctttgagggcgtcgagcggcgagatcctctgatcagggccgagaatgcgccccgccgtggttgtgcggttgacggcggtatggatggaacggatggcatccacgggctgcaccggagagtcgacatggaggccgaagggaattcccatgcgcacgcaggaaccgcagggatcgagccgcgcggcccgctcttcgccgaggaacaggttgacgtggcgctcgccccagacgttgacgtggcggacaaagaacgtcggcgtgaccccgcaggcatggagccgggacagctgttcgtcagtcgccatctgcacatggatgatcatgtctccggggactttcctcgggcactttcggagggcctcttcaaacccccgcacgacgaattcgatggcggcgtcgccattggcatggaaggcgacggggacgccttggcagtggtacttggcaatcagctcggcgatctgctcgggcgtgaggacatgatctccgcaaaaatcgggtttgcaggcgtaaggctccccgagcacggcggtcagggactggatcgagccgtccgcaaacgatttcacccccccgtagtagagatggtcggaaacgggcatgttccatgtgccgagttcgagcatttcatccatgatgttgggcatgaaatgcaggtagcctcgggcgttcatgcgtttttcccgggccagccggttgtaggcgcggagaatgccgtgagcgccgttgctgaggccgatgcctccatcctgaaacatcgtgaatcccgcacggttatagtcggcgatcgcatattcgattttctcagggagcttctcgggcgggcaggccggaatcttttgaaataccttgaaataggcgttctctttaagcagtccttccggcatcccgtcatccccgagtgcaaccattccgccttcgacggaaaaatccgcggtgacgccgagcttggcgaggccgagcgtgttcgcataccccatgtggctcgtgatgtgtgatacgaaaacaggccgctcctgactgaccgcatcgagatcatggcgggtcaagtggcggtggtcgctcatgcctgtgtcgtcgtagcaataccctatgatccattccgtgtcggtctgcgtggcggcgtgcgtgcgaaaggcggacagcaggttgccgatggtcccgtgggccgtatcacagaaaaattgggtgcggcactgcgcgtacatggaaaggtggctgtgcgagtctatgaagccggggaggagcacgccttcctccagatggatttccttgcgccgatgccggggggcgagcgcgcggagttcttccagcgtgccgacggcgagaatttttccttcactgatgcaaacggcttcggctgtgggttttccctcgtccatagtaagtatttccgggcaggagataagcgtgcattcgtttgtgagcataaccatttcctttttaaaccgatgaggcgccgtgcgggccgcgccgcacgtggaagagaaggaccgtaccaccccaccggactggtgcggaggtacggccgccgttaccactgcttttgtccgaccagcttcagggcgaacatggcggcgatgccaataacggtgatcgcgccgtagatcatgaggatttccattcccgtgaatgtgtagaacgcgggggcgaagaaatagaggatgggagcgcacgttacgaggatgcccacattgaagaaggcgagctcaagcgtggcgggcgtgctgaaatccgggtcgatgatgcgcagaagcagcaggccggtggctgtggaaccgcaacagcagccgaactggcagagcacgcgctcaggcccgtaattggtccggcgtccgaaccagaggttgagggcgagggcgaacagggtgacgctgaacgccacgaggaagatggggatgacgtactgcttgaggacgacgatatggatggacatcaaggtggcggtcagcaggtagtccacggaggccccggtgatgcgggtctggacaacggggtccatgagcctgcccgcgccgagcttgaggagcagggtacggagcagccacgcgacgataagcccgtggatgaagaacatcggcatactgagggtggccccgaatcccttgagccacttgtattggtcaaagaagggcttgatgtgggcttcgatccagctcagttcggcataggtgatgagatagacgatgccgacgagggcgacatggaaggccagcgtgtcgatggttgaggcgtgggtcgtttcgcgtccgttggttgcggtggacttctcgtccatgatgccggtcaggaattctttggtgatggaagctccggtcttgttggcgttgaggcccttgcggacgaaccagcgggcgacgggcacgccgacgatggcggccgaaaggaagccgagcgccgcgtagatcacgccgacggtggcgcagtcggcgatgccgcccttttcccacagcgtgccgaaggcataggcttgcccagggccctgcgtatagccgtgggttacgatcatgccgatgaattcgctgaggctgtttccggtcgccagattatacagccagatcaccgcgccgccgatgagggcttgggcgggaaggctgattgtccagatcagcgtctgccacatgcccccgcgcacgacttccttggacgtattttcctgattgccgcgcgggcgtgtcagcagaagcgaaatgtagctgatgttgaaggcgtggaacaggaaccagttaaagctgctgctcgtgatctgccattctcctattttaagccagcccgtggaaacgatggcaaagccgatcagtccgccgatgatgctggcagggaccagatagtcctgaaacagtttgacttttgcgcgcagcagggtgccgatgagcagcattagcgaaaggaggccgaaaaggatgagattttcaaaaccgcttcccatgacaaaactccgtctttgaggttgacccgagcgtttgagagcgctgagcccatgcgggctctctctggacgtctttgtctgcaagcggtattccataaaaaaagaataaataaatttcgtttgttatgcgttaaagaccttcccaaaagtgtcatttgtcattatactgagacaaaacaatatcatattgtatttattggtttttaaagaaaaatgtctcttttttatgacagaaatgtcttgttcttctgcctgacgtgggatgcatacactgggagactttatgtccatgccttttcccatcgcttcggatgaggatttcaaacggcttgttgaaaacccgttgttccatcagctgcttgatgccctgagcatcggcgtttcgctcacggaccctacggggacggtcaggtatttttcgcagtcctgctaccacatctatgggcttgatccgtccgagagcgtcgtaggcaaaaaaatcgacgccatattccagacgggaagggcgggtgtcctcaattcgttgcagacacggcggatcaatacggtgaacagcatctcctacaatggagtcgaagggttatgccgccgttgccccattctggacgacaaaggaaatctggtctgctgcctttcggaagtgatcgttaccacgcacgacaatgagcgcattgaggagctgttgcacaacctccagcagctcaaacgcaaggtcgggtacttcatcgcacaggaaacgacgggcgggggcctgcgtacgtttgacgatctcgtcggcgataccagcgtgatgcaggcactcaaggcaatggggaagcggttcgcgcgcagcagggagcccgtgctgatcctcggggaaagcggcacgggaaaggaattgttcgcgcaggccatccacaaggcgagccctcgcgcgaacggatctttcatttcagtaaactgtgcggccttgccgcgtgaactggctgaatcggaactgttcggctatgtggagggcgcctttaccggagcgcggaaaggcgggcagaagggcaagttcgagctggcggacaagggcacgatctttctcgacgagatcggcgaactcccgctgtatcttcaggcaaagctgctgcgcgtgctggagagcaatgagatccagaagatcgggatgagcggcagcaagtattcggatttccgcctcatcgccgcaaccaaccgcaacctgccggaactcgtggacaagcggcagttccgcgaggatctgtatcaccgcctgaacatccttgagctgaatctgccgcccctccgcaagcaccggggggacattccgtccctgatcacccagctcatcgaggggatctgcggaccgcaaaaggcacttgagattcggatatcgcaggacgtgctcgacctcttcatgcggtacggctggccggggaacgtgcgggaactcaagaatgtgctcgcctatgcgtactgttgcatggacgacgacgcggtcgaactgacgccgcgctatctgcccgagcggcttttcatgggctctcgctcggaggatgtgcccgcagctgaggagccgggcgcgttttcttttcaggccatgcagcgggaggcggaaaagagggccattgaatccgcgctgtcgctggcgggcggcaacaaaagcaaggcggcgaagctgctcggattttcaaggaacaccctctacctgaaaatgaaggcgctgggcatggggctcaaaaggaaatagacgtgaaaaggccaagagacccaagtctctccgcctatcctgttcatgaaaccgtgcgcatatgtctttacaagaatgcggtcgaaacgatgtcagagtggccggaagcttggaaatcgggcatgatcagagtgaggaggccaacgcctcctcactcagcgcgttgggactcccctatatggcggtccagcctccatcgatgtggatgacctgccccgtgatatagccggacgcgggggaagcgaggaacatggtcaacccttggatatcttccgcgaagcccacccggttcatggtggtttgccgggcgagagcctcgacgacttccggcttgtcgaagagcggggcggtgagttgcgtcttgaagaagcccggcgcgatggcattggccgtgatgcccgttccgggccgcgaccatgcttcggccatgccccgcgtgagctgggctattccgccctttgacgctccgtagggcaggccgttggggaaggcccggctgctttgaagggaggcgatgttgatgatgcgcccccatccttgccgcatcatttcgggcacgagggcctgagcgaggaagaacggcgcggaaagattgagccgcagcgtgtattcccaaatctcgggcgtgagttcgttccacggcttgcgcggattcagcccggcggcattgacgaggatgtccggcgcgccgaaaggctgggacgccttttgggcgagttccggcaacgtcttgagttcgctcacatcgaaggcaatgcaggcgatgcgtttgttctggtccgggtcccgatgggcagagcgtgccgcgggatcggaatcgtacgcgagatggccgccctgctgtttcaagctcaaaaagatctcgtccgccgaggcctcgaggcgatccagcgtgcggccgacgaggataaggttggctccggcgtggagcagggcatgggccatatatttgccgagcccggaacccgcgccggtgacaagcgcggtatggccttgaagcgaaaagagttgcgcctgaaggggagagcgtgcttccgtatcgcgttgacaatccatgagagcctccggccgcgtagtgtttttgtgttttggactcggtgctgtttaacgagacgccgtgtttcgaaaccgctattcgacgtagatcatccgtttggtcattcccccgtcgacgacgaggttgtgcccgttgacgaaatcgttttcctcgtgggcaaggaacaggcaggcgttgacgatgtcgcgggggatacccacacgcccggaaggatgctgggcatgatccaagtgggaaagcgtttcatagccgtcgacctgtatccagccggggcttacggcgttgaccgtgatcggcgtggcgctcagggagacggccagcgtgttcgtgagggagacaatccccccttttgaagcgccgtaggcctcccatcccgcttcgttctggttccagcgggtggaggcgatattgatgatgcgcccgtaatcctgccccgcgttggccttgatgaaggcctgcgcgcacaggaacgcgccgtgcaggtttacggaaagggcgttgtcgaattcgtcggcggtcatttccatgacgggcttgtggaaatgggcgagggccgcgttgttgacgagtacatggacggcgccgtgccgttccgtcacccgccggaaggcttcgttgacggcctcggcctgtctcaagtcggtttggatgaagccaataccgtcaggcaaggctttgtgctgttccacgtcgagagccgtgaccgcataccccgcgcgctggaagccttcgcaaaggtgaagccctatgccgcctgtgccgcccgtgatgacgcatatcctcatgccgcaccccgttatgctgagacagcctcagcgttttttatgttcttctgcgggagctgcgcaagcacgatcgcgcagaacataaaggcgcatcccatcgtttcccgcatggtcagttgctggtccagcatgacgaatccggccagcactgacaccaccgcctcgaggctgaggatcagggaggcgacagtgggattcatgcctttctgtcccacgatttgcagcgtataggcaacgccgctcgacatgatccccgcatagaggacgggtttccatgcggcgaggagctgcgtgatgtccggcgtctcaaagagcagcatgggaaccgcgcagagcaggccgcagacgaaaaactggatgcaggacattttgacgccgtccacgcgcagtgtgaagtagtcgatgatcaaaatgtggatggaaaacaggatggcgcagatgaagatcaggaaatcgccgaactggatggtcaggctctccgtaatgcagagaaaatagaggccgacgatggccagcgccacgccgagccagacgaacaggccgcaccgttttttgaagaacagcccgaggagcgggacgatgatgatatagaaggccgtaatgaaccccgccttgcccacggacgtgtacatgatgccgatctgctgaaaacagcttgcgaagcagagcatcacaccgcagcacacgccgccgatccagagctggcccttcgttttcgcgttcgaaggcctgatgccgccgggggaggaggggttcagcctgttgagcagcgcgatgcagggaatgaggaacaggccgccgataaaggagcgcacgcaggtaaacgtgtaggggcccacataatccatgcctacgctctgggcgacgaaggccactccccagatgacggcggtgagaagcagcagaaaggaattccggagttgcagcgtgttcatggtcggtgtgatagcccgagaaggtcggggatgcaataaagccgggcggctttcttggcagggtgggggggcactgtccacaaaggggagccgtgggtgcccagcgtcctctgatactgagacgccatttggggaagaggcgagggcaccgcgcttgaggacggctgatgccttttggatcctgatcgtccgacatcttgataacacgctgtttctagcgtaaaatgagatactttagtcgataatgtggctccaaaaacgtttttggctctcattattggaaaaatgggaaggaaaacgcgtatagtgatccgccatttagccttggcctgctgattcaggatgtgcgtggctgggcgattttgaaaatggtcgtcatccaaaatgtgaatgggttcgcattatgacaacatctttttccaaagcacagtatgtttccggtgaacacgaagactgcccggagagcctgttgcagattattatggaggaagtggatgaaatcgtttatgtaagcgatatcgccacgtatgaaatcctgtatctgaacgagtttggaaaaaaggtattcgggcttacggacatcggaaaaggcaggaagtgctatgaagtcctgcaaggcattgacgcgccttgtccgttttgtacgaatcagtttctcaactgcgaaacgttctacacttgggagctcacgaatcccatttcgcaccgccattatctgctcagagacaagctgatccgctggaatggccgtcttgcccggctggaattcgccgtcgacattacggaaaaggaaaatatcagccaagctgtgcagcgcaagcttgatattgagagtaccttgctggaatgcatccgtatcctgaatagggaagaaaattttccgcaagccgtggacatggtcctggagaacctcggaatgatgcatcaggccgatcgtgcctatatcttcgagtacagcgttctgaaaaacggcgggctcatcgccaacaacacctatgaatggtgttcagaaggtattttccctcagaaagaagtccttcaaaacgtgccaatcagctacatgagctgttggcagaagatgttcgagcggcgtgaggatgtggtcatcgacaatcttgagtcaatccgggacagcgatttggatatgtacagcgtactcaagccgcaaggtatcgagagccttatcgtcgtccctctcgtcctgaacgacgtcatttccgggttcatcggcgtggataacccgaaagccaatcgggatgatcactccctgctgcattctctggcctatttcgtcacgaatgagcaacggaagcgtaatatgcagagcgagctcaagcggatgagctactgcgacgacttgacggggctgcacaacagaaacagctatatttccgtattgcagaagctcgaaaaaaatcccccggattcgctcggcgtcgtttttgtggatctcaatgggttaaagcgcatcaacgatcagcaagggcacgactccggcgacaaatacatccgggacatcagccggatattcagccgctatttcaggggagacgatcttttccgtattggcggagacgaatttgtcttcctctgcccgaacattccggagcgggtcttttatgcgaagatcgccgcgctccaacgggaggccaataaagcgtatcccgaatccctgtcgcttgggcaggtgtgggccgagggggacatgcacatcatggatatggtgaggcaggcggataaacgtatgtatcaggaaaaagcggagtaccacgcccggcgtggcgatacggtctaaagcaatgcgtaaacaggcatgccgtccttgaggatgccgtgcctgttttttattccatatggaatatggaaggagcacgagaagccgggatttccgggccgtcctgcccttcactcgaaaatacacaaagaccaggttcgagggcgttttcttccgccagtccgccaagcgcgatccgcgaaccggagagtacgacaaaatctactgcttctggtacgctgatcatgaaggtaagggccactggaaaaccgttggcaggcacagcaagggcgtccgcccggccacggtcagaaaggagcgggtaaagttccttgccgagtttgatgccaccggcatcaatcccattgagcgcgacaaagttaccatcggggagatagtgaacgcctaccttgcctggggcagaacgaagggaagtacgttgaccggcctacagccagtattgcgcccacctcaaggccaaaatccacgctttgcctattgccgatctgactccgaatttgctttccagcctcaaggcgcagcttttgaaaacgcctactgggaatacaaagcccaaaaagtccaccaaaaagcctaaagccaaagcaccgacgcgaaaaatgctggccgggcagaccgtcaacaacatcttcagctttatgcgttccgccataaaccgtgccggcgccacaggcatgtggagcggagtcaaccccttgtccaccaagggcggcacttggaaaatggtaaaggctgacaatgaaaggttgcgtttcctgaccagagaggaagtcagggcgcttctggacgaccttgaaaagcggcatccgcagttgcacgatatggccttgctctccctgcgaaccggccttcgtcccacggaagtttttaaactgcgcgggcaggatgtggacggcaatgcctgcggcctctatatcattcagaagggaggaaagcgggtattcgtccgcgtgccggaggatatgatccggatgctccaggcgtatacgcgcaagcctgcggaacccatcttccaacagcctcgcaagaagacggcgtttgaaaaaatacccgcctgtttccagacccccgtcagaaagctcaatctggctccggaagacggcgacagcctgtacgccgtcaccctgcacaccatgagacatacctttgcctcctggttggcgcagtccggcaaggtgacgctcatggaactgcaaaagctcatgcgtcataagaacatcaccatgaccatgcggtatgcccatctgttccccggacaggaaagcgaaaagctctcgattataggggatatgctggcctgagaagtccatcacttgattgattccgaggtttggacacgcccggatgcaatatactcttccaatacggcgcgctcataaaagacacgcctgccgaaattcgtatataccggaccgacgccttccatatgccagtaggcgagtgtcttctggtgaatgccgaattctctttccacatctttcggggcaagcagttttttgcccggcaagtcgggggcatccgtcgttttcccctgctcagcggtacggacggcttttgtaatgagaggaagcagttcttccggcgtggaaagtatgatggtgcggccttcaatttccatgttatggacctcacaattgacgatttggatttgtcccatgatattttgcaatcaattccaacatagagttacattcgttcggcaagagcattttttccttgtgccgaaggacgcagctgtagatgattccaagacgtttactgatttctctgatgctcagaccgctcatagcgagttcaaaaacttccctgccgcgcggtatcagtcgaatagtagatatactcgcctccggttcctcattgaggtggtacaacagctcaatgttgctatgaacgccgaaggcttttcgaattgctgccaaatgccaatataccgtagccacctcgatggagagattccctgcaatagtttttgatgggaaatcctttcgccagcatctccatgatttgtcgctgttgtctggtgatattccgcatgatgaatcctccagatggtggttcagcacacaaaagtgcgtacataatcgcagtaacacggtggatttttgcggaggagtggtagaattgttggtttttgaaattttttcagcgggacggccttattccggttcggattggatgccgcaaaaaagcggcgcgattcgccgttgccgacaccgcgccgcatagtagaaattgctccaagagaataaatttgttcccctacgaagtattggagtgtactgcgtataacctcacacgaactatccgtagcctaaaatatgatgcacatacctttgggtgtttacataccatttgaattttttctgaagcagacacagccgatattaggtcttccagagaattgttgtagatgaaatttttgatagtatagatgcttgttcccctttttatcctttccagagtgtgcagttgaagagatgtttaaagctgggggcgtacacaaaaaacggacgctcccctttgcagacgctcagaattcccacttcaccatcagactgccggtcacgccttcgtgcttgccggtgtagccctgcacgcccaggtccacggtcaggggcaggtcagcggagggcgtgagggagaggcccagttcgccgatgccggtattgccgcgcaggttcggggcgtcgatgtcaaaaccgttggtcctggcccgtgccttgccgtcgaattcgtgttcccaggccgcaccgatgtacggagcgacatgttcgttcaggatataggcgaagcgcccgccgaaacgcaggcggctggagttgatgtcgtcgaaactcagatgttcgccggtggacaggcccacgctgtcgccctgctgccgtgtccagaagtacttgccgtacaggtcaagggtggcggcatcgttgatgttccagacgtagcccgtgccgaaatgcaggccatagtagggagaactgctgtcgtagtccgccttacgtccggctgcgtcgcgcaaatccgagctgtcgtactcgttgtgcgtcttgcccgcgcgtccgctggcttcggcgtagaagcggcccggcccaatattgacgaagtccatgcgggccaaaatgccgccgcccagatagtaggcattgccgtcgccgtctacggaagcggcgttcgtgaaggagttgtgggtgtcgtaagagccgttgccgtattcaaagaatgcgcccaaggtcaggcggcccggcgcaaggtcgattccccaggccaggccggtaagcagggaaaggctgttcatgtccagatgcgagccggtgttgtagcgcaacgaaccgccggacagcgcgccgaacccggcaaagccgtgcctttccgcgtcgtccgtaccggaggaggcccgcacggcggaatccatgccccggcccgccacgaggtccgcgccttgcaggttcagggccagtccgccgaggaagccttcggacagtgccttggactgatccgtggctctgccggggctgacttgagcggtgacggcactcagccgtcctgttgtcggatcaagcgctacatctgtggtaatgtcgtgcgccacggtggaaccgatctgcacaatcccgttgccgcgctgcaagttgttggccgtgagcgttttgtccggatcgacatccagcagggtcagggtagacccggaggccagggacgtaccgcccgccagtcccacattgcaggcactgcccgagacgtccgcatcgccggtgacgcgcagcaggggctgcgtaggatgtaccggagagatgaaattgagggtcgcgttcctagcggaaagatcgcctttgtacatggcgctctggccgttggccccattgacactcaggataccgttgtccaggctgtggttgtggcttccccggtcgaataccgtgccgccgtatagagtgagttgattggatgtcagctcgctgcccaaggccaacgtcccgctccgtaccgtggtcatgccggtgtaggtattggttcccgaaagggtcagtgtgcccgcgccggtcttggtcaggccgccgttgccggataagacaccggagagcgtattgttgttgtccgttgcaatggcgctgcccgcaccgctcagcgtccagtcgttggtgtatgtcccgttgccggagagcagcagcgtgcccttgttgccgatggtgttggttccgctgccgatattggtgtcggatcctatggacagggttccggcgctgatcgtggtgccgccggaataggtgttggttccggaaagaatcagcgttcccgcgccggttttggttatggagccggaaccggaaataacgccgtcaaaggacacgttgttggcattggtgttcactgtcacgccggagagtgcgctgccggtcggcgtgctatccagctccccaatgttggcggttccgctgtagccaaaatttactgatgcaaagtttcgtgcgagatgtaccgcggcgtcgctgtttttgttcagcgtattgtcggtgaaggcgtcgccgtccggggaggagccgcccgccacgaccgccccgctcaggtctgcattgccggaaatgttcacaatattgcccgtggccttgccgctgcctgaggcaacaaaaccgccattgacgttgctttggaccgtcccgccgctgatgcttactatgttgcccgtggcactgccggaattggattcgccgccgctgacgccggtcagcgtgccgccgctgacgttaacgctgttgccgatgacattgccgttggcgctgtagccgcccagcagccagttggcggaaccgtttgtcatggtcacgctgttgttctgtgcagggccgtttacgctccgcccgccatagacattttctgtcacgctgccgccgttgaagatgacgctgttgcccgtggcagcgccgctgccgttttgcacgtaaccgccgatgagatgttctcccactgaaccgccgctcatggtcacgtggttgtcctgagcttgcccgccgtcagcggtggcgatgccgccaaaaattcccaaggtcacgctgccgtttttcatgacaacggcgttttcccgggcagtgccctgttccacgcgtccgccgtaaatgacgtttgcttgggacaccgcgccgtccaacgtcacgctgttattcagagcgttccccttaccgctttggccgccgtagatatctcttacggttccgccgctgatggtaactgtgttctcgataacatgagaatttaccgagcggctgtagccgccgaggacgttgccggttacggaaccagaatcgaagatggagacgtcgtttccgtttacggttccctctgcagcgccgtagccgccatagacgctgcctaatactgaaccgaaaccggagatggagacgttgttgtcggtcacggcaccattgttggctccgcccaggatgtcgccgccgaccgagccgcccgacagaatgaccgtattattgctgaccgggctgaacgcggcgtccacgtcattgccataaacgtcgccgctcacattgccgctgttgatggtgaccttattatcgctgaggctccccgcaggaaaaaggctgttgccgatattccagagggggcctttgtcaaggtttgagccggggtaggtaacgtcagcggcgttggccgaaggcgcaaagccgggcggcccaaccagcagggcggccagcgcgcaggctggaagaagccttgtgcaggtaaagcggaatctatgcgtcataggtagcctcctcatgttgtaagggtgaaggatgcggcttgcggcaaacggcgcgcaacgcaaaaggcctcaccccgagaaggggcaaggccatgtttttgggcggagtgaaaacgcggaaagccgcgctacgcctagacgcgagcgcggtggatgggcgatgagccgtgtgtgtgtgtgtgtgtgtgtgtgtgtgtgt

SEQ ID NO: 7567 - DNA, 39966 bp, Unknown
  gut microbiota DNA sequence
gcttccgccagccaagttccttgcttacacgcaacccggcccaccgtcaaaggatgacggcggaatgacggcggatggtgaagcggaagacgcggcatggaaggcatccgatgattacaggcaaaaaggtatttatgttatttatgtcctctttgaggaaaaaagcaaataatttctgcgtctcacccttttcgggtgatacttgggtgccattggagcggatcgtgcctcatggtattttgaaagggcacaaaggacaataaacagtacaaacgtctcttcaggggccatactgaggataaggcgaagcgtgtatcagtccgcttctccttccttcgcccgtctgttgcgacgatttcgctatttttccccgtggagaagtcttctcagttccgggcggttgttcgcgccgcatttccggtacacagtcttcaggtgcgttttgacggtgttgaggccgaggcccacgcggcatgcgatctccgggccggtgcgtccctcggcggcgagccgcgcgatctcatactgtttgacggacagaccgaacggaatttccgaagcgcgtgttccgggcagtcccagatggcgcagccacggttccgccagggccagaatgcgccgcacgccgtcttcatggcgcgtctcttgcggcgcgagcagcagcggcaggacaagatcggcgttttccacaaaaggcatgagcacatcgtccggcagggccgcgtccagagcggcgcgcagagactcaagcgccttttcccgcgcgtcgagcatggcatgggcggcggccaagaagatatgggcgtagatgaagaacaggcggtgcttgtcgaagagaggggtttgcagcagggcgtggaacaggccgagcacggcggcggcatccccggccagcagcagagcgcgaccctgcgccagccggaaatcgccctgggcgaaggcgtatatgcgttcacccctgccctcgtgcacccacgcggggatttcatccggacgccggaggaggccggagaggcgcgccgcgcagacctccgccgtgtgcagcagaaaataatcctgttttttggtgatcagatcgcgcatctcccgcacggcggcgcaggcggtcgaggtgtttttccgcgccagagccagacgcgcgcgcaaaaacagggcgcaaagcgtattgcatagttgcccgtgcagcgcggccacggtctcggcctgacggcagaggcggagcgcctcggtaaaatcccccgccatgtacagggcttccgcctcgaaaagcagctcgccgcccgcgccgtgccaggccgccgccttgtagtaatgcggcatacattcccgcatcagcctgacttcctcccggatgttgccgctttcccggtggaacatgaacagcacggaggggcagcccatgctccaggtggattccggcggatacagtcccgtggggcggcccagcagttcccatgccctgcggtggcggacggacatggccgcgatgtcgttgtattccgcaagggccagcagcatttccagttcaccgcgcagcacgggagtggctggatgcgcctcgtccagcgccgcgcagtagcgcgccagccagcggcagcggtcggcaaaggccggaaagtccgaggcggagagcgcggccagagcgtgcttgaacgccgccctggggtgccgggacagaacctcctccgggcaatcctgaaagagccgggcgaagaaggcggcgctttccgtgaccagatggcgggccatgtcccgttccatgaccgaaagtgcccgctcgaaatcgcgcgccgcgtgatagtgctccatcgcgggaatgaattcgtcctccgccgcgaaccagtcgccgcagcggcggtggacggcctgccgctgttcgcgtggaagtgcacggaacaagcgcagcagcaggctccggaatatggcgtggacggtgtacacgccgctcccttcccggcggcggacaaacgagttctgtcggacaagcgcctccagagctgcccgagtatccgtgccgcagcagaaatccgcctgcggcagggtgaactgctcaagcggacagagcgcgaaaagcatgtcccgcacgtccggggagagtgggcgataaagctgttcttccaaaagggcggccatatccggtggcagttcgttctcggaatactgcggggaagataaggaggaagattgcggggagggcagggtgaaagaacgggcgaaggcgggcagggaaaaagccccgtgttgcgcgtaatggcggcaatgcagatatacgccgctgacccatccgcccgtggccccatgcagggcgcggatctggtccgggctgatcttgaggccgcacagggcgcagtatgcccggatgtcttcttccgaaaacgccagcagggccgggccgaggcgggcgagctctcccttgaggtccgccagcagggcgtcgtccgtttggaaatgccgggtggtgagcacgatgtgcagattgctcatagcctgccgggccagtatctggaaaaagcggacgcacgacggcgcggaagccagcaggtgcacatcgtccacgaccagcacggtgggtctggcaaagtcgaggctctccagcagttccagcgccgcatcgcgtcgggccgcgtcatcgggcgcgaaaggcgggccgaggctgcgcagcgctcgcgccgtttccgccgtctcgggcagacgctccaattcccggcacagggaacgccagaaggcgccgtccggggaatccagcacggaaacccagatcacggctaggttttcccggcgcagaaactcgcgcacggccacggtcttgccgtaacccatcggagcctcaatgacggtcaggggtgaggaaagaatgcccgtgagcgcggccagcagacgcgggctgaagtaacggacattcgagatgccggtgcaaacattgtgttccataggaaccgcctgaggaggattttccctgacggtatcctgtttggtgctcccttggcaaagcgtattcggtggcatccgaagtggacggcgttcgctccacattcctcattcggtctatccggtttgagagtgaagcctgaaggaggttccgtttcattccgcatagccttttctacatccctcgtctcactgttcagagtggaatattcctgtttttggcctgtccattttttcagtaaggagagcggcgtaaccctcccttaaaatagtggagaccaaaactggagacttctggtaaaccatccccagagggagccatgaagaagtcacggttttctgaacaccaaatcatcacaatcctgaagtctggcgaagcgggcaggactgccaaggacgtatgtcgtgagcacggtatcagcagcgccacgttctacgcctggaagagcaagttcggcggcatggaagcttcggacatcaagcgtatgcgcgaccttgagcatgaaaacgtccgcctcaaacaaatgtatgcggagttaagcctggaaaatcggcccttgaaggatgtgatcgaaaaaagctctgaagccaaccgaatttatcggcagctgcagttgaacatgcgccgcaaaggaaaacggcgcctacccagccgagctcccgtccgtctggaggcgcaaaccgtcgtcaacggttgctggtctgtggactttatgggcgatgcgctgatgcacggtcagcgttttcgcacgttcaacgtgcttgacgatttcagccgtgaagtattggccgtggaagtggacaccaacgtgcctacagcccgtatcattcgtgtgtttgaccgcatagccgcctggagaggctatcctacaaaaatgcgtatggacaatggcccggaatttgtctcggcgcaacttgccggatgggctgaacaacacgggattgaccttgagttcactcaacccggcaagcccacgcaaaacccatatgtggagcggttcaaccgcatcttccgcgaggaggtactgaacttctatgtttttagcaggctgagtgaggttcgcaccatcgttgacgcatgggtacaagaatacaacgagcaaaggccacacgaatcattgggcaatttcacgccagaagagtttgccctcaacatgccgggggccccagcttagctttgcactaactgcgggggctttacacttgtccctgatatctttctataactataagaaactaaagaaaaaatatctatattagacgtgctagtcagatatgtgagggacacacactctctcttccacatggcctgactgtgtttttcacgttcatatctctttcgcaaacatgctcaagaacgctatgatgagaaagaggcagcagaacagaatggctttttcagcgaagagggcggacaaggcggctcccagtgtcgcgccgagcgcgaaaaagacgacgatttcgtagtagctgaggatggttttccttgtatcggggtctcgtgtgcggacataatggaatatctgctcggtagcgctgcggagattgccggtacacatggtcgtcgccacgctgtgcccgttgactttcctgaagctttccacttgtacggcgcagacgaaggaaaccaggatgttgacggccgtatcccacatccccgaggccatgaaggccggaaaaaacaggagaagcgcctcgaagaaaacaacgatctgcctccagtgcagcagatcgtattccttgaacttggcccgtatccattccgtgaacaggatgcccagggcaaacgcgatgatggggaagaggtaaaaggcgacttccttgatattgccttccgcaaggttgagcccgaggagcacgacattccctgtctgcgcattggcaaagacatgccctcgcgtgatgtaggtgtagacatcaaggaatcctcccgtcatcgtcagcagggcgcagagcaggaaagattccgatacctgaatgtgtttgccgtgtttcatcctttgattcaacccgaacggcgactttcccttggaaagtcgctggatgcgccggccggttccttttccccctgtgggagggcggctggccgtattcctgtttgcctgcgttccgcaaccttttgcagaaagtatttggaacgcaacggggtgaacaggtatccccgttggattgagaagtcaagtaaagcaatgtgatacatcatgcggagaggcgtttttcatttctccctgtccatttttctcttctcttttcgcaacgcggcaatagaaatgtgcgtggcatgttttcgggggaacacgccacgcacattatggggaggagatacagcttacgcggtatccctgttggagcgctgaaggaatgccagcggtacatccgtataaaaacagacaaaagctatggaaatcacgaaggaaaaagatgaacgtttcccattgatccgctatttggcggcgaggccttcttcatgcttatgggattgagcaaaggaaggacatcctgttttgcctgtccgtattcagcacatgagtacgttctttttctatcatactgaaagaatatccaaaaggcaatgtgcctcggtaaggctgcaatctccaggaagaaaaacgaaacatggcaacgcgggctacgccgccgcagcaaacaaaaagccctgccgggaatcccggcagggcataaaggcggggaagtaaagacggcttagttggcgggaaccacagcgccttcgtacttcttggtcatgaattccttgacctgatcgctcttgagagcgtcgatcagcgccttgagttcaggacggttttcatctccggcacgcacggcgaggatattggcgtaggtcgtcgcggcgatggagtcggccttttcggcggacagcgcgtcggccactttgaggccgccgaggatggcgtagttgccgttgatgatcgcgaggtcgacgtcaggcagggcgcggacgagctgagccgcttcgatttcttcgatcttgagcttcttggggttttccgcgatgtcgcggcgggtggcggtgaggccggcgccgtccttcagcttgatgagcccgttggactggaggagcagcagggcgcgggcttcgttggtggtgtcgttgggcacggccaccatagcgccgtccttcagggcgccaagggacttcgtcttgccggcgtagatgccgaagggttcgtagtgcacggtaccgatggagaccagcttggtgcccttttccttgttgaaatcgtcaagatagggcttgtgctggaagaagttggcatccagctccttgccttcgagcgccatgttgggctgcacgtagtcggagtattcgatgatctggagttcataaccctgcggtttcagaacatcgttggcgaccttgaggatttctgcgtgaggcgtcggggaagcgccgacacggattttcgtggtggcctgagccgcggttgcggaaccggctgcgacgacaagggacagggccgcggccagaagggcggagcggaagtttttcatgataccgtatccttatcaaaggttaaaggttcacggccgcgggcgtgggcccaagaagccgtttgtcgcggaaaaagatcaggaaatgcgcctgtcgcttcgcttggtggcccagttgccgaagctctggaacacctgcacgatgacgatgagcaggacgacggtgatgaacatgatgtcggtctggtagcggttgtacccgtacatgatcgccagtttgccgaggcccccgccgccgacggcgcccgacatggcggagtagccgaggatcgtggtcgccgcgatggcgctgccgttaatgagagaaggcagcgcttcgggcaaaagcaccttcatgatgatctgcatggtggacgcccccatggactgcgccgcctcaatgacgccgccgtccacttcgagcagggaggattccacaagccgggccacgaagggcgcggcggcgatgaccagcgggacgaccgtggcgttgttgccgatggtcgttcccacgagcaggcgggtcaggggaatgaccgcgatcatgaggataagaaatgggaacgagcgggtcaggttcacaacgacatcaagcacggcgtagatcatgggccgtggcgtgatgccgtcctgacggcagatgacgaggaccgtccccatcatcatgccgaacacataggaaaaaaaggtggaaaccagcgtcatgtacaacgtgtccacgacgccttcaagcaacatttcgatggtagcctgatcaaacattcttcatttcctccagcatcagtcccttggagtcggcataggcgaggatacgccggacgacctcttcgttgtccggaagttgcagcaccatctggccgaatgccgtcccgccgatgtcgcgcgtgtcggcaaacatgatgttgacgggagccccgcattccagcaccagattgctgatgaccggctcaaacgaggagcggccgttgaaaatgatccggtacagcctgctgtgtggcatgtcctgcaaggcctcgggaatgacgagctggcgcgcttcttcggtctgagggtggaagaaaacctcttcgaccgagccggtttcggcaatcctcccgtggctgatgatggcgacctgattgcagattttctcgatcacgctcatttcgtgcgtgatgatgatggcggtgatccccaggcgccggttgatgtccttgatgagcgaaaggatggattccgtagtggcggggtcgagggcggaagtggcctcatcgcacaggaggatcttggggttggtagccagagcgcgggcgatggccacacgctgcttttgcccgcccgaaagctgcgacgggtaggactgtgcccggtcggacaggttgaccagctcaagcagctcgcgcgcccgctcgcgggcggcgtcctttttgactccggcaagctccagcggaaagcagatgttttcctcagccgtgcgctgcatgaggaggttgaactgctggaagatcatgcccatgctgcggcgggcgatctgcaaatcccgggaacccaaacggcacatgtccctgccttcgaacatgacgcttccgccggtaggccgctcaagcatgttgatgcagcgcaccagcgtgcttttcccggcgccgcttttgccgatgattccgaaaatatcccctttcctgatggtcaggttgatgccctggagggcatagacttcggtatttttgctcctgaaccgcttttcaaggtcctggatctgaatgatggcttccgtcatccgcgtttttctcctgttccgtttacatcaggagctacaatagtagcgtgcgcgcacgccgtcaaacgtccgtgcgcgcgatactattacctacttttggctctttgagaacgccggaagcctcatttttctgacgaaaaaattgatctattattcttgatggataggacggtgatccatcccgtttcccgcgaatggggaaacgtgacgcctatggtgcttcgcggcgggctggggttgtgctcacagatctatggatttgatgtgcggattgtcgctgagcaggctcatcagttgcgtcacgttgtaattcctcggcaattttacataaaggtccagcgaaataagcccgttgccgttattccgggacttcatgctgatgatttcgaggttgtggctcaggagcttgtcccggatggaggcgacaccgtcccccgtatcctcgatttccatcgagatctgctcggccacggggaagttgagccatgtaaagtttttgtggagcgtcatctgggccgctacgatgagcagggtggccgccacgccgaggaagtagagcccagcgccgatggtcatgccgatacccgccgtggcccagacgcccgccgccgtggtcaggccgctgatggtctggttgcggacgaagatcatgcccgcgccgagaaagcccacgcccgtcacgatctgcgcggcgatacgggaaggatccagcgccacgcccttgagggtggtcacgtcggaaaagccgtatttggaaacaaccatgatgagcgccgccgccagtgccacgatcaggtgcgtgcggattccggcctctttcagacggttgttgcgttcgtaaccgatgaggccgccgcatatcccggcgatgaggatgcgaaaaaagaattccagctctgtaaagacggtgatgtccatgagcctccccgcttgttggaaagtacaatcattgtcatatgccagttgtggtgtggcagttcatgctgttcccgtcaagtcccgaaaggagacatgggcagcggagaaagacgctttggaaggggaagcaatacgggaaaagcatatggggccctcccagatcggctacaacgatacaaggctttgaccgcaattccgcgtcggcgctgcaacattccggtgtgcatcacggcttcaaacggtgttcgtccatgccggaaaaagccgtacgggccatctgcgacaaaaaaagctctcctcgggggagagccttgtgcgtttcgggtgttggaacgcggatcacgcgtagaggatcaatgcgatgaattcgagatcttcagtaccgtcgttctccagcatgtgctcctcgccgtctttgcagatcatcacgtcaccggcggttactggcttcagttcgccattgtcgaagtacaggccagtgccgctgaggacatggtacacctcgaaatcaccgacatggcgatgccggccgacggaacagccgggtttgagcacgcaatggttgaaaacgcggcccttacccgcgaaatcttcgccgttgagcagttccgcggcgaggatatgccctttgccgcctttgtgctgcatgtccaatttggtcagttcatcataatgccgtatcatgaaaatgctcctttcggcccatgatacggcacttcatgaccgttgtgaatgatgggcgcgcggcattacttgctccccgtgaatgtatacggatcatctccgatatgttcgccgcagtccagcgcatcaatccgatccatatcgtccggtgtgagtatgaaggaaaacacgtcgccgttttcatgtatcctgctttcgttgcttgatttggggatggcgatgtgccctttctggatatgccagcgcagaataatctggcccggcgttttcccgtgggcggcggcgatttctacgatggccggatgctgcatgagtttgccccggaacagcggtccccacgccacgagccgtatgccgttttcccggcagtatgcgcacaaatcacgctcctgataaagagggtgcagctcgatctggttgagtacggggaaactgccgaacgcgctccggatttcctccagatgtttgatctggaaattggatacgccaacccggcggacgaaaccttcttcacgtcgcctcagaagtttttcgtatgcgctgagacgttgtttccgatccgtccccggccaatggagaaggcagcagtccaaagcgtctattcccagatcccgcaatgattgcgcaagggaagcatccggatcgtcaaaacgggtcggccagattttcgaggagatgaaaagctcctcacgctgtacgccgcatgtacggatcgcttcgccaacctcggcttcatttccatacatggccgccgaatcgatgtatcggtagccgtcccggacggcccagcggatcgcgttgatgatttcttcgccgtgcgcggcgtaacacccaaagccatatcccggcatggccgtgccgtcattcagagacacgggctccgctatgtcgcgaatgctcatggctgttccccctaaggaaatgttttttcggaactatcggacagggaatgaaaagaagcaagggaagggtgccggcatatgaagacggctgtgcggaatgattgctttttgacgaggagtcctttaggcaggaaagacatgtaccggatctcccttttttacccacaggagtgaacaagcatgattgagcgtaccctttccctgatcaaacccgatgccgtacaacggaatctgaccggcgaaatccttgccatgatccaaggggctggcctcaaggtcgtggccctcaagatgatccacatgaccaaggcacaggcggaagggttttacgccgtacaccgggaacgtcctttttttgacagcctgaccgactatatgagctccggcccggtggtttgctccattctggaaggtgaggacgccatccatcggtatcgtgaactcatgggtgccaccaacccggaaaaggccgctgaagggacgatccgcaagaaatacgcggtcagcctcgaggcgaactccgtgcacggttccgacgcgccggaaacggcggctttcgaaacccggtatttcttcagcgcgtttgaaatagtgtagggtttacctgttcaaaaagaacatgaaggccacgaggacaacgaacaacaaaaccagcgacgtggtaatcatacgagcctccctttgtgaaaagccccggtcatcccggggctttttcgttacatgccgaaccatgtgtagccgctgtagaacagggcgcgtccgcagacctcacccgctacgatgagcaggaggatgattccggccctgatccagagcgggcaggggcaggttcggcaagcgcccggaagcatctcattgacgccattacggatgagcagcagagggcccagcgctgcgccgaagagcaggagcgtcaaatgccatgccagcagataggtggagaacggcgattgcgccaacaacagctgcaacgggatcaccagcatttggagcatgaaggccaatacgatgaatacgggataccagccgagcaggagcgctgccttcttttcgggatccttccgggcggcaagggcgtccatgaagagcagcaggctggaaccgagcagcaggctggtggcgagaaagagccagtaggtgaacagcgaattccaaaaaggaacggtcggaatggtgtaaacccggctcatgacatagacaaaagcaaggccgaggatggcggccagacggcgtgcccatgcattgagcgtgatcagccagaggagaagcccggctccaaacagcccgacgaacaggatttcgcggctcagccacgatgtccccacgttggtgatcgtgtaaaagcttaccgtaggatcggaaagatgttccagtgaagccagcgcgcccacgccgagcaggatgcaggcggcccatgccttggcccgcgacgtgtcggcggtacggctgaagaaggacaggatcagcatacccgccgcggcttggccgagcagggtgaagatgacgagactccaataaccgtgcatggctaaacctcctcggggttgctgatgcgtttcccgcgcagcccttcagtgctgccttgcggtttggaatgacggttgggagcacagatgaagtggggacgggtgagttccggccccggaagcggtgcgatggcggcctgttccccataacgcttgagcagttcgtcgtattcgccgtagtccagcgcgcggcaagggcaggccgcgacgcaggacgggggtaggccttgctcaagatagtcccggcagaagtcgcatttggtcatcttcttgcgctcggggtcaaactgcggcgcgccgtagggacagttccattcgcagtagcggcaccccacacaacggtccggatccacggagacgatgccgttctcgtctttgtgcatggcctgcgtggggcaggcttcggcacagacggggttctcgcagtggttgcacgacagcgacacgtagtaggcgaagacgttttgttcataggcgtcgcccacgggaagccattcaccgccggaatattccagaacccgccgccacaacacgcctttgttcaggttatgcttgtcgatgcaggcgatcatgcaggccttgcagccggtgcacagttccgaattgaagtagaatgcaggatttttgatcatgaatcggtccttttcttcggcctgagatacggccgtccggagaagcggccgtccctccggagcggttacgctttttccacctgcacgagattggtgtggtgagggttccccttggccagggctgtcgggagaagcttggtcagcacgttgacgcagccgttggtgtcttccccggcggcgttgggcgtatgccatgcgccttcgggaagtgacaccacgcccggcatgatgcggggcgtgatcttggctttaacgaaggaaacgccgcgcccgttgaacaccttcacacgatccccgaattcgatgccgcgggctttcgcgtcgatggggttgatccagagctcttgcggcgcgacttcctgcagccaccagcagttcccgtaggtcgagtgcgtgcgctgcttgtagtggtgcccgatgagctgcagcggccactccttgcgttccgggctgatcgcgccttcggggttggggatgtactcgggcagcgcggtgatggcctgaccgggcagcagggtccatgtttccgccagctcggcgaggcgcggcgaatagatctcgattttgcccgacggcgagggcaagggattggcctcgggatcgtcccggaatgctttataggcgatatggttttcggggaagtaccttttgtacacgcccatcgtgtaggcttcctccagcgtgggcggcagttcggggatggccttgcgggactccgcgtacagtttctccagccattggtattgggtacggccttccgtgaaggcctccttcacgccgagctcgttggcaacgcccgcgcagatgtcatagatgcttttggcttcgccgagcggctcaatgcacttgttatcgaagatcacgtaggcgatgttgctgtcgccgtcggaagtccagtcatgctcctcaaggttcaaacagcttggcagcagaaagtccgcataacgggcggaaggcgtcagtgtcgtgtcgatgaccacgatggtctcgcactttttgtcgtccagcaggatggggtgcatctggttgatgccgccgtgctggttcgtcaggcagttccccgcgtagttccagatgaatttgatcggcgcgatgagcctttcgcgtccccggatgcctgccgtggtggcggtcatctgcttgtagtcgtcgatggcctgataccagttgaagcaggagagttccgtcttcacgggattttccagcgtggggaaggtcgccatgggaagcttgtatcccgcgttttcgcgcgccccggtattcccgcccttgatgcccacgttgccggtgagcacggcgagcataccgatggcgcgggaaatgttttccccgttggtggtgcgctgcgggccccagccctgacagatgaagcacggcctggccccggcgatctcgcgggccagcttctcgatgcgggccgggggaatcccggtgatgcgcgaggcccatgccggagtctttggcgtcttgtccgggccttgccccagaatgtaggatttgtaggacgaaccggctggagcgcccttgggcagggattcctcatcatagccgatggcgtatttggcgaggaagggcttgtcgataaggtcttcggtgatcatcacgtaggccagcgccgcgctgagggccgcgtccgtacccgggcggatgggaatccattcgtcgcccacggacaccatggaatcggtataacgcggatcgatgatgatgacgcgggtgttacgggtgaaacgggcgtgctggagcgttttggccttgcaccccgacatgcgcgtttccgaggggttgttgccgaagaacacggccagttcgctgttttccatgtcggaaagcgagttcccgtcaacccagctcccgccgtacaaatagggcatacctaccgtgatctggcaggtggagtagtccgaatagtggttcaggtaaccacccacgagattcatgagccgggccacgggcgtggcggccggaggccagcttttgcccatggtgctgccgagggcacccgtgccgtagttgagatagacggcctcgttgccgtaggtgtctatggtgccgcgcagcctttgtccgatctccttgaaggcttcctcccagctgatacgttcgaatttgccttctcctctgttgcccactcggcgcaggggataggggatgcgctgttcggcatagatgcgctgacgcatggagcgcccgcgcggacaagcacggagctgctgcataccgtagcggtcgtctccggtgttgtccgtctctacgcgggtgatcacgccgtctttgacgtgcacccgcagggcgcaacggctgccgcagttgacgttgcaggagttccagaggatgcgctcttcccctgtccccgagggggcgggcggtgcggcgacggcgcttcccgcattgaggatttcaatggaaaaaggaaagaatgccgaagcgaggacgacggcgccgcccttgatcacgtcgcgccgtttgagcaatgcctgctcggtacaatgaggtttccgcatgagccctccgcagaaaaaggattccgttcccggaacgtcccgatgggacgggattcgaggaacaggcaggcttgcagcataccgcacaggaaaggcggctgtcagtgataagtgggggccggaggttcacgttatgggatataaaaaggggaaggccggagccttccccatatggaaacgagcgtgcttgaagcgctacttgaagaacttgtcgatatacccctgcacgaaaacgaagaacacgatgaacggcaggacatatttgacgtacaggcgcagccctttcgggaacatgaggcccttgccggtgtccgcttcggcgatgaagttgtcccatccccagccgcgcttgtaacagcagaagaacaggaacaccatagagccgaggggcagcaggttgttgctgacgatgaagtcttccagatcgaggatcatggagccggggccgaagggctggatgccggacagcacgttgaagccgagggcgcagggcagggagagcaggaagaccagaacgaagttgacggtgaccgccttcttgcgggtccatttgagcacgtcgatgccgtaggctacgatgttttccagcacggcgatgatcgtggtgagggccgcgaagctcatgaagacgaagaagagcatgccccacagctgtccgccgggcatgctgttgaacacgttgggaagggtgacgaacacgaggccggggccggagcccgcatcgacgtcgaaggcgaaacaggccgggaagatgatgaggcccgccatgagcgcgacgaacgtatccagcagcaagatgtggatggactcgccggtcagggagcgctgcttgtcgatgtagctgccgaagatggtcatggcgccgatgccgaggctcagggtgaagaacgcctgccccatggcggcatagatgggctcccagatgccgtgctggaacatcttgccgaagtcgggcttcaaatagaacaggatgcctttttcggcccccggcagggtgacggagcggatcaccagaaagagcatgacgacaagcaggcaacccatcatgattttggtaatgcgctcgacgcccctctgcaaccccatggagcagacgaggaatccggcgacgaccgtaacggccatccagccgacctgatcaaaaggatcgccgagcgtcccgccgaagaacgcgccgatctgttcgggcgtaaggctcgaaagctgacccgagcccatgtaccagcagtaggacagcatccacccggtgacggtcgtatagaacatcatcagcacgtaacagccgatgatgcccccgtagccgtacagatgccagaacgtccccttgggttccagcttgcggaacgccaggccgatgccctgcttggcggcccggcccacggagaactccatcaccataatgggaaggccgagaatgacgagaaaaacgagatagatgaggacgaaagccgccccaccgtaggctccggtgatgaaggggaagcgccagacgttgccgaggccgatggcgcagccggccgataacagcaggaagccgaggcggctccccaacttttcgcgttcgataccctgttccactgttgttcctccttagggtgtgggaggatgaataggtgacttttgcgcctgaggcaagcggagactgcccgccggaaaacgtgccgatttctcgcgccaaagggaaaggcgatacgttgtcggggattaggccatgttcttataccgaagagcagccgggcccgctgacgacgctgcggcctccggttttgggagtgacctgtatctgcgtcccgatgcgctccttcaaggccgccacatgcgaaatcacgccgatgagcttgccgtcccggtgcagcccggccagcgtatccagcgcggtgtccagcgtatcctcatccagcgtgccgaacccttcgtcgaggaaaagggagtccacccgcaccgtcttgctggccatttgcgaaagcccgagggcgagggcaaggctcacgatgaaactttcgccgccggaaaggttcttggtggagcggatttctccggcctgatagccgtcgatgacgtcgagctccaacggctgctccttgttgcggagaagcagataccggtcggtcatgcgccgtagctggcggttggcgtgctcgatcatgatttcaaacgtcaacacctgcacgaaattgcggtattttttcccgtcggcggagccgatgagatcgtgcagatcgttccagcggcggcactcgcggcgctgcgcctccaccgccgccgtgcgctcctgatgcgccagcttgaccatgtggttgtcgtggagcttctgcctcaggccgccaatggcttcttgctgggtcttcagcgtgtcccgaagcgttgccagcgtctcgtcgagttcttcccgcgtgcgatccgtcacctgtttttcgcgctcggcagccagttgcgcgatacggtcggccaggcgcgcttccagttcggcccgttccgtgagcagctcctgctccctttgagccagcgtgttccgcaccgtttcagtgaggcaggcgccccggtattccgcttcgtcggcgaagccggtttgtgagaggcgaagccggaaatcctcttccagcggcccaatttgtgcctgacgttccgcgatcgagcgatcgagcgtttcccgtttgctggtcagcccagcaaagcgctgtttggcggcatcgacggtttggcggacgccttcaagccgcttttcggcttcttcgacgagcccgttgagccgtttctcttcctcatccggggatttgtccccgagcagccgcctccggtcgagccgcagcttttcccgatcctccgacagggagcgggccgcttcccgctgcttacccagatctttctccatatcgagaagccgggaagcgagatgccgggactccagttccagcgcgctcattttttgctgtaagaggtcacgccgcttttcccgggatacccagcgttcacggcgttcagacaggctgtggagcaaggcctccagcccgtccacagcgaggctttcgatgccgtaaggccgcagccccttcaaaacggtttggcgcaatgccgtgtactgctccagaagcgaacaccgctcgcgttcggtgcgcacggcttcctgttcggcactgtccttatggtggagggcggtttgcagggccagttccagccggtttgcttcgtgccgggccttctcacatgccgtcatgtcggcttgcagcccggcgtcctcctgttcagcctgttgcaggatgcgttcagccagccgccgctcggtctccgtcgtttcccgcagattttggagcgtaaggagcagggtggccggaagcggctgctttggcgtggcgggggtgatggagggatgtgccagtgcggcgaggcattcgcgcacgtgcgtttcgtgttcggacagtgtggcggcttctttttgcagctgttccgtcacccattcccgttcacgcgacagcccggcgagatcgccttggagggaagccaaagcggttccggagcgtttcagttcttccttgagccgcgcaagatgttcctccggcccggcgggggcgggaacggaaaatccggtgaaggggtgttccgtggctccgcataacgggcacggttccccgttatggagatgcctccgcgcttcctcaaaagcccgcaggcgagagcattcggcctgttcggcttcccgtttctcatattccgcctccagacggcggtgctctttttcggcggattgcagacgctgcgtgagtttggcctcattgcgggcacgtttttcttgccgctgctcaagtgtcttgattcccagaaggcaggtttcgtattgccgccgcgcctcctcggttttgtccagcaggctgctgcgggttgccgtgttcatgaggcttgcccgccagtcggcgacgctccgatcgcctaagagttccgccagggccttccggcgcaaggcgaccgcttgttccagacgggccgtttcccgatcgtgccgttccttgagggcaagcgcgtccatatgcgctttggccgtctcttgttgccgggccaacgccgcctcgagggcacgtttcttttcgcgccccgtttcggccagttggcgcaattgtccgcaggagtgctgtatggcggacaggttttcgacaagcccctgatccgccgccgtgtgttgctgggcggtaagcacctccgtaaggctggctcggatgtcggccaattgcgcgttcaggctttgatgggtcgattgcgcggtggtaaaggcgttttcccgctcggcaagttcccgcttgagggcggacagggcctcctctttttcaaggagcttggtgtcatattcccgcacggcgcgggttgtccgcaaaccttgctcgcgttcccgtttgccttgttccagcactgtcccggctgaggcgaacgccgtttccgtttgccgcaattcagcttcacatacgggcaaagcctcgccgtattccttttgctggcggagatcctgcgcctgggcgttccggagggaaacgagcccggcatacgccccggaaagctccagcgccctgttggcgcgttccagcttgcggcgttccggctgaaacgcttcgagccgttccgcaagctgtttcttgcggttttccagcatggccagttcagcctgaagggtacggatgccctccagccagagcagggcctgttgcgtctggtcggaccgccgggccgcttcagatgcctgttcaatcaaggctgcgagttccgtatgcaggcgttgttcctccgcttcctcaaggaggtggatgcccgccaactccgcttccagcgtttcgagtctgtcgcgttcgagcacgacccgcgcgtgtacgcgtttggatacatccgaatagatttccgtgcccgtgagctgttccagaatgggggcgcgctgatccgcaggcgcttgcaggaacgcggcgaaccctccctgcgcaaggagcatggagcgcgtgaagcgttcgaagtccatccctgtggcttcctccactttgtcggccacgccttgaacattgctttcgaggatctgacccgaaatggcgtcggaaagttcgcggcgcggggcctgcaaatccccggaggcttttttcctcgcccgccactggcgccagtggcagcggaacgttcccgagcgggtttcgaaggtgacttcggcaaaacattccccggtctggcgggacatgatttcgttttcgcttttggtgacgtggcgcaagcgcggcgtgcgtccgtacagggcaaggcacacggcgtcgaggatggtcgtcttgcccgcgcccgtggggccggtgatgacgaaaatgccgtccgacaaaaaagccggatgcgtaagatcaatggcccattccccggcaagtgaattgaggttcttgaagcggatctggagaatgcgcatggtgtttccgttaggcgtgagggtcttcttcgaggaatgaggcgacggtttccctgtaggccagacggagatccggcctttgctcgtcgggcacgccgtgggcggcgagacagcgctcaaacacctcgtatacgtccagggtgtccagcgtgtcggcatcgtcatcccgctctagggcgcgttccatgatccgggcgttcttgatgcgcaggacttccatgtccgctcccgccgtaagcgcttcgacccggtcgcggagatcgctgatgagttcgctgcccgtataggtgatttcgagccacgggtgcccgcccccggcggcgatggctttcagccgggattcgatggcctcccatgccccttcaatgcgttccagctcctgaaaaacaggaacgggcaggcactccacggatgcctgacggcccgcgaaatccacgaggcagacgctcttggcgccgcgttccccgaagcccatgggcacgggggaaccgctgtagcgccgggtttcggagccgccgattttttgtgggatatgcagatgcccgagggcgagatagtcgatgttgtccgggaagcagtcggcggtcacttgtgcgagcgacccgacatagagttgtcgcacgccgtcgccgtcggcggtctggccgcccgacgcgaagaggtgcccggttgcgagaatggggagatccggccgcgtccggtacgtctcggcctgcgcgctgatggcggcgtagtggcggcggatgccgtcgatgaggttccgctccttgtcttcaatgctttcgccgggctcgaccactcggatgtcccgatcccgaagataagggacggcgcagacgatgagctcgggctcaccgtccgggccgtcgagccgaaggatctcgtgtccggggtcgtccgagatcgagcctacgacatggacgttgagggcgcgcaggagctctttcggcgcggtcaggaaggagggcgagtcatgattgcccgccaccacgacgatatggcggcagaaagacatgacccggcagaggaagcggtaatacagctcttgcgcacggttgcttggggcactggtatcgaacacgtctccggcgacgagcagtacgtcaacgtgccggtcgcggaccgtatccgccagccagtcgaggaaggcggaaaaggtttcgtagcgcctgcgcccgtagagggtgcgcccgatatgccagtcggacgtatgcagtattcgtaaggatattgttttcatatcgaaggctccgtagccggcctccgtcagaggccggtttttacagatagcctgtgagcacggggcgggcaagccccccttacttggccgaaggggcgggaaccttgggagcggcgatgtcgctagtctgttcctgctttgccggatgccgcttctgatactccttccagccccaatagccgcctccggcgagcagtacggcgagacagacgacgccgagcgccacggcccattttttccagcggctctgtttgcggaagggatcgtcaaaggagcggctggcattgggaggcaaggccgccgcgtcggtcaggcaggatccgagcatgaaattgatggggatttggctgttcaccgcccatcccgaggcatcaaggacaggaccgagcgtcctgcgccgcagcttcagccacgcgaggaacatggaggggcctgatatgcacaggaagatccccacgaacagcagggggaactgccaccatgccagagagaacaacgccgccgcgatgctggcgagcgccgtgccgatggcgccgagggcgagcccgatagccgcgaagatccccatgctccgcccgatgtcgaacggcttggcttccttctgggcatccgcggtcagtttatcaatggatttggaggcgtcggacatgagcgctgaatctttggacgacgcgagcttttcgagctggtcggtgatcatgcgcccgaaccgtttgtaaggcgcgaacatggctgtacggatactgatggggttatccaccagcttgaccaaaacggcttcccagctctggccttgcgtgtccacaaaaacgccgtgccgccccggtatcagcaggttggagtcacccgccgtaaccgccgcgacgatattcatcttttggcccgtgtcgaggcgtgagcactcgcaataggcaaggcagagatggctcggctgggcctgtgccgcgtggttggtgatgtcgtccacgcgcaggcagagattgcaacctctgccgtcgatgaacagcgtgccgatctgaaaggtcgtaggccgtgaaagggcgtagaagtcgcagaaggaaacgaagttcatcaacagccggtgcaggtggtgatggtagaggacgaggcgctccacgtccgtgagcgttttgaggtggcccgccgcgtcttcgtcctgttgcgtcagcgcctcgaaacgggacgggaggtcgctggagagcagttctccaagccgttctatgccgagtttttccacgccgctttcgggcttgcgggcaaccagttccgcatacggggcgaaacgcgttttgatggtctgccatttatcggaggtcagctcgtcccgtacgccgaggagaggaacggcaatcgtatctttcagagcgatgatctgatcgcgccatgcggggttgaggcctttttcaagaggaagcggctgatccgccgcgatatgcgcgagaggcagttcgcgcatggcctcgtcatccgtgttgagggcgtgatcgacaagctgggcaaaaatcgtttccggggcattgagcgcatccgaggcccgaacgtcaaaggcgacaagctgacagcgcgtgaagtagtcatcgattttgggtcgtacggactggaaaatctggaaggccgtgtccgtaccggaaccaagcggaaacgtgtccgcataggccgcaagttcgtcgaaccacgccttgtaatcctgtatgttgcgcatgaacgtttgggccagttcgagcgtggcgccttgctggcctccggcgtcggttgctccgcccgtcgttgcgacgatgtcttcgatgaagcggttcatatcgggatcgaaggaagggtgcggcgtcatcacgccgtcgccgttgaaggcggtctgtgtagccgcgccaatggcttccgctacatcctcctgtgtgagagccccctcttttccactttgcgtgaggatacggcttgctgtggaataaagtaggcggccttcatccgtatcctgcctgatttcctcaagggacaactccggacggctttcggccagcagtgccggatcgctgaggcggtccacagtccagcgaacggcgtcgagaacctcttgaatgcggatgcgcccgtccttgtcggcgtcaagcagttccagcgtccgtgcgtcgaactggagtttgtcgatagggcaactgagcgcgacccagagtttggggtcaagctcgttgaggtgcagcagttcttcaggcgtccgcaaggtcacctgatccagaccgccgatcctgtgaaacttccaattgaaggccgcatgattgtgcatggcgttctcctctaagcatggtgttcttttggctgtagcccggatcggggatgtttcaaatgaaaatatgcggggggtggcgtacggaccgtagccttttgcgcgaagaagacgtacaaacgggagacctcgcctcagtggagaggtttttccctgaaaaggcgtaacagaaacctaaaggatatgacaatgccgaagttgcaagcggcgcgagtgacgcaatgcgggctggatttcgcggtggtgctggtcgaccccaagctgtttatgaatcccagcgaactggaagcgttttcggaacgcgcccaagcgctctttcccggcgttccggtggcgatgctgagttatgacgatctcaaggtgacccgctatcatggccccgatgatgttgtagccttcctcaagcaggtacgtgtggtcagcctgccgtgggttgagtacaccatcggtgaataaatcgaagggaccgaagtgattcggtccctttccgttacggcgcaagcaggcggagcggggcggaaaccacaatatccagaatgttgaggactccgctgccgatactgttgaagacattggctaaaatgccggtagcgttgaaactgcgctgcggcgcgtcgaggctgccgtagtagcgtactggaatttccgggataccgggcccggttacgttcaaggcgtagttgagcgttttgctgatgagattgatgctgccttggcctcggacggacaggccgccggagaggttgagatcgcgtgtggtcaggattcccttggaaagcgccccggaagcgctcagggaactgaaacggctcatagggccgggtttcttcgcatccaattccccgttccggataacgaaattgagggtgccgctcagggcggcggggatatccgcgccggagcggagcaggccggaaacgtccgcgtcaaggcttcccgtgccggacagcagttgctcctgcccccgttccttgcacagcgtcaggacgttgacggcgctcagcgtataccgcaatcgcgcgagcagccctcccgcagtgccctccgcgcgcagtccggcccccgccgttcccccagcgacacgggccttgatggggtcggccgtgagcacgccgtttttgatggtcacgggaacggtcaggttttcatgcggaatgcgggctatgaccagacgttccacactgagatccccatccagctgcacttttctgagccattcggtctgccacggtgtactcggttgtgcgtatttggaagacgcgggcagatagtcccccagacgcaatgtcccaagccggagcttggcggtccagtgcggaggagttcctttggtgccttcgatttggccggcaaggcgggtatcatcgacgcgcccttcaagctctgaaaggcgcagtatggactcgtccgcccggatttttgctttgatctgcgcctgcctgagcgcctgttggggaaggctggagggcaacatgccccattgggcgaggagggcacggaggtttcccgtggaaacggacaacgaagcgtcccatgccggattggcatccagacgggttccgcttacggaaccggtgaacgaggcggaggcgtctttcgtgagaagctgcccggagagctctttagcctccagcgtgttggcttgcgtattgagggacagtttgcctgaagcctgcccgccgatgccgttggctgagagcttgcctgaagcggaaacggcgtcggcgaaaagattgaaaggaccgctcgttgggaactggagcgcacccgtcaggtcgagcgaactctgcccggccggcgtcgtcaggctgccctgccatttcccggtgtaggcataacgcggctgcgttccctgcgtccggcttcccgccccctgaaaagcgacgcgcaattgagagaaggcgagatttttttcttttttggcccgagaaagcgatagattgcctttctcgataagcgcttcccccttgcctttcagcgaggagaggaaagcggcgggcgaagtcggccgtgccgtaaaactggccgaacctgtcaatgtgcctttcagaacgggatatcccgctacagggctgaacaggctgtcgacgttgacgccgctggccgtgaggttcagggccatgacgtcgccggggatgagatcgccttgtgccgatccgccgtacagtgagccgcagcggatggcgactttggtctgttccgttctactggccggatcgggcgtaatacggacggaaacgccgttggccgcccacttccacaatgtggcgcgggcggcttccaaatggatgtcatagcccaccgccgtgttggaatcgtctcctccgagaagcggcggcactttgtaggacggcgcggaaaccgccttgttttccacttcggggaatatccggttcaatggggcgtctttggtcgcaaggtgcagcgcaatgacgggattggaaaaatcgttgacgcctccgcctcccgtaaagacggtattcagcgtcgtcgcggtgacggaagaggcgacgagtttttgcggggtcagctcaaacggaagcgttcccgagatgttatccaaggcgacttgcacgcccggcgggagatcccgcgcaaagccgaaccagcggggaaggctgaggtgcttgagggcgagcgtcccccgcagcgtcggcacataatccgcgccgaagagcagccgtccgtccaacgtggcctgatccccttcgactttgaggctggcccccttgatggcgatctgcgggagaggggcaccctgaaagagggagcccaaaggggcttccgccgtgaacggaagcaggacatggacgggaacggattggcgtttcagtgaaaaagtgccgtcaagggaggccacgccgtcaatggcgagcgtgccttgagtggtgcgggccgtcacaccgaggacaaaccgggggctgccctcgccaaaggaaagcggcatggcgcaagtggctttgaagcggagcatggccgcggcatcagccgggaacgcatattccagatcggatatttccagatcaacgttgctgagggattggattggggtggcctgcccgtccttttccggcggcgtgtttccgtaccattccattttgcccaccgagagcgagagctcaccgggttctccgtttcccggaacggtggcgcttccggaaatgccggacatccgccactgagagtgaatcccggacttgttcgcgccgggaaggagagaggcgatggttccgtcttcgagatcgatatccatttcagcaagttgcggtggtatggagaatcgcggctgttgtgtcgtttccggcgtcgttccggctggcggctcaagcagcagcgtaggcttgagaagacggactccggcgatgcgcgtttctccgtggagcagggcccagaaatcaggatagacggccccttcgtctacgaacagcgtcattgccggggtacggatggtcaggccggaaacgctggccgccggacgcggaaagagggagagcgaagcttgatccgccgacaaggcaaacccggcttcaggagcggaaaagcgggcggacagcgagcgggcgagcccaacgggatcttgattgaacgtatagatgaagaagccgagcgcaaggacgagcgcccagaaaagggggagcaaaacataaaggaggatggaggtggaacgcttcatgtctgtagctgtttgtaatcaaggcgtttgagatcgaggtataccagtacgcctcggacaggccggggcgccgccttggaaatgaggcgcatatagcgttggagctggatttcgtgcgctggagttggcgctcccgttttgtattcgaccacggtaatccgtttcccgtcgtcgatcacaaggtcggagcggtacaattcgccggattcgtcaacgatctcctgctcgggggtcccgtatcgcagccattccccggcctcgggcagggccgcgtaccatgccagcatttccacgatctcgtgttcgaccgtttcggggtcacggatcgggagcgggaacgtgcgcaagccctgcttgaaggcttggcgggcatcctcttccgggtgtcccgtcagttgccccgccgtttgcaggcaagccagacagtggtgcgcgaacgtgccgcggcgtttttgggtaaacgaaaattcttccagcggatttcggaagatgcgcaaacgcggcagccagtgcatgggacgccagcgttcgttgctttgtcctgccgggatgctttccggttcgatcagtgccagctcttcggcaacagccttgccatcccgcatcgttttgggctcccgagcctgttcggcgggacggacgaaaggaggcgcacctgtctcaaacgtttcttcagtcatgggaagcgcgccgagaagcacgttcaggccgcttccgagccccgatgcattgcggctggaggacgtttccgtcaggaaggcgtgcagctcctcttccgcccgcgtccacgccacataaagcaggtgcagcgcttcacgggcgttgtccgcaatggccttgtagtgtgcgtagccggaggccgggccgcgcggagcaagcaccgtcagcccgtccacatgcgtctccacggcagggctgtccacccgttgggaaaagttgtgccacggcacgatgacgacggggaattgcagccccttcgatttgtgcatggtcatgacccgcacggcgtctagggtttccggcatgggggctttttcctgttgcccgtgcttgttccaatagccgaggaacgaggataacgaaccgtatccttgtccttccgcgacgtgaatgatttccagaaagcggcggacaaaggcggcctcatcgggatagcggctccatatgtcgaggcgccccaacgcttcgcgggtgacgtcatagggcgtgagcagccccgcgtcggcatggaaaggcgcgatccacttcctccagatgtcggggaaatcttcacggaaggccatgaacagcggcatgttgcggcgctccgacgtccggcgggcggcggcccagtcttccagcgcctgttcgctcagggggataagcggcaacagcatctggcggccggaaaggaatgtccagaatgccagatcgttgcgcggggaatcgaggaacgtcaggagcgccgtgatctgttccaccagaggatgctcggcgagcaggaagctgttgtcggtgacgacggggatcccttcctccatgagccatccggcgacctgtgcggccttcccgttggagcgcaccagcacggtgacgtccccccacggacggcgtgagacgacctcctgaacgcatcccagcagacgctcgcggacttcttcgtccagatcttcgctcttgtcgccgtagacgcgctggagacgcaggaaaccttcggccttgtcgggcgcgactttctgttcggaaccggcaaagccttctttgagcagctgggccccttcctcaagaatggctgccaggagggcggacggcgtgtctttggggagcatggcggacagcacggctttagccgtggctgtttcggaaagctggcggaacagggtgttgttggtttcgacgatggcccggcagctcctccagttggtggggaggatgtcgacgcgcggttcgggcgcgacggcgcacagttccgcatcggagcggacctcgtcaaatagcgtggcgtcgccgccgcgccagccgtagatggcctgtttgacgtcgcccacccatgtgagcgaaccgccgcgagaaagggcttccaatacaaggggatggatggcttcccactgttcgcggctggtatcctggaattcgtccacgaggatgtgggtcaggctcgtccccaagcggcaaaacgcttcgggaacgccatagtcgcccgacagcacctgacgggccagacgggggacgaaggcggcgggaacggccccttcgcgcttgaggaagtcgggaacctgaccggagagttcccgcgccagttccacaaacggcatgaccgtctgggcccggcggagcagcacgccgtcctcgtcccatttccggatgatgtcccgcatggcgtcgaaagcccgttccgcgtcgggcgacgccttgcctttggatgccttgttcaggcagtcgtccagacaggctttgcgcagcatggcggagtttggcggcaggttcgccggggcggccttccggcacgtctcaagggctctggccagatgcgcggagcaggaaagtttttcttcggcaagcaggtgatgcaattgctccacggcatcgcgcagatcgcgggtcatggctcccaggcgttccgtaatttcagagggatgcgcgagtgtgacggattgcgtccccatgatcggaagaagcagttccatgacccgtccgcgcagtgtttctccggcgagaaaaccgcgctgcggggaatggaaaaaaacgttccgacatgcttcctccagcagggagtgaagccgttcgtcacgccgcgactgttccagcaggctgtccagaagcggcgcgatggcctcatccgtggcgaatacgggctcgaagtcgggaggcagatccagttccagcgcggtcagcctgacgataagatgcaggaggctgtcgatggtgcggacgttgagagccccatagcggtggaggatgatccccacccatctccgggcctgctcgcgcgtccatccgggggcgggcttgtccgtaccgagggcggtatccttaaggcgcccgatgatccgttcctgcatttcggcggcggcgcggttcgtgaaggtgacggcaaggatttcgggccagccgtgcggtccggaatggacggcgctgcacccggaaaacgaaccgccgccagcttccgcggcacccgaaaggtgcttcaggaagctggtggtcagttcataggtcttgcccgaacccgccgaagcgcggatctgcctgagctgtggatcgtgtgagggcatggaggacacggaatgttacgctttttcgccttcgggcaacataccggtcaattcgccctgtccggtcgattcgagcacggcacgccacagccccgaacggatgtcgagcttgcggcgttttttggtgacgaggtccagcgggatatggacgtagcggtccatgatcttggcaacgaccatttcggtcctgcccgccatggcggcatggacggcgtgctgaccgaggaaaccgcaatagacccggtcgttggcgttggccgggacggaacggatgatgtagcttgggtcgatgtatttgatgctgatgggcattttcccgtggaaatagtcgacgatggacgtcctcagcaggctccccacgtcggacagcacgggattcccggaggcgtcgcgggcctcgttctgctggaggaggtgctggcctgcgccttcagccgcgatgatgacggcgtgcccgcgcagtttgaggcgccgttccagcgcggggagcaagccgccgtcgccgtgcaactggaacggcgcttcggggatgagcacgaagttggcctcacgcagagcgagggcggactgcgccgcgatgaatccggactcgcggcccatgagcttgacgatgccgatgccgttgggcgtgcccacggcttccacatgcgcgcagccgatggcttcggtggccttgtccacggcggtgtcgaaaccaaaggactgcggcacgaaattgatgtcgttgtcgatggtcttggggatgccgatgatggaaatgcggatgttgcgctggcgtacttccttggcgatggcggaggcggccttcatggagccgtcgccgccgatgacgaagaggacgctcacgttgagccgttcgagcgcatcgacgatttcggaaggttcctgcggccccctggaggagccgaggagcgttccgccgaactggtaaatatgctcgacgctggccggcgtcagctccattacgttgtggctgtaggaggggatgaaaccttcgagcccgtaacggatgcccagaacggaaggcgtgttgtaggcgtggtaggcttcaaggacaatggcccggatcacgtcgttgaggccggggcaaaggccgccgcaggtaacgatggcgcatttggttttgccgggatcgaaatacagatcctgacgcggccccgcttcttcaaaaagcagggtctgatgggtatcgatgtcctcatcgtattcgtggctcaggctcagcatcacctttccggtattgatcatgttcccgtaaggaagcggagaggggattttggcctggccgagcgtggcgatggggatttcgcggaccgggatgctgtattccgatgtcatggctattctccggacggatttttttcgagatgctggcgggcgaagcagcttgtcaggatgccgcccgcctgcgccacattgagcgaatcgaatgtccgcagcatggggatgtgcaggagatggtggcagcgtttggcaacctgcgggcgtatgccgtgttcttcattgccgaggacgagcagggcgggggtatgcaggcgggtggtgaaggcgtcgaggctgccttcgccgaacgcggccccgtagatgaggaatcccgcgtcccttgcctcgtccagcgcccgggcgatgttcatgaccttggcgaccggaaggcgttccagcgctccggctgcggcgcggcgcgccccggcccccagaaaggtgccgttgtggcggggtatgaccagcccggccccgcccatcgcgtacaacgtgcgggcgagggttccggcgttgccggggtcctgcacctgatcaagcacaaggatgagcggcaggggagcgtccgtagcgtccgtgagcagatcggcgaactcggtgaaaccggcctcgaaaagccgggcgacgacgccttgatgcccggcggggcaaagccgatcgaggctttgggcatccgcaagcgtaaaacggactttggcggtacggcacaggtcgaggatgcgatccgtatcttgcgaacgtttgcccttgcggacaagaacggcgtcgatgcgttccggttcccgttccaggagttccaaaaccggcttgacgccggagaggacggcttgttcttctttggaatcggaacaggaagcattttcaagagatgcgtcctgttcaaaagccttcggggcggaacggaacgccttgcgtggggaggtatttttctctgtaatcatgagatccttaaaggttgtcacgtctcggaggattgccaagctcggcctcgtcgagtagactggatatggatttatgcccccggaatggcccggggtaacatcacgaggtgagtagagtgtatcgtgttgtccttcccgcgtctatgtttctccgcagggcaatcggaatgcgcttgaacggcgttttgccgtcctgtgtggcttttcgcccttccggcgttttgggggtgctgctgttgtgcgtcctcgttgcgctgaccggctgcagctccaaaaatatcacgagcaaaggcccctttgtattgcaggagccctccaaagggtatccttcggtgccttcctcttcgggacagaaaacgggaacggtctatttgccttccgacgacggcaggccgctgacgaaagccgaacaggaagcgttcctgtccgaaggggaaatcgacaggaatctgccgcaggaagagcttggggacgttctgctccatttcaaatatctggtgcataaggatcgttataccgtcgagaagaacctcgagcgcgcgcagctgtatatgccgtttatttacgagacgctgcgttcaaggggattgccgcgcgaactggcgtatgtcgcgtttatcgagagcggatacaacccgatggcgacttcgagcagcggggccgcgggaatgtggcaattcatttcgagcacgggcaagcattacggcatggagcaggactggtggatggatgagcgccgcgatccgtaccagtccacgcgggcggcggcggattatctcgacaagctttataagatgttcaacgactggcatctggcggttacggcctacaacgcgggggaaggaaagatccagcgcgggctcgccgctaccggcgccaagacgttctttgagttgcgccgcaagaacgagcagatttacagtgtccgggatcgcctgtccgatgagaacaaacagtatctccccaagtttttggctgtctgcaagatagtgcgcaatctggataaattagggttttcctgcgcgacgttcgcaagttcgtcgcagattgcggaagtcagggccaaaccggggacggacctcatgctgttctccaagagcatcggcatgagctgggaggagttttcggcgcacaacccggcgtatcagcgctatgtgagccacccctcgcgctctaccaagatttatgtgccccgcgcgatggctggcaaggcgcaggccctgcttttcaagctgcctccggcaaacagcggcaagagctatgccgggctgcgggattataagatttcgcgtggcgacacgatggcgagcatatcccggaagaccggcgttccggtggcggaactccggcgtatcaatcaggtcagcgaacctttgcgtgctggccgtgtgttgaagatccccggaaccaaccggacgggcgtcgatcctcgcgcgttggcatccgtgcggggagttccgtcggcaaaggggacgtccgttgcgtccgccgggcgtcaagtgaccccttcgcgcacggtttccgcttccgcgccggtgcgtgagaaagtcgtatcaaccgcttccgccgcatcgcacgaagtgaagcagggggataccatgtactccattgcgaagcggtacggcgtgacgcaggaagcgatcctcgccgcaaacggcatgaaaaatcataatattagccttggccagcagttgcggattcccggcaagggagcggcggtggcgtctcagtccgctaaaaaggctcccgtagcctcttcggttcgccctgtggttgcctctgtttccagcgttcccgtttcccgccccgtggccgaggctaaggccacgaataagatcgtccagtatacggttcaaaatggtgataccctctgggccattgcccgcaagttcaacgtctctccggttgaattgctttcgctgaacaacatgagccggaatacggcgctgcgccccggcgacacggtccgcgtggcggtcaactagacaggtgcgtgccgtaagatcctttgcctgcttcggtcaaagcgtgccgcggtttttccgggcatggcgcggcgtcatcgcgctggccgtcctgctgatcggagcggggttggccttgcgctggctggcgcctcaggctgaaaccgtcacgcgctggatagatgtctatatgccgagcggttacatggggggctttctctatgtctgctcggtggcggtgctgatttgcctcgccgtcccccgccagctgctgagtttcgccggggggtatgcattcggcccgttgttcggagccgtgttcgcaacgctcggcgtgacgcttggctgtgtgctggcattcggcatgtcccggtactgcgggcgttccttcgttgaacggaggtacgggggcaaggctgccgcattcaatcgttatgcggtccagcgccccttcattcttgccatcctgatccgcctgtttccgtccgggaataacttggtgttcagtctgcttgccggggtcagccgcatcccggcatggcctttttttctggggtcgtgcctcgggtatatccctcaaaatctgctgtttgccatgatcggaagcgggatgcgcgtagatgaaggatggaggttcgggctcagcgcgttattgtttgccgcctcctgtgctctgggatggtggctttacaagcgctatgccgccgcgtacccgatgggggcacggaacgaacattgagcgtcttgcaatgaaaaggaaatgatatgaaaggattggaactttcgagggcctattgggaaaagtgcgcgctgccgctgttccggcgggaactgcccgcgtttttggaacgcgccgctgtcggccttgtcggagaaggctccgaatgctttggttttgatgatgaaatctcccaagaccatgattggggaccgggattttgtctatggttgcctgaaggcgagtgggcggaatggcaggacgccgtggaagccttgcttgcccgcttgcccgatacgtatgaggggttccctgctcgtatggcgcccgccaagcgtatgggacgggtcgggcctttgtccattgagggcttctatggccggttcatcgggatgccgcagcctcctcagacgtggaaacagtggcggctcgtgcccgagcagttcctcgcggtaagcacgaacggcgctgtgttcagtgatcggcttggggctttcacggctttccgtgaagcgctgttgggcttctatccggaagatgtccgcctcaaaaagattgcagcccggtgcatgggcatggcgcaggccggtcaatacaacttgctccggtcgttgaagcggggggagacggcaacggccatgcttgccgccgcgcgtttttcggaacaggccgtttcaatgacgtttcttttgaataagcggtacatgccgttttacaaatgggcgcaccgcggcgttgaacagttgccgatcctcggcagggaaacggctgggtgcgtaacggcattggccgggctggattggcgtcttggcccccgtgtcgaggcggtagccggggatattgtggaatcgttgtgccgtgatgtggctgggcggctgcgctcggacggtttgtccgatgccgacggcgattggctggtggaacatgggccgtccgttcaggcacgcatcgaaacgccggaactgcagaggatgtccgttatgctggaatagctttcccagcggatcgcatgaaaggaaggggcccaacggccccttttatcatcattgcgctgcggattgtttcactgcgttgcggcacaggttcaggttgttgcggcaggtaacggcctccgggctgtcggaaagcccgaggctctcatagcaggagagcgcttcctcaagcgtctgggcggctttctcccactgcgcatccccggccagcgccgcgccgcagttgccgagcgagaaggccgtttccggatggatgcccaggatttctttacggatggacacggcttcctgatggtacaggactccctgacgggtttcgccccgctcctcgcaaatgcggccgagattgttcaggcaggtggaaacgccgaaacagcggcggccttccttggcttcccatagatgcaacgccattttcaggttcgcttcggcggcgtcatattttttggcggtgtactgatgggaggaaaggttcagcagtgcgtcggcgatgcgcagatcgtcggcgggcaggttttgcttaagaatgtcgagcgcccgttcgccgagcgttgcggcctcttcacattctccccgctcagaacggagccgggcaaggttttgcagcccgcccgccacatggatgtggttcggcccgaacaattcctcaagaaagcgcagtgattcgcggaagaacgtttcggcctcttccagccgtccttgaatgtgcagacaacgcccgaggccgtccagaaccagaacccggcctcctgcgggcagatcgggtttcagcagatcccggtagattttttccgcggcaagagccttgccttccgcaaaaaacatccgggcctcattcaagcgtcgctgaaaatgttcgtcaagctgcatagggctctccctctggaatgaatgccgaagaggcggcgcgtgtgccgcccgaccgggacagtcgccctgcccgcgggtgcgggcaggatcggacaatggagagtgtaggtcatttcgcctcaaaaggctaccgagggcttagctggaagtgccgctttccagaatggaaacgatggagaacagggtgaagcagatcccgccaaggccgaccatgacccgggccgggaccatgtaggcggggttgatcgtcgccgcctcgaagaggaaggccgcgatgaacaggcaggtcagagccgtcagcaccgggatgaggggaatgcgcttggcgaggggatagggatgccgccacaccagcgccaacaggaggaccttgctcaggatgctgtagcagacgatgccgaggccgataaggacgaatccgggggcgatggtgaccgggctgtactggaaaatcagcaggtaaagaccccaaaggatgtcgatggtgcccatgatgatgaccagccacggccagaagcggcgatccgcttcggagtaggtattttggatctggcgcacgacgctggcgacgagggcgacgaggcttgcgcagaccagccctatgcccgccaaaacgtgtcctgccacaacgttcggcgtttcgtcggatctgacgatatcgattccccagacgatgccgatcagagcgcagatgatggggatggcgaacaaaagggcgaccatgccgccgctgaacgcttgatcggggtggtgtccgggcccggccttggagttgctcgggatgagaatgaacttggtggaggataaggctacggtggacacgcagcatgtgatcagcccaaggccgaagacgacatgcccggcgacgaaatgttcggcccctgtgccggaacggacgaagatcaagcctccgatgatgccgatggccgcggccacatacccgataaggggcagggcgaccttgaaggccgcgctgtaggtatggatgagctggcggatgatggtcgctgccgttgtaaacagcgctacgcagatgatgctcaggaagagcacgacatgcccggcgacgtacgtgttggcgtcgctgcccatatcccagatgtaccagccatagccaaggcagatggcgcccatggccagagggatgatcctgaagagaacgctgatccagtaattcatggcttgctcctttgcgggtggaatgtatgaacagagccaagcacacaggatttatgaataccattataaattaaatgggttagatgtattaaaaccggggttccatgcgttggctcccggtgtttccgttcggaatatcagcttttcagtttaagggggctggtcatttcggcgttcccacggtagagctgtgtcccatgatgcgctttatccaaaatcacgtttcgttgtccgtacgggcagggctggcgctcttcggtgccgtgctcctttggagcagttcttttatagcgctcaagatcgcggtatcggcgtttgatccgatggtcatggtctttggccgcatgttgagctccctggtggcgctgatgcttttgcgggtgaccgtctggcggcgtgccgaggcccctatgctgctggacaggcgggtgacgcgccgggagtggaagtacattgtgctgctggcgctgtgcgagccctgcttctatttcgtgtttgaggggtacgccatgatctacacgaccgcgtctcaggccgggatggtcgtcgcggcgttgcctttggcggtcgtggtcgcggcgtggctgctgctcggcgaacgtccgcaccggcgcgtctggatcgggtttgtgctggccgtcgtcggggtcgtctggctgagcgctggatccgaagccacggaaagcgcgccgaacccgattttcggcaactttcttgaagtattggccatgctgtgcggcgctctttatgtagtgtgcgccaagcagctttcttcccggtgttcgccggtcttgatcacgaccatgcagtcgctgatcggccttctttttttcctgtgcctg

SEQ ID NO: 7568 - DNA, 80667 bp, Unknown
  gut microbiota DNA sequence
ggacagtttccccttgttgcccacgttggccatcctctatctgggcgtcggcgtgaccatgctttctttcttgctgtacaatttcgccgtccgttccgtgcccgcctcgcgcaccggggcctttctcaatcttgtgcccgtgttgacgttgttcatggggatggttttcctcgacgagcggttgaccgcagggcaatgggccgcttccgcgctggtgttcgggggcgtgatcctcagccagtggaaaacggcgcagtcggaggaaaaggcagattcgtcggcaacggcttccctttcggaaggtgcggaatgaaagaaagagagcgtttgccggagcttcttgtccccgccggaggccgggagcagttggaatccgccatcctctatggggctgatgccgtatacatgggagggccggaactgagcctgcggaccgcttgcgaaggcttttcgggtgaggagctggggcttgccgtagctgacgcgcataccgccggagtgcgggtgtattattgcctcaacgccatgccgtatgacgcgcaattgcccgccgtggaagccgtgttggagcgtttgcccgggatgggcgtggacggcctcattgccgctgatcccggcgtgatctggctggcgaagaaacattgcccgtcagtgccgctgcatttgtccacacaagcccattccgtaaacggcgccgctgtggcgttctggcgcgaggccggggtggagcggatcaatctggcccgggaactgggtttcaaacagatccgagcactggcggaagcgtttcccggtgtggacttcgaagtattcgtgcacggagccatgtgtttggccctgtccgggcattgcctgctgtcggcgtgggtgaacaaccgccccgccaaccaagggcggtgtacgcagccgtgccgtttcgagtaccgcggcctgtccttgctggtggaggagcaaaagcgctcgggcgaagccctgtgggagatccgcgagggcgaagcgttcagcggtttttgggccccgcaggacttgtgcctgttgcggtacgtgggatgcctggctgacttgggggtacgggcgctgaaactggaaggtcgcactaaaagcggcgggtacgtcgcgcagattgcggacgtataccgtacggcgctggatcggcacgcgcgccgcgaagcgggaggtcccgactgcggaaaggtggagatttccacggcggcgttgctcgaagaattgtttcatacggcgtcacgccctctgtccacgggctttttccttccccgcagaagggtggaggctcccccggccggtttgctcccccggcccgtggtggcgcggcttgcggaaccggagggcgacggctggagggtgcaggtgcgttccccgtggtcatcggatcgtgaagcgtccgttctcgtgccggggatgcggcgtccggcacttctccccggcgcgtatcagcttgaaaaccacaggggagagcgcgtggatctcctgcaccccggcatggagggcgtgctgcattgcgaaatcgacggcctcggaaaggggctgtacgtgagggcgtaggcgagtatttccactctgaaaggtggattcttcccaaggcaatctgtgccggaaagggctgtagagcgagattgggtaagcccaaaagtccttggaaagggagagatgggctccgcgctcgtagatttggggaaggggagcgcgtttctccagagttccccttccaacgtttctaggctgtttcagagcccatccattctactgttccagtttcgcccacgtgagttcgtgcttgttgcaggacaggtgcataagcctcgagccagggatggccgcgaatttcgctgcggtggcgtggtccgtctcggcctggaatttgagggtgcacacgaagttgcggcagctccccagctcgatccagcggcagatgacctcatacagcttgtcagggtagcagatcatgtccgagaacagccagtccacggctccggcatggcggggatcaagggcgaaaccgctgccgatgcagtggctcacgccgggcatgtgatccacctgcggggcgagtggggctttgtcgatgctgaaaacctgcgcgccgaggctggcgagcacccatgtccagccgccgggggccgaacccagatcaaggcacagatcgccggggccggggcgtttgggcagcagggtgaaggattcccagagtttgaggtaggcccggcttggcggatcgatcttgttttcatggaactgcaccacgccgtcggggaacggcgacgagcaccgggccgaagcgaggatgaggttgggctcccacagtgtccatgagccgagcggggccgtgggcgcggcttcgccgaaatgacgcggcttttcggagacgtgggggagtttctcctggatgagggaggcccggcgatggttttcctcggaatgcagatgccagttccgctggatggcggtgagcttgcgtgcgccgtctccgatggattcgatgggcaggaaaacgggcgtttcccatgtgttttgagcccaggcggcggggcggggcgcgcccttggcgagcacgagcctcccccgggcttcaatgacctcgtctccgagttcggcaagaagatcttcgagaaaacccttcgcggcaagatatgcggtaaagggaaccgtaatgggggatgcgtttccagaaatggaggcgtcggcggatatttttttcataaagagaagaaatgacctctgagggacaaaatcggctggaatgtttatgccttgcaaaggcggtgccgagtctctatactccacctttgttttatccacaatccgcgaatggggatttcccgccagacataaggaaactcacatgcctcataaaggcccgcacatttccattgctcctgattttgtcgtcaaccgcattctccgcatcaatctcgaagactttgccgactggccggaatccgtgcggcatctggctaccgaaatcgcggaagagttgttccttgttgcatacaaccccttcgtggattcagccacggtcaaggcgagtgtgaaggaacgcttcgatcgggaagtgtttgccctggcgcaccattatgcgaacaccataggcgaaggcatcaccctgttctggagcgggcatgaggcggaagtcgccttccgcaaggaactggtcgagcgcctgggcgccttcctgccgcccgacgctatcgtcacccgtccgagcgcgctggtggcctgcgccacggacgccaccgacttgcgcatggaacttccgctcatggtcgtggagcccgccaacgcggaacaggtgagcgaactggtcaagctggccaatgaattgaagttcgcgctgatcccgcgcggcggagcgtccggactgaccggcggttcggtgcccatgcggcggcgttccgtcatcgtccgcacgacccggttcacaaagatgtcgccggtggatcatgaaaacatgagcgtaacgctggatgccggggtgatcacgcaggcggccatcgacgccgtggcgaaggaagggttcctctttaccgtcgatccggcttcaaagaccgcttcgaccatcggcgggaacgttgcggaaaactccggcggcccgttcgccttcgaatacgggacgacgctggacaacctgctttcgtggcgcatggtgacgccgaccggcgagatcatcagcattgagcgcaaaaaccatccccgccacaagattctgcctgacgaagtggccgtgtttgaggtcaaggacatcagcggcggcgtgcggagcgtcgtggagctgcacggttccgaaatccgtctgccgggcctcggcaaggacgtcaccaacaaggcgctcggcggccttccgggtatgcagaaggaaggcgtggacggcatcatcaccgatgcgaccttcatcgtgcacaagaaacccgcgcagtctcgggtcatggtattggaattttacgggcgctccatgcatcaggccgccgtggtcatcggccagatcgtggatctgcgcaaccgcatccgcgaggaaggcgattacgcccgtctgtcggcgctggaagagttcaacgccaagtatgtgcgcgccatcgagtaccagaagaagtcggacaagcacgaagggattcccatttccgtcatcatcattcaggtggacggcgacgagccgtacctgctggagaagtgcgttcaggaaatcgtggatatcgtggccccgcacgacaacgtggcgctcctcgtggcgaaggatgagaaggaagccgaacttttctgggaagatcgccaccgtctttccgccatcgcccgccggacgtccggattcaagatcaacgaggacgtggtcattcccatgcagcgcatcccggatttcgcgctgttcctcgaacagctcaatctggaatgctcggctaccgcataccgtcaggcgttgcaggagctggggcgtctgcccggcatggcgctggaggacaaggatctcaaccgcgaattcgtcaatgtgacccgcgtggcgcagggcggcgtcccttcctccgagctttccgacgaggaaatggaagaacgcgcggtggaattcctccggctcatggccgagcgctatgaccgccttgcccccaagatcaaaaaaatcagcgacaatatgcttgtcggccgcgttgtggtggcgagccacatgcacgcgggcgacgggaactgtcacgtcaatatccccgtcaactccaatgacctgcacatgcttgaaatcgcggaagaagccgccatgcgggtcatggccgaggcgcaggaaatgggcggggccgtttccggagagcacggcatcggcattaccaagatcgccttcctcgggaaggacaagatggacgccatccgggagttcaagaaccgggtggacccgcgcgacgtattcaaccccgccaagctcacgcagcgtgaacttcccgtgcgtccgttcaccttctccttcaaccgcctgatcgaagacatccgtcagagcggcctgccggataaggaccggctcatcagcctgcttgcctccgtgcagatgtgcacccgctgcggcaaatgcaagcaggtgtgcccgatgatgtacccggaatgctcctaccatttccatcctcggaacaagaacatggtgcttggggcgatcatagaagccatctactattcgcagatcaacaaggggcggcccgatccgtccatccttgccgaactgcgggccatgatggagcactgcacgggatgcggccgctgtacgtccgtttgtcccgtgaagatcccctccgccgatgtggcgttgcagctccgcgccttccttgatgaagaaggcgcgggcgggcatccccttaaaagcaaagtactgaattggctggtgcgggatcccgcgcaccgtatccctcaggctgtcaaggcggcggcgctgggccagaggatgcagaacaggattatcggcgttgtgccgcaggccatcaagaagcgtttgtataacccgctgttttcaggtaaaggtccggagccggggtataggaacctgtatgaggcgctgcatctggaacgcgggaacatctttgttccccgctccggggacggtgccccggtgcaggagaatacggcgcttaaagaagcggtgttgtattttcccggttgcgggggaagcctgctttcccgcactatcggcttgtcagccttggggctgttgctgcggacgggcgtcgctgttatcctgcccgaagcgcatttgtgctgcggctacccgttgctgtcttcgggggccgacgcacagttcgcctccaacatggcgcggaacaaaaaggctttgcaggcgaccatcgcttgcgcgaccaagcgcggcttccgggtgacgcacattgtcacggcatgtggttcgtgccgtgaaggtatcgaacgccttgagccgtcgacgttgcttggtgaagggggcggggaactcgtgcatctcgacgtgatgcagttcgtgcagggccggatggacgccaaccccgatctgttcaaaggtaacgttctgtatcatgcctcctgccatcccgaatgggtcggcgtccacaaggtaaagggcgtgcagaagcaggctggcgccattgcccggctgaccggcgcggcgattgaagtctcgccggggtgctgcggcgaatcgggtatgggggccatagcgtctccgctggtgtacaatacgctgcgcaagcggaagatggacgttctggaagcggctttggccgactatccggcgcagagccccattctcgtgggatgcccttcctgcaaggtgggcattacgcggagcctgatggccatgcatgagcgcaggcccgtgctgcatacggtggaatggctggcgacgctgttgttccgcgagcggtggggcgaaaaatggattcgggtttttcggcgccggattgcgcccagtgcggatgcgcagggcgtgcggattgtcgaattggatggatgacctcccttcggaggttccggacgcggcaggacaagggggctcgttcgggacaggtgcgacggggtagctcggatttggtgatttgaaacaaggagtgccttacacatgccaaccacgatcctgcataaggaatcgttgattcctggtcgaacgagtaaactggtgctggatgcgccgcagattgccgccacggcgaaaccggggcactttgtcatgctgcgcgtcaacgagcagggggagcgtttccctctgaccatcgctgatacggatccggaaaagggaacgatcaccatcgtttatctggtgatgggcaaatcgacgatgatgctggaagcgctttccgaaggcgacagtattcttgacgtcgccggcccgctcgggaaagccacgcatatcgtcaagggcgacagcgtgatctgtgtcggtggcggcacgggcatcgccgcgatgcaccatatcgccaagggccaccacaaggccggcaactacgtgatcgccatcatcggcgcgcgcagcaaggatttgctcctgtttgagaacgaactgaaatccttctgtgacgaagtgctcatttcgacggatgacggaagctatgggcacaaggggtttgtgaccgatctgttgaaggaccgccttgaaaaagacaagaaggttcaggaagtcgttgccgtgggtccggtgcctatgatgcaagccgtagcgggcacgacgctgcccttcggcgtggccacgaccgtcagcttgaactcgcttatggtggacggcatcgggatgtgcggcgcgtgccgcgtgacagttgacggggaaaccaagtttacctgtgtcgacggcccggaatttgatgggcacaaagtggacttcgccgaactgcgtcagcgtttgtccgccttccggtctcaggaaaagcaatccatcgaacatcacgagcacaggtgcagctgccatgacaaacactgagaatgtgaagaaacccgccaagacgccccgcgtcgacatgccctgccagcccgctgctgtgcgggcgcacaacttcaaggaagttgcactcggctactcgttggaacaggcgcagcttgaagccagccgttgcctccagtgcaaaaatccgcgctgccgtcaggggtgtccggttgaagtccgtattcccgaattcatcgctcaggtcgtcaagggtgacatagcggaagcctaccgtatcctgaagagcaccaacagccttcccgccgtgtgcggccgtgtgtgcccgcaggaaaaccagtgtgaaggcaagtgcatcctgggcgtcaagggcgagccggtggctattggccgtctggaacgctttgtcgccgacaatgccatgcatgatccctgcgtgggcgtgtccgataacgacgcttgcgccgtcaccaatccggatttgaaggttgcctgtatcggctccggcccgtcttccatcactgtcgcgggatacctcgccgcgcgcgggatcaaggtaacggtgtttgaagcgctccatgaagcgggcggggtgctcatctacggcatcccggccttccgtctgcccaaggatgtcgtggctgcggaacttgatggcctgcgccagaacaacgtggagttccgtaccaactgggtcggcggccggacggtttccgttcagcagttgttcgatgagggctacaaggccgtgttcatcggcgtgggggcgggtctgcctcaattcctcggtattcccggagaaaacctcatcggcgtgttttccgccaatgagtacctgacccgcgtgaacctcgggcgcgcctatgatttccccaatttcgacacgccgacctatcccggcaagcatgtgacggtatttggcgccgggaacgtggcgatggacgccgcgcgtacggctctgcgccttggggcggaaagctccacaatcatttatcgccgctcgcgcgctgaaatgcccgcgcgtcatgaagagatcgaacacgcggaagaggaaggcgtgaagcttttcgagctggtggggcctttgcacttcaacgccagcgagagcggtgttctgaagtccgtgaccttgcagcgtatggcgcttggtgagcccgatgcctccggacgtcgccgtcctatgccgattgaaggggaggtttttgagcacgagacggatctcgcggttgtagccgtggggacgcgctccaacccgatcctgcttgaagcgacgcctggactcgaactcaacaagcgcggctacatcgtcgtcaatgaagagacgggcgaaacgtccattccgaacgtcttcgctggcggcgatattgtgactggtgcggccacggttattttggccatgggagccgggcgcaaggccgctcaggagatcgccaagcgtctgctcggctgatgtcttttcacgagccgtattgtgaaagggaaggtttcggccttccctttttctgtttattctgtcaatcggttcagaaaacaggagaaatcggagtgtattcctgaaaagcggagaagcgatattgctctatacttgacaaagaatttcaatatcattatttcttttactaacgaatgtgcagctgcacatctccttgagaagaattggaggcaactcgatggatatacagcttgttattgtgagccttattgttttggttgcagtggggtatatggtctggcgcgcaaagaaagctcgaaagggtcagtgctcttgcggatgtggcggttgcggaaagagctgcaagccgaagacgctttaagccgtccaaaggaatatattatttggagggatacgctctgataaaaatgtaatgaacgcttatcgcttcgtatagggctatcctatttcccagtgtgtggagctgtgcagaagagattttggcgaaaatgcaaacgccctgcaacaacgatctgttgcagggcgtttttgctgtgtaaggcgacgtctcctccgtccgttcttatgatttcctctttggaatcgcgtcaccgcaagggcaatccgtgccagaaaaaactgtgaacagacttcggtaagcacacatttggggaaagggaggattggggcgcataaacaggtttggggaaggagaacttttctccagaaaaattctccttccccatcccatgctttcaaagctagtccgctttaacgttcggccccggcggcatcaagccgatcggtaatggtgtttttgatccacttgggatccagccagtcaagcggctgcacctggatgccgtgcatgaggatgccgaagtgcagatgatcgccgcccgcaaggccggttgtaccggtaagtccgatgatgtctcccttttttaccgtagcgccgacgttcgtctggatttcactcatatgggagtagagggactgcaagccaagcccgtggtcgatgacgacgaggttgccgaaaataccgaggggctccgcaaaaacgaccttgccgtcattcgctgcgggaatcggcgcgtgggccacggaagcgagatcctgtcccatatgcgtctgctcgtcgattttcgtcccattgtgcatatacgtacgctgatcgccaaaagacgctttggaggccgaccccggcaggcgcttgaaagcgccgctccacaacatggtgggcgaggtatttttaccgatttccaacaaggttttctcattggaaatgcgcacttcgttgttgatcctcacataccgttcaaggtttgagatgtcatcaggaaccagttccttaaaaacatcctctttgctgttcaggaaattgtcgctgatattgagggtatccttgcggaaatttcgttccccggcgttgacgaggaccctgttccgggattcgttcccggcaagatcccgggtgagcagttccggcgtaaatttcccctttggggtgtccagcgggaaggggaagaagcagtagtacaggccgttcggctgaaggaaggccgggaagaactgctcgccaagctggacgccggtcatgctggcgtcttccgaaacgctgtaggctatggctgtcacgctgccgcggcgcagggcggggaccgtcgttttaatgcggaccttgggcggctgcgtgtccaattgcatattccacttgcgcgtggtcccgttccccttgccgaagctcatgagggaattgtcccgcgccgtgatttccagttcaaaggcaccgtcccgcaggcccgcgttcttgaggttgaacgaagtcgtttgaacgggggccggctcgctgaatactttatcgagaataaccagagactgattattgcggtggatggtgacgacaacggagcggaccccggatttggcgtccgcaagtttgagagtgatctcctgcgtcggcgagatccgcccggtatcgggcgtcatggtgacttcaggcccgtcaaggtcgtccagaaagagataaatgcaaaaacctaaggcagctagaatgagcgttacaaagccatagctgatggtattacgaatgatgcgacccattttttttccttaaagcgcgctcggtgatgaagggggctccagcggtttgatgtaatggaagatcaggcgtcgtgcagcagcgcgatggccagacgcaggaaatctgcttcggtaatgatgccaacgagtttgttgtccccatcgaggacgggcagacagccgtacttgttccggtagaggatctccgccgcttcccggagaagggtatcgggcgcaacggtcctgacgtcggtttgcatgatgtcgccgaccaaaatagaggattcgatttcttcttgctcttcccggttgatttccgcaagatgtgataccgcatagccgaggagatcccggtgcgtgagcaggccgacgaaacggtctccatcttcagtcacgggaatgtggcggatcttggcaagctgcataagggaacgcacgtcttgaagggtgtccgtacgtcgaagcgtaaacactctgctcgtcatcaggtcactgacataaatcatatttgttctccataaaaaggtgcagcatggtccggcagaatggtgaggattcgtcgaagcgcgaatcaagaggccgtgcaaaatacctgtttgaggcgatggcgggagcttgcattcttacgcaagacggtcatactgtaagaaagcattttcgcacagggaaagcgtctaggcaagtgtcggccaacgccttccggtatgcttttggaagccgttcggcggatactcgcagtattttttactggaacattcatgacagaacttggacagcacaggatttttcccgacttcaaacgccagcgcgcacggatggtcaaactgcttgaagagcagggcatcacggatgaggctgttcttgcagctatgcggacggtccggcgtcatctttttgtccccgaagccctgcaggggagggcttatgaggatcacgccctgcctatcgggtttgggcagacaatttcacagccatacatcgtcgcgttcatgtcacagctgcttgaagcgaaaccggggatgaaagtgcttgaaatcggtacgggatccggatatcaggcggcggtgttgcgtgaaatggggcttgaagtgtttacgatagagcgtgtgcgggaattgtacgaggccgcacgggagcttttcccggaaggaagcccggggatccgcatgaagctcagcgatgggaccttgggctggcgtgtccaggccccttttgatcgcatcatcgtgacggcgggcgggccgaatttaccgctgccgcttcttgagcagttggccgatcccgggatcatggctatcccggtggggcgggcgcgcagggagcagaagctgctccgcgtatccaagcgtgagggcagggtaacggcaagggctttcggcaatgtcgcctttgttgatcttgttggggatcatggctggtaaggtttcttttccctgctttttgtggcaaaccgggaaggtccttttaggggactaacgcttttcaggagtcttttcatgtcgtcatgttccaatcaggccccgcaggggcaggctacgatccccatgaccgcggccatgcagaacaaagtactcacgcaaaatctgaaggatgtgcgccacaagctgttcgtcatgagcggcaaggggggcgtgggcaagagctccgtaacggtcaatcttgccactgctctggcttcgcgcggctttacggtcggcatccttgatgtggatattcatgggccgagcgtgccccgcctgctgggtgcttccgcgtccgtcatggctgacgaaaacggcaaaatgctgcccgttccctgcggtgagcgcatgtcgcttatttccatggattctttcctgaaggataaggacacggcgatcctctggcgcggccccaagaaaacgggggccatcagacagtttttgaccgacgtacagtggggggctttggactatctggtcatcgattcccctcccggtacgggtgatgaacatctgaccgtgctggatgccatccccgacgctggatgtatcgtcgtgaccacgccgcaggagatttcccttgccgacgtccgcaaagcgctcgatttcctcaagcaagtacaggcccctgtcctcggcatcgtcgagaacatgagcgggttgagctgtccgcactgcgggaaggaaatcgatctgttcaagaagggcggtggggagcagcttgcgaagcaatatgagcttccgttccttggcgccattccgttggatcccgctacggtcatcgctgcggatcggggcgtgccggttgtctccctgacggaaaactccccggcgcgccaggggttcatggctcttgcggacgccgttatcgccgcgaccgaggccgaatagggactttccgcacccgatatgttgcaaggcggatcaggccgctctgtcagcctgatccgcctgtttttatattgccttgaacatgggatagttatccgaagcaaaaccgctgtggcggagaattctgctctttgcctttcacaatggttgtgctatagaaacccaacaactgtcgccaaaagcgggtaatactatgttcaatttggcaaatcagcttacactggcccggatttttttcgtcgttcctatcattctcctgttgtattttccggggaagatcacgtgctttcttgcagcggtgcttttcggcatcgcctcgctcaccgattttcttgatgggcatattgcccgtaaggggaatatggttacgagcttcggaaagtttctggatccccttgccgacaagttgcttatctgctccatcctgatcatgttcgttgagctggggtgggttccggcgtgggtgactgtcgtcatcattggccgggaacttgccgtgaccggtttgcgagcaatggccattgatgaaggcgtcgtcattgcagcggacaaatacggcaaagtcaaaaccgtcatgcagatcatcgccatcattcctctcttgctccattatcctcttttgggcgtaaacgtgcatctgattggaaattttctgctttacatcgcccttgtgctcacgatattttccggcctgaattacttctataagttttacggcatctggcgggaaaacgatcgggctgcatgatgaacgtacgaagcaccgcaaatacatcttccaaggccacgctttggaaagtttttattctcattctggccattatcgtcaacgtggttcttgcctctcgtctgttgtgggggccgcagagtctcgtttcgtatagggaactggcttcacaatacgcggaactgctcaaggaacgcgacggctttgatgtcgttaatgccgggttgagcagagaaatccgcctcttgcagtctgacgagaaatatgtggaaaagatgatccggcagcggctgaatttcgtccggagtaacgaaattctttatctttttacggaagatgcgaatgtgcgtggagccctgcctcatgatggaaaaaattgagtggtatcaggaagtcctcaagctggaccctgattccaaggtttttttcccgctggcgaaactcctgagggactcgcagcagccggacaaggccatagaggttttgcgggcggggctacagcattcgtctgtttttcttgaagcgcgtctcctgctgatccaaattcttttcgaacagtcgcgtgccggtgagtgttctgaagaactttccactgtaacgggattgctggagcgctaccctgccctctgggaagtgtgggctgagtccgtttcggagaaaaacagggatctggcattggccatccggctgatggcctcgactatacgccacccggaacattctctgagtctgattttagagagtggtttgggtatattgcaggacgtacgtcgcagtttttcctcttcccaatctatcgaggcttcggattccgagcccccatgcggcgtttcccacgaagaaacgctttgcacggctacgccctccgcgcaggaactatcttcttgtacggtacccgttgaggaatcttccattgctgatgcggaactccttgagagtatgcttgaggaaagcgctcctgtccaagagcacccttcatgcgtgacgccttttttaccaaacaaagcaaaatcagtgcattgggttgatcctgatgaggattcagaccttatggctgatgaaaaccctgaagagccgacgctgcggacccgttctatggctgacgtgctcgcggagcagggggacattgtcggtgctcttgaaatctatcaggagcttgaggccgctgcgcctacgccggaagaagccagagagttgcacgatagtgtcgccgcattggtttcccggatggccggaaacagtacggaacccggagagcagacggaaatcggagaaccttcgtatggcgacgtgggagggcagaatcagttgatgtcccttctggagtcgttagcggatcgcctcgaagcacgggcgcgcgtatagcacgcccgtttacattggagagttgtgtgtccttgcagagttcctttattacgacggccctgattggctctttggtgttcatcggaggctgttccacgttcgacagcacatggaaaagcaccaaagctttttacggtgagtatatcaatccccccgcccagattgattatgatgacaaaggggtattgaatgacgccgaaacgatgctcgcctcgcgcatggtgggcatagacatccagcttgaacagctcgagcggtatcttcagaactcggacaagccgccgacgggtgaatccgtggcggtccttttccatcgtttcccgtggctttccggcctcgcggcggtggacgccaatggcatggtcctcgcgcaggagcccccggcggccatgaaagagcttgattttgcgaagatgctggagcagaaagccagaggcaacgagttgcggggcctgcgtggtctggttgaggatacgccgcttgggcccgaagtgctgaccggcattcccatctattccggttcggaaatgttgggattgcttgtggctcattttgacatgcggtcgctgctcacttataccagcggcgctgaggatcttgttgtgttggcgccacagggggttttgtggccgggtcgtttcgaggttgacgccacgccgctgacggggcaggactggagcgaactcacaaaagattccacacatggcacggtttccaacaagaccggatcgttcatctggatggtacgtttcctcgggacgcagccgattgtgtttgcgacgccttcggaagggcatttccccgaacagcccgggcagttggatgcgttatcccacccggcggccttcagttctcagggcatgatggctccggtcacggaatcccatgtcatcgaaggcggagacagcagcattctgacagcgccgcttccccccattaagggtttgggaatggaggagtcagccatttcggattgatcgaggcgcgtacatgcccgcttttgatggttattcaaaggcgatttcttgattcactttcagatcgttcacaggacccataaggagggctcatgtcttctgaaatcaccgtcaccgaacatttgcttctgcagcagcagagggctccgcaggcgacgggccactttactgcgttgtttcatgatcttgttctttcggccaaaatcatagcccgcagcgtaaataaggctggtctgcttgatgttcttggcggcaccggggatatcaacgttcagggtgagaatgtccagaagcttgacgattttgccaacagggttcttttgtaccggatggagcgttccggtgtgttgtgcgccatagcttccgaagagaatgcggaactggtgcgcgtttcggcggcattcccccgcggggactacatgctggtctttgacccgctggatggctcctccaacatcgatgtgaacatcaacgtcgggaccattttctccatcttgcgccgtaagcccggccgtaccggtgaagtgcagctcgatgaaatcctccagcccggttccgaacaggtcgccgccggctatttcctgtacggcacttcgaccatgctggtttacacgaccggtcagggcgtgcatgggttcacacttgatccgagcgtgggagaattcctgctgtcccatcccgatatccgtatccccgagactggaagcatctattcggtcaatgagggcaactggaatcactgggacgacaaggcccgagccgcgatcgactacttcaagcatcctgacgatccgaatgcgactccctgttccgcgcggtacgtcggctcactggttgccgacttccaccgtacgctcctgtacggcggcgtgtacatgtatccgccggacagccgcaagggaaagagccgtgggaagctgcggtacctgtgcgaagcctctccgctggcttttgtggcggaaaacgctggtggcgccgcgaccgacggccacaaccgtatcctggacatcacgccgaccacgctgcatgaacgggtacctctgtttatcgggtcccgcaaggatgttgaagcgatcaacgctatttacaagaagtaaatccgcgcatggccggatgcggtccggcggcgtgatagacggacgatcgacctcagggcgtgttcacatgccgagagcgggtcgatcgttcgtttatcagggatatcgttttttatattgaacacgatgggttgtcatgctttgtcttggtatcgaaacatcttgtgatgaaacggcgctggcgctggtcagagacgggaagtgtgtggaatccgtgctcgccacgcagatggatgtgcacgccctgttcgggggggtcgtcccggagatcgcgtctcgtgagcactaccgttttttgggcgcactgtatgacgagttgatgcgccgcacgggattgactctcgcggacgtggacgtcgtagcggtgacccgcggtcccggtctccttggggccttgcttgtcggcgtggcctttgcaaaagggctttctctggcgggcaacaaaccgcttattgccgtcaaccatctccatgcgcatttgttggccgtcggccttgagcatgagttgctgtatccgctgctcggactgcttgtttccggcgggcatacccatatttacaggatagacgctccggagtctctggaactgctcgggcatacgcttgatgacgcagccggggaagcctgcgacaagtttgcgaagatgctggggctgccatatcccggcggggtgttgctggatcgtctcgcccagagggggactgccgatgcccatctgttcccgcgtccgtacacccatgtggataatctggatttcagcttcagcggattgaagacggccgcgctgacgtatctcaacgaacatcccgtgctcgtggaggagggcaggcgtgtccgcgaagccggtaccgactcggcctctcccgcactgtgtgatgtctgcgcatcctatatgctggctgtggctgagacgctgagcctcaagatggagaaggcgtttcaccgcgagcggcaaaaagggatcaccgggatcgtcgtcgctggcggcgtggccgccaatacgcaggttcgagccgcgatgcatgtccttgccgagaaagtgggcaagccgcttttgctgccatcgagatttctgtgcactgacaacgccgtcatgatcgcgcatgcgggcgaattgctggcctgtaagggatacggacaggggctggcgttcccagccattcctcgcgggcaaaaactccctgatgatcttggggagttgcgtgcaccgctgcactctctataagcagcttgagccgtttttctcatatagtgaatcttttccgcagcatcttgacaccctgggatctcgcacctacaattgctacgttggaggcactgccttttcgcgtaaaaaagtgcaccagtttgtttcttaacaagcaactttcgtaaggagtcggtaatggctacccaagtgaatgattccaactttgatgccgttgtgttgcagtcccagcttcccgttctggttgacttctgggccccttggtgcggtccttgccgtgccatcggccctatcatcgatgaactcgccaatgaatacgaaggcaagttgtccgtggtcaaactgaatgtggatgaaagcccctcgacccccggcaagtatgggattcgcgccattcctacccttattctttttaagaacggtgaagttgttgagcaggttacaggtgctgtatccaagtccagcatcgcgaccatgatcgaacaaaaggctttggcatgaagcattacgacgccattgtcgtaggcggcggccccgcagggatcactgccgccctttatctctgccgttccgggatttccgtggcccagatcgaaatgcttgctccggggggacagatcctcaagacggaaagcatcgagaactacccgggattcccaaaagggatcaagggatgggagatggctgatgcgttcgctgcgcatctggatgactacgaattggaccggtataatgatgccgccctcaagatggagcaggttcccggcggctggtcattcagcgtagggaaagagaccatcgtagggaaagctgtcgttgtttgctctggtgccaatccccgtcctctgggggtaccgcgcgaaacgcagcttacgggacggggcgtttcttattgtgccttgtgcgacggcaacttcttccgcgatcaggttgtcgccgtggttggcggaggaaactccgcgctggaagaagcgctgtatctatccaggatcgccagcaagctgtatctgatccaccggcgggaaggcttccgcgccgccaaggtctatcaggataagatccgcgccgcttcggacaagattgaacttgtgttggatactgtggtaaccggtttgatgggagaagactcgttgcaggggctttatctgaaaaatgtcaaatccggtgaagaaacacagcttcctgtggatggaatgttcgtctttgtgggctatgagccccaaaacagtttcctgcctgctggtctcgaattggacccgcaggggttcattatcactgattgcgagatgcggacgaatctgccgggactctttgcggcgggggatatccgttccaagatgtgccgccaggtgacgaccgctgtcggcgatggggctacagccgctacggctgcctttacgtatcttgaacaactggacgcctaagcatgtattttcgtcatctagtgctggccgcatgtctcttgcttctttctggatgtggcatcattgactatttctttctgcctccgccagaagatacggctcaggagctttacgaaggcgccaatgacgccatgcaagagaagaattactcgcaggccgcccagtactatacaaagctcaaggataacttcccgttcagcccttatacggttgaagcggaattgtcgcttggtgacgctttcttccttgacggaaaataccctgaggcagccgaagcctataaagaatttgaatctcttcatcctcgccatgaggctatcccctacgtcttgtaccaggtggggatgtccaacctgaagagcttcatttccgtggacaggcctacgacgtcgacacaggaggctttggaattcttcggacgattgagggagacctacccgaacagcgagtatgcccagaaatctgtcgaggaaatgaaaaattgccgtcggctccttgccgaacatgagctctatttgggggatgtgttctggaacatgaacaactatggcccggcttggcggcgctatacatacatcgtggataatttccccgatgtgccggaagtcagtgctcatgcaaaggaaaaagctctgtccgcatactatagatatcgtgagcagcagtcccagaaggcccgtgagcagatccaaggatcttggaagcgctggtttgattggctctagccgctctttacgctgaaagaaaaacgccgccgggaaattatttctggcggcgtttttttatgtgcgggaaagcgataaaacttgttccgccgacaaaaggccgagcttctccaattgattgttttaagcataaaaaagtccccacttggatgtggggacttttcaaggcactcttcttcactaaccgttgatgcggtcagcggggataatcggaatgttcttggctttcagcacttcgatggcctgatcgatacgatcgaagcggaaaatcatggtggcgctgccgccgccttcctgtacgaacgcgtacatgtattccacattgacgttttggccggacaaggcttcaaggatgttgttcagtccaccgggcttatcgtccacttccacggcgacaacagcggttcgcccaacggtgaatcccgcttctttcatgatgttgatggctttttccgtatcgttcacgatgagacggagaatgccgaaatcggacgtatcggccagagagagggctcggatattgattcccgcttccgccagcgttttggttacctgagccaaccgaccggctttgttctcaagaaaaatggaaagttgttcgactttcatggtggccttccttatatgccttgcgttgctgccagcctccatcggaggagtggaattattctgacagatcttgccgaaaaacgccagcaaggactgagcctgaactgaaatcggagcgggctatgcggaatgggttgtgtcgtcttttttcttttcgtctttgggagtgatgtctatttcgtcgggctccgagctggcccgcttgaaattgcggatggccttgccaagcccgccgccgatttcggggagtttcttggaaccgaaaataagcactactataacgagaattaagagcaattcttgcatgccgataccgtacataaaggcctccgtttttataggacagagatataccgatggatcccgggcaggtcaagcaaagggcgttgcatccttctgtccatcagggtacacaacaaaatgccgtggcgggatggaggccttgacgaggccggaagggccgaaatccgcacaagtgcggatcactggaatcaatggtaagcacagtacgcctgtgaggtttagaggtcaagattgcaaggcggctgcaagagaattgttataaaggatgtatcatgcaaaaagaatcggatgattctattgtatatgttccgacgatgcaccgggaattcttccctgaggggttttcgggatgcgttaagcctctctggccggggctctcgagccgctattggggacaacgaaatcctgatgcatggcacaaaatttctttgccctatacccctacggaggcagcggcttgtcttgcggagctgacgcagcttgatgaggcgggcattgcggccctttcggatacggtggcgtcttcccggtccacggctcagaaagtttcacaggaacgggatgatttgaagtgcttcgccaaaacgggagaatgccgagaggccggaaaagatacggtttcaacagaagatatgcggcgctgggcgcagcgttttcttttgctgggctggcttcaggaagaacgggttttggagatggagcagctctcggcgcgttatcgcgcgggggcggagaaactggcggcccacctgggcacgcgggataccgagagggaacctgccgatgaagatgcggagatgctttccggcttgcttggcatgatgcgggacttggttcctgaggatccggccacgctgttgccatcatggtgctttatcttggatttgttagcagttttattgccggaaggaactattgcctgcacggcggatcagcggatggcaaaagcgtttgcggaagctggcatatgtcaggaatcactgcctccggcgcttctggcacgattgcctgaaggctggcatgtgcctgaaggctatgccgtgacctatggcgaagagccgatgtggaagctgatcgggaaaaaagcgccgcaatcggacaggccatggcttgacagacggcaactcgtgattctttgtacagcagacgatgtgttggagcgggcatgatgcaatcctcggtgacgacattggcttctcttcttgagaggacatttcccgcagggctttccggcctcattttcgactgtgacggggtcatggtcgattcccgggatgtgaatatcggttattataacctgctgctgagggaagtcggcaaacctccgattacgccggaacaggccggatatgtgcagatgtccacggcgaaggaggctcttgagtatattttttcgccggaggagctgaagctgttgccggccattgcggagcgttacccgtatcgggatgtcgcgttgccgcagttggagcttgaaccggggctggcggatatgctgcattggttgcgtgagcggggcgtccggctcgggatccatacgaatcgcggaagcggcatgtgggacttgttggcccgcttcaacctgggcgaaatgtttgatcctgtcatgacagccgagattgttccgtcaaagcccgatcccgccggggttcaccgtattcttgaaacatggaagtttggtcccgagtcggtagggttcatcggcgatagcgctacggatgccgccgcggcacaaggcggcggagttcccttgctggcatacaatagcccggatttgcccgcggctgtgcatgtcgacaattttgcgcatctgcgcagtgcgttggagcggcttccccggttgggccgtacttaagaagaacgccctttacacttattttctaggaggtagcatgtttgtgcttggcaatatcctcttcgccgtagcgcgggttctggatacgctcttaactttgtacttctgggttgttatcatttccgccctgctgacttgggtccggcctgatccgtataatccagtggtccgcacgttgaatgccttaaccgagcccgtcctgtacaggatccgcaaatggcttcccttcacctatatcagtgggttggacttgtcccccatcgtggtgctcgtcgccatccaactggtgcagtccatcgtggtccgttccctgttccagtatgcggccatgttgtagtaaaccgtgaaaaacggaaagaggggatggccgtcaggaaaggaagaaagcgcctttccgggagtcagccaggaattgccattccctttccttgttttttgggctatgcacttaaggaacggtaacgcacagcgtcgcgttccagtgtcgttttcaaacctctatgtattggagaaagtcttatggaacagcgtgagctccttcttctggaaaagtacgccgccgtcaatcctgaactgaaagaactctgggaagaccatattctttatgaaaagcaggtagaaaagctcgaagccaaggcctatcgcactcctacggaagaacagacgttaaaacagctgaagaaacagaagcttgaagggaagacgcgtctgcacgccatcctcgacggctataacgaacaggaaggcaactaatgttgtgcaccggggccaggatccttttggaaagtctgaagcgtgaaggcgttgaccttttcttcggctatcccggcggggctgtcattgatatctatgatgagctgtccaaccatccggatctacgccatattctcgtgcggcatgagcagggtgctgtccatgccgccgacggctatgcgcgggcttgcggaaaggttggggtttgtctcgctacgtccggccccggtgcgaccaatactgtgacggggattgctacggcctacagcgattccatccccatggttatttttacggggcaggtgtccacgccgctcatcgggaatgatgcgtttcaggaagtggatatcatagggatcacccgcccctgtacaaaacacaactttttggtcaaagacgtcaaagatttggccgagacggtcaggaaggccttctatctggcgcgttctggacgccccgggcctgtgcttgtcgacattcctaagaacattcagcaggcaagctgcgaattcgtttggccggaagatgtggtgatgcggtcatactgccccacgttccgggccaatctgaaccagcttcggcgggcgatggacgtcctcgttacctccagaaaaccgcttatcgtggctggtggtggcgtgatcatggccaatgccgcagaggaactctgcacactggcccacctcatgcacgctccggtctgttccacactgatggggctgggggctttccccggtgatgatccgttgtggataggtatgctcggtatgcatgggaccttcgcggcaaaccgcgccgtgactcaggctgacgtcattctggctgttggagcccgttttgatgaccgcgtcacgggaaaattgtcccagttcgctcccaacgcgcgaatcgtgcacattgatatcgacccgacgactttgagaaagaatgtccgggtggaagtgccggttgtgagcgatgcactcagtgccttgcaggggttgcgttccattttggagtccggtcatgcccagaaggactgggcgggcgatcatgcggactggatggggcaggtgctggaatggcagaaggagcatccgctttcctgggccaagggcgatgtgctgaagccgcagcaggtcgtcgagcgcatgtatgaaatcacgaagggcgaagccatcattaccacggaagtggggcagaaccagatgtgggcggcccagttctataaatatcataagccgcggacgtacttgacttcaggtggcctcggcacgatgggatacgggcttcccgccgcaatcggagcccagatggctttcccggatcgccttgtggtcgatgtcgcgggtgacggttccatccagatgaacatccaggagctgatgacggctgtcgaaaatgggcttcccgtcaagatcctcattctgaacaaccgccatctcggcatggttcgccagtggcaggaacttttttatgatgccaactacgtcgccacggacatgaaggggcagcccgatttcgtgaagctggcggacgcgtatggcgcggaaggctatcgcattacgacggaagaagagcttgaggagctgttgcccaaggctctggcttcaccgaggaccgctgttattgacgtgctggtggacagggaagagaatgtttctcccattgtgccggccggggcctcgctggacgagatgttgatcgtataggtgttgccctcttgggtgaactttaacagctcttggaggaagaatgcggcgcgttttgtctgtacttgttgagaatgaaccgggtgtcctctctcgtgtggcgggattgttcagcggtcgcggtttcaacatcgagtcgctcaatgtggcccccacccttgaggatggggtttctctcatgaccatcaccaccagcggcgacgaacagatcatcgaacagatcgtcaagcagttgcgcaagctggtgacggtcgtcaaggtcgtcgacttttacgggatggcctatgttgaaagggaaatgatggtcatcaaggtccacgcggaagaatccaagcgcggcgaagtgctccgcatagcggacattttccgctgcaaggtcgtggacgtgagccttaccgacctgacgttggaagcgacgggcgatcactccaagttgcaggcgattatccagttgctgcagaaattcggcattaaggagcttgctcgcacggggacgctcgctgtccggcgtactatgcagagcgacgacatctaaacgattttgaaagtggcccgcagaaattttcgcgggccgcttcttttttggcgtttatctttcgaaatgttgtttctgggttcgaaaacagccgcagcagactggatttccccctttttccgtatatccgttatgtttttatggagagggggatattgccagtctctgtgctcttgtgtattttgagctttcgagcaatccgcttttaggcgcatgcccgcaggtgattctgggacggtccgcgttgggccgtgttttcggaatgtttggagttaccagttaaggagagaacatgaaagccttctatgaacaggacgcgaacctggattttctcaaaaacaagaccattgccgttatcggttacggcagccagggccatgcgcatgcccagaatctgcgtgattccggcctaaacgtgattgttggtcagcgttccggtggtgccaactacgctcttgccaaggaacacggctttgcccccatgtccgccgcggaagctgccgctgccgccgatgtgatcatgatcctgctgcccgaccagcatcaggcccgcgtgtaccgcgaagccatcgctccgaacctgaagcccggcaagtctctggtgttcgctcacggcttcaacatccatttctgccagatcgaacccccgaaggacgtggatgtgttcatggtggcccccaagggtcccggccatctggttcgccgcaccttcacggaaggcggcggggttccctgcgtgttcgccgtccatcaggacgccaccggcgaagccacccagaaggcgctggcctatgccaagggcatcggcgggacgcgttccggcgtgatcgaaaccaccttcaaggaagaaactgaaaccgacctcttcggcgaacaggccgtcctgtgcggcggcgtgaccgaactgatcaaggccggtttcgaaacgctggtcgctgccggctatcagcccgaaatcgcctattttgaatgctgccacgagatgaagctcatcgttgacctcatctatgaaggcggcttcggcaagatgcgtcattccatcagcgacaccgccgaattcggcgattaccgtaccggccgccgcatcatcaccgacgaaacccgcaaggccatgaagcaggtcctgagcgaaatccaggacggcacgttcgctcgtgacttcatccttgaatgcggctgcggctacccgagctttaaggcgaagcgccgtatcgaaaacgaccaccagatcgaacaggtgggcggcaaactgcgtgcccttatgccttggctgaagaagtaagttctgaagcgactgtttgataaaaaatcccccaaacgtttgtttgggggattttttctattcgacggatcaggactttttggacgcttcgttcttgtgttccgaaaaccatttgcacttatggatgcaccaccacggagtcacgatgaaccggccatcggcctttgttttcctgtctgggtgggcaccactcgttgcacagtccagagagcacaacatcagggcttggcatcgctctccgtgggggcaacggtgtagttcttcctcttcgggcatgggcaagggcatctatctatctcctcgttggcggtatcgaaaggaaagcgggccgataccgtatccaactcaggataccggagagccgggaagagggcaagctcacaggtatgaccgcattttcttcatcgcgtttccagtggctcatcggggaagcaaaaggattcgcctctgagctggagtgactctcggaatcggctcaggggggagtatatgtggaagctggatcttcatggatgaaccggcgcgagtatcaagcaaaacccgctttggcgggtaaaacgaaagggccggaaatgtttccggccctttcggtatggacagtgctatgaagcgcaaaggcgtccgtttttgacaaaggaagagagggaccgttccgagaatatacggtatccctccgcatgatcggcttcaatgcggacgttgccgagctgatccagcatacgcttcctgatgcaaaacgtaaaaccggaaacttccgtggtcacatcgtcgtcttccggttcatccagaatcaattccaatgtcgggctgtggcagcagctacatccgggttcaatgcggaacgtacgttcggtacgtcctcttaggcgcttcaattcgtcaagtaccgcttcggataacgtgatcatattcgcctcattttataatgtaccgttggcgaagaaccacacggcatgtatctcatctttaagagccacattgtccttttctagggcaactgtttggaaacttcatgacggttttccgatagttccgcgtcgtatcggttgcgcctgtttgtagggacaataccgttcagatcaaaggcggtgctttccattcccgcgaagaggccgaggctttgccagacccgacacaggcaggaaagcgcattccatgcaccttgcggagagtcgtcaggtaaaaggctgagtattcatggggtatataggtaaaagtcaataaagagagtggataatgttcatatggcctaggatgtttgcagccgctttgagaataggttctcatgaccttttctcataaagggtacgagacgaaaacaggtgtgtcaataatgcgttgtaagaacgatcagccaaaagcgaaaagaatgaggacggtggaagcctattgtaaagcataaacaaaaatgttgccccggaaatctatccggggcaacacagcaggccgacggcaatggaaaggtgaaccggagaaccaacagagggctccctccatttccgagtgcgctacattaggccgatgccgttccaataggggacggcaaccacaacgacaaagatccctacgatgagcatacggatcgccaaggcggttacgatgtggcggagcaggacccgttcagtgatgaaaatgtagaggaagtaaacggcttcatacgggaagatgtactggtccaggccaaagttgaatgcgtagaacagcgggagcgggtttacgttcatggctgtccccagctctccgaaggcgggcgtaaacgcggccgtcgccgcaagcggggtgagcaggaagttgatgacgaccccggcggcataggcgcatacgacggacatggtttcgccccatccctgaagcagaggcacgatgctcgccacggcccacttgttcgcgccgacgctgccgcccacaaagccgatagccatacagcccgtgatgaacacgaggaatacgatattcaggttgctgaagctttcgcggtcaaggacattgatgccgggcaggtagctcaggagcgccagcacgcaacagacgtatacgggatcgatatgggtcaggggttccagcatgaagccgaggatgatgccgaagacgaggaccagcagcttgatttcacgcggctggatggggcccatttcacggcagctttgctcgatgaacgtggagaagtgcgctccggagacgagcgtttcgcgtccctttacgatatagaccgtcgccatcgacaatgcgtagtatatcaaattgatgaatgttgcctgataggcatagtcccagaagttgacggtcttgtccgtccccttgagcatcatcccgaaagcccagatgaaggattccgaggagtgcaggaacatgaactgcggggccgccgccgcaaagaaagccatcatgacgatggtggacgacatgcgggacttggcgtcgagctggagcgcttggataatgcctacggcgatggcgcagaagatgacgacgcgggcgaggatggaaggaaggatgacgacgagcacaagcccggcgaggaagaatcccgctacaaggccgttgaaggagccgcccgtcagcttgagacatcgcaaggccagccgcttggccagccccgtcttttccatgccttcaccaatgatgaccgcagcgaagctcagccacgggagcacggtggcccacggcccgaatacgacttcggcatccgccacgccgcaaaggatataggcgaacgtgagcatggccgccacgccgatggcggggaatacattgagcgcccatgctatgatggcggcgctggtaagccccatgtacagcgggaaatgcggcgagacgtcttgcggggaaaggaagtagacgccgcaagggataagcagggtcatagtccatttgagagcctgaacgggattcataacgacctctgttggtatgagggaaaaacggcttgaccggacagggaatgtataggcgtttaccggggatatgctttggaatggttggcggaactctggaaaacaattggggggaaagggccgtgtggcgggccggggaggttctctccccggcgtgcagcctatttcaggcggtcgcgccatgccgtgcggggcgtgccgccttcctgccaaacgcgaaggaacttgtcgcggagcaaagggttcgtgaaggtgaagtcggcccgtaaatgacgtccccggctttctttgcgttcgcgtgccgcaatcatgagcgcttcgccgagatcgagcaggttgagcacttccgcagcgcgcatcagttcgtgggcatcggataccgacatttccttattgattttttttcgcaggtcgccgatatatttgatacctgccgtcagcagcgtatcggagcgcaggcggtgcgggccgcagtccgcgtattcggtcatgatctgctggagagcgaagttcgcttcctgccatgacgcgccgccgctgcgttcatacaggctgctgaagaatgccatgcgctcctggcagaaaggcgcaccgtccacatcggcgggctgaccgagcgttttgtagtcccccgcgtgatgccccgcgatccagccgtagaccgccgcagcgccgatgtcgccgctgatgttgcccatcatgtcgcccgccgcgaacaggccgcggatattgctttcgccgttgatgtcgatttcgatgccgttggtacagaggttggcttcgtactgcccgaattccacggcatgtctgccgggatcgatgccttccttgtccatatagtcgagcagcgcggtgagcccttcgcaccgcatggcccagcgcatgtgttcaaggtcttccgggctcgcgccggaacagtccatataggcggggcccgtgccgttgagcttcagatcggtaaaggcggacgcccagatgtcgctggtcatgtcgccggtttccacgttgggcttggtgatgaacgggccgatgggcttgccgttgggataccggtagacgccgatccatgtggccttgccgcagcgggcgaggaaacggggcccggcatggcggtaggtcttttccatattgacgagatgggctcccaagcgccacgcctgtgcgatggagtcaccggttccggaagggcacatgttcgtgttgaacatctggctcggcgtgggatcggtcgtgaacagacggctgacgtatcccgtggcgaccactacggctttggccttcacgatgcgataggccggctcgtcggaggaaatatcgagggccagggcgccggtgatgccgttatcgtcgcggagcagttccagcacgggcgagtggttgacgatacggacgcctcgtttcttggcctgttccgtgagcacctttttttgattgtggccgtcatacttgaggaaaattttcggacgccccggataggcatggccttcgaagtggaagtcccctgtgggcttcatgttgatgccccagtcattccacatgttgacgatcgtggggctggtttccagaaaacgcatgacaagcggcgtgtcgttgctggtggcgttctggctgtccataaattcttcatacaccacattgatggtgccgtgcttctccgggatatagcagagaaaatgatcgttgcccgtggctcccgccccgctgcgcttcgtgttggccttatccagcagggttacgctcgcgcctttgtccgccgccgcaatagcggccataagtccggcaataccgccgccgacgatgagaacgtccgattccagcctttctttaatggggatcatgatgattgcctccgagtgataaaaggatgctgatgctacggggttattctttgggtttgagggaatcggagtccacatagagcaacatgtgcgtcagaggaagccgaagctcgatcgccttggcccggcaatcaagaacgcaggcgttacaatgccagcattcataggggcgacgtacttcaggaattttgtctttcttgggatcgtggcgaaagacttggagcgggcacacgtccgcgcacatgccgcaaccaatgcatttggtcctgtcgatgactgggggcatattcgtttcctcctgagcaaaacggtgttttccgaagttggggcatcatgagatgccgttatgcgttctttctttcacaacatgggtgagtgcgactatcgcatatgcgacaaaacgcaaaaaagcccgtcatggagaatgacgggctttttatattatgatgaaataatttaattaaaataaaaacaaactaaatggatattttttcacgaaaaggcgggctttacaggtgcgccatatggcgcagccgttccatatcaatgatttccacgcggcggcaggtaaagcaggcaatgatggcttcctgtttgaggtgctggattgcccgcgccagtgtagcgcgatggacgccgaacacggaagcgagttgttcctgcgtcatgccgagagggaaatcatcggaaccccgttcaaggctgagggaaatgagaaagcggctgaaacgggtgacgaaatcatccatgagcatgtcagtgagatacgtatggtaggtgaggaccagcgtgccgagcaactcgataacggaaagcatgaggttgggataccgggcggcgaaaacgggatcatgcagtacttttcccggaatttgccagatcacggcgtcggtcatgcactgatactgcccggatgcctcacaccgggtggccgcgggagcgaggttgaagatgcttcccggttcaaaggaaacgaccgaacgcatcctgccgtcgatcgtgtcgaaaaccacatggacttttccttcatcaatataaaagagatcgaaacaggtttcgccctcaaccttgacgatgcttccggcggagtggcgctgcttggtgccaagatgcagtatctcgtgccatgccgtagccatgtttccgatctttggaacggcaaatggggcgaacaggggcagcttgctggatgaaacggggatactgtcgtgcttggccatgattgcacctccagagtataaagtgtgcaatagtcccgggtggaaaacaagggcccgcctcaacggagcgggagttccctcggggcggatgcagtcggtggttgcggagcgcgtcggaggccgcaaaaaaacgcattccggccgctccgtttttttactgcgaattcagtgataaaaaagaacatcgcatggcgatgaagatgcgaagagtgcaggagggcgcttgagagaatctttttttgctcttaacattctcttcacgccctgtgtagcatgatagcttcaccaataatgagaacccccataaaggagtatccgtatgcgttacatcatggctttgctgctttctttggctttggcagttcccgctttcgcggggtttgagggacctaatgccagtaccggcggattcgctggccccggccctcagaccattacgaaagcggcgcaggtacaaaatgcccttgatgataccacctgcacgctggaagggaatattctggaacgcctcagcaaaaacaagtatgtatttcaggatgattccggaaagataacggtagaaatcggccagcggatctttggttccaatagggtaacgccggagacgcgggtgaggctgacgggcgaagtggatcacaagaagcaagggcgcgccaatgaagtggacgtgcggtatcttgaaatcgtgaagtagttcgttcgggaaggcgggcgcggagattctctgtgcccgccttttgtttatggcattgccggaagaccgtttgagggaagcggaggagcgcatggaagcaggccggatacgtgcactgattattgaagacaaccaagatattaccgcaaatctgtacgcgttcctcgaacctctcggctatgagctcgactgttccgccaacggccatatcggattggagatggcggtggcgggtacctttgacgtcatcgtgctggacatcatgcttccggggatggacgggttggcggtgtgccgggctttacgggaagaacatgtcgatccgacgccgattctcatgttgacggcccgtgatacggttgcggatcgtgtgacggggcttgattgcggagctgacgactatctggtcaagccgttttcgatgaaggagctggacgcccggttgcgtgcgctggtgcgccgtgcgcgggggcggcagacccgtagcgtcttacgttgggaagacattgagcttgatcccgcggcccacagcgcaacccggagcggggttcccctgcgtttgagcccaacagggttcgtcattttggagacattgctgcgggccgctccggccgtcgtccccagaacggaacttgaacaagccatctggggggattttccgccggacagcgatgccttgcgtacccatatccatgaattgcgccagaagctggacaaaccgtttacctgtccgctcctcaagacgatcccgcatgtaggctatacgttggttcggcatgaataaaacatcgtcgtttctcaatggactttgtgccggttgcagcgccttgtggcgggcaatattccttttccgtccgctggcggcattgcgcaatcgggtggcgcggcgagtcaggacacgttcgctcagcaggcgcatcgcggaggcgttcctcgtcttgacgttggtcaccggagggatattcagcctgagcgcctacctttcgtatgactatgcgattacgcatgtcatccggtggcacatggaaccgatcatgcgtttgctcatagccgctgaggaagggcgcactctccgtaagggagaaaggctttccgtggacagcgagctgcttgcaaaggaactgaaggtaaaatggtacgtcggggaagccattcctgatgatttgcgtccggagcgttccaaggtgcgtgagctcgtgcgcatcaaacgggatcgctatgccatgacataccgggacaaggaggggcaagagtacgccattgtcggcaagatcaaggatcttgacgacttggaagaggtgatggccgatattgcgctggcatgtgtcgtggggagcctgatcggggcgggattgttggcttattggttgagccgccggctggtttcgccgcttgtcgagctgaccggcaaggtcaaccggggcgaagcactggatgacaccctattgtgttctcgggatgacgaggtcggtgatctggcgcgggctttcgcagggagggagcaggccttgcgagagtttttgaaccgggaacagctgttcactggggacgtcagccatgagttgcgcactccgctgaccgtattgcagggcggggtggagattttggaaagccgcttgggcggagatgacaaactgcttccgattgtggtcagaatgcagcggactgttgcgtccatgacggcgatggtcggtacaatgttgcttcttgcgcgtaagccggagcagttggaattccggcctttcgatctgtgtgtgctggcgaggcaggaggaggtggagatccgggaacgcttgcgagggaggcctgtcaccttttccagtctgttgcccgaccggctgacggttttgggaagccctgagttggccgccatggttttgcacaatctgctcgacaacgcatgtcgctataccgaacagggccgcattctgttggagttccgtgcggatgaaatgcttctgacggataccgctcccgtcatcgatcctgatgtgcgcacacgcatgtttgaacggggcgtgcgcgggaccagcaaaagccccggaagcgggctggggctctctcttgtgctgcgcggctgtgaacgcttgggctggaaagtggcgcacgagcattgggaaggcggaaaccgttttcgtgtgcgcttctctcaagggtagggttcggatgccggggctgcgacattctaaggaaatacgctgatgaagcctttgatgatgagctaggccgagagggggcggttatggccgttttcagtcgcaggagcgccgctgccgtgatggggcaaagggctggagagtgccctttgcctgagccatatctctcccgaaggtgtttcggctgagaatactgtcgttctttgaagggggcaccccaagaggagggacatccatcagggacgggaaggagccccctcccggctggcctcgggctggagccccgtatagactttgaacgctttctctttggcgcgaaggagtaaaggcgtcagggggacacgcggcatggtgtcgatgcagaggccgagatatgccccgatgggcagcggcgtttgcaggctgttgatcttcccccaaagcccttctttcttccatgtgtttggcgggccaagcaatacggatcggaaagagagggtggccttgggacggattcgcctgaccatacgggccagcgaccagaaattcaggttatggcgtctgtgcctgtactcaagggtgggacggtgcaggcgcctttgtatctgatagagcgaaaaactattcataaaaccgatgatgacgccgcgatgggaaactctgatggcttcgcgcagtacgtcttccgggttgtccacgtattccaacacggtgagcagagctgcgtaatcgaattcttcatcgtcgaaagggagatgttccgggcggcccagctggaattcagcccggttccccagccgttccctcgccatgtcgagcaggtcagtaccggtatcaagccccgtgacatcaaatccatagtgccagagcatctccaaaaagatacccgctccacaccctatgtccagaagcgtatgcccgcgccggggccactgagagatcaagtgttgaaaaaggcggttttcctgagtgatggcataggttccctcaggcgttgcataccagttatgcaggaattgggctgtttcggcgttccacatctttgcctccacgttctgtattcatgagaacagagtatccttttggtggagtgcaggaaagccccttactctgcggacggccagatgccgcatggccttgccggcgcatagcccgacctgaacgcctcttcgagatccgaaaagcggatttgattttttttcgaaatattggccgtgcgcagacatgctttggagaagaaacgtttgctgttcctattgccgatgtagggctcctgagcctgagggcgggtcaggatgaacccccagcagcccgcgcgcttgtccagtgcgtccttttgagccgcagtcaggcggcgtaccaactggctggggaggttcttgtgcgcgtaaaaagaagccatgccctgctggagaagctgttcattgagggaacgcccatcgggaaggatgatttccgcgacaagcctttgataccgatctcgggatgccccggaaagcgggatgaccttgacccgctgtttccgtgtccgctcgcaggtgaagcgcgctgcctcgcgggcataatactggggcggggtatccttggagcctttctcaggggtatcgactccggcaagccggacgcgctgtcccgtatcaagcacaagcgtgtctccgtccgtacactgcgtcacggtggctgaaaacaagccgtccgcatgggcgatggccgtctgaaaaacgaaaaaagccgtcacgaggacggcggaaagcatttgggcaagggtgtgcatcaagcgtccgcgagccagccggagagggcatccacgatcttgcgagcctgttccgcgctggatatgttgaatttggacttttggcggtattcgccccccgacttctgataacggcggatagcatacttgtccggaccgtattcgcccgtttccgcgtcgagctcctgatagcggaaaaggattgtcgtccatgcccccttggagaggatgaccttgtccagttccttgatgaggatctgcccggattcttcgtattcaatagtgatttcgtctggtgtgctgctcataacagtcctttcgccacgctgttgcgcacagtggcttttaaaatgaaagttcctcctaacgtgtttcgtagctatacgcaagagtccgaaagaaaatggctgaaacaaggaacgggaatgaaatgatgggtccggaaccggtcgaggcttcgtcccactggacaaaattttttctgtctgtaacatatcatgagttcattcagactctgtcgttgaaggaacgtccaacgatggggccatttttttgtaaggagatttcatgagcaacgaacccgataagattatttattccatgatccgcgtgtccaagcgtcatgggcagcgtgaagtgttgaaagatatttccctttcctatttctacggcgcgaagatcggcgtcctcggcctgaacggatcgggcaaatcttcgctgctgaagatccttgcgggcgtggatcaatcctttgaaggaaagaccgtgctggctcccggctataccatcggttatctggagcaggaaccgctggtcaacgaaatgcggaccgtccgtgaagtcgtggaggaaggggcgcaggaacttgttaatttagtcaaggagttcgaagagatcaatgccaaattcgccgagcccatggagccggaggaaatggataaactcatcgaacgccaagggcaggtgcaggagctcatggatgcgaagggtgcatgggatcttgactccaagcttgagatggcgatggatgccttgcggtgccctccgggggatacgcccgtttccgtcatctccggtggtgaaaagcgccgcgtggcgttgtgccgcctgttgctgcagaatcccgacatccttctgctcgacgaacctaccaaccacttggacgccgaatccgtggcgtggttggaacggtacctccggaatttccccggtactgtcattgccgtgacccacgaccgttacttcctcgacaacgtcgcgggatggattctcgagctggatcgtggccgcgggattccgtggaagggcaattattcctcttggctggagcagaaagaaaagcgcctcgctcaggaagacaaggccgaggacgagcgccgcaagaccctcagccgtgagttggaatggatccgcatgtcccccaaggggcgccatgccaagggcaaggcgcgtatcaacgcctatgaggccatgctgagccacgaaagcgaaaagcgggctcccgaactggaaatctatatccccgcaggcccccgtctgggcaagaaggtcatcgaagccgtgggcatcagcaaggcccttggcgacaaggaattgatggaagatgtgaatttcatcattccggcgggcgctatcgtgggcattatcggcccgaacggtgcgggtaagacgacgctcttcaagatgcttgtggggcaggaaaagcctgacgcgggcacgttgaccatcggcgacaccgttcagttcgcgtatgtggatcagcagcgagagtccctgacgccgggcaagaccgtatatgagctgatcagcgacggtgccgagaccatcaagctcggcaaccgggaaatcaacgcccgcgcctattgctcccgtttcaacttcaccggctccgatcagcagaagaaggttgacgtcctgtccggcggcgaacggaaccgcgtacacaccgcccggatgctcaaatccggtgccaacgtcatcctgcttgacgaaccgacgaacgatattgacgtaaacaccatgcgtgcccttgaagacggtctggaaaatttcgcgggctgcgtactggtcgtcagccacgaccgctggttcctcgatcgcatcgctacgcacattatggcgtttgaaggcgattcgtcggttgtgttctttgacgggaactattcggaatacgaggaagatcgcaagaagcgcctcggtaaggacgcggatcagccgcaccgcttgaagttccgcaaactgacccgatagagagattgatccgatacaaaggaaggggagggcgtttttcaacgtcctccccttcctttgtatgcgggcggttttgatttggcgtgtgagggattaggcgaaggcgttcacgccttccagagagccaacagccgtgatggcgacttcttcctccaccggaacggcatctaggatgggtttgaccatacgggagagggttcccttcgggcccacttcaacccatgagcggatgccgtcgtgccactggttggcgatagtatcgatccacaggactgaggaaatcatctgaacggtggcgagttcgcgcaggctttcgccatccgtcaccgctttgccggtcacattgctgtaaacgggaaaacgcggtctggaccacgtcattttgttgagcgccttggcgagttcttgcgcggccgtatccatcagcgggctgtggaaggctccgctgaccggaaggggaaccgcccggccttttttttccttaacgagcggaagggccgcttccaccgccgccttggtcccgctgatgacgaactgggccggggtgttgtggttggccacaatgaggatttctcccgtggcttccgcagcggccttggcgatttcgttcacggcttcgcggttgagcttgaggattgccgccatgccgcccttgccgtcgggatcggcgtccgccatcagcttcccgcgcaggcttaccagttcaagggtagattcgggggatagggctccggcagcggccaaagcgctgtattcgccaaggctgtggccggcggcgcaggcgggggacagctttccggaaagcgcctgccacagcgtcacgttgacgaccgtcaacgcgggctggaggtgcttggtgtcggccatgagcgccgcgtcgtcgctttcccagtagacggcgcgcaggggaaggccgctgatctgttcggcttttttccagagttccatggcttctttcgatgcttcggcaacatcgcggcccataccgggctcttgggaaccttggccggggaaaaggacggcggtggggacagtagacatatagacctctactttttgggggttggggccgggctgatggccttgagcaggccggggagattacgccggacaacgtcgagttcgtcgtcgctcacattgggcatttcaatggggggctccttcgtgatggcgtccccttgctggatgatggcgacagcggcggcggcccgccccataatgcagaaaaagcgttccggtttccagcccgcagcctcgatgtacccggcggcgttcttggaataaaggaaatcgggttcgcccgcttcattgacgatcgggtgggccttttccttgttggttttgatccatgcccggaaacggggaagatcggcgataaattggttgagttccttttcggaaaacggaggctgattgtacagcgtttccgccgaagcggggagtacggtcagcagaagcagcagcccggcaaggccgaggcggaaaaaaagagccatgtgtcacgtcgcttgttgaaggtatgggcggcgtccattgttgcgccgggacaaaaagatagagcccctgtgccccggcgtatagtatattaatcgtatttgatggaactgatctgcatgagcttgttccagttgtgatgcgattcgatgtagcgcatcgtaccggttttgctacggataatcatggaatgcgtaacggctccctgcccggagaactggacgccgcgcaggaacgtgccgccggagatgccggtggccgcaaagaagacgtcatctccctgcaccagcgtgtcggcgtcaaggatctgggcaaggtcgatgcccgcttcctgaatggcggctttttccgcttcggactggggatcgaggcgggcaagcatggcgccccccgctcccttgatggcgcaggccgccaacacaccttcaggcgtgccgccggtccccatcatgacgtcgacttcggaacgctgatccacggccatcagggcaccggcgacgtcgccgtcggtatgcagctggatacgcgcgcccacggcccggatttcctgaatgagcttttgatggcggggcttatcgaggacgaagaccacaaggtcgttggtatccttgcccagcgccttggcgatgaggcggagattgacgtggaccggcgcgtccagatcgatgacgtcacgggcggcttggccgacaaccagtttttgcatgtagaagctggggccggggttgtacatgcttcctcccggagcggccccgacgacggcaatggcgttggggcgcccataagcgagcaggttggtcccctcgacggggtccacggcgatgtcaagggaaggcccattgcccatgccgatgatttcgccgttgtagagcatgggcgcttcgtccttttccccttccccaatgacgactttgcccgcgatgggcagggagttgaaggacaggcgcatggcgtccacggcggcgccgtctccggcgtttttatcgccgcgcccgagccagcgcgcggatgccagagcggcggcttcggtgacacggacaagatcaaaggcaaggttgcgctccggcgcttccataagggacatatcgctctccagaaaatatgaatggttcatgaacgcccggcctccgccgatccagcggctcaggcggtattgggaacatagatcaggcgaagccgctcttcaagaaaaagctcaccgcccgacggctggaaggcacgctttccgggaggggggattcgtgctagaggggggcatgttcaatcataccacagaagtcctgcccattgaggccctgctcccggatctgcttgaaacattgggtagcgggacccgatgtatacttgaagcggcgcccggcgcgggcaagacgacgcgggttcccttggcattgctccgggcggcatggctcgacggcaaaggcatcctgatgctggagccccggcgcatggcggcccggaacgcggcccggtacatggcttctctgcttggggaaaaggtcggccagaccgtggggtatcgggtgcgcttggattcccgggtgagcgcgtccacccggattacggtggtgaccgaaggcgtcttgacccggatgctccaggacgatcccgagcttcagggcgtcggctgcctgatttttgacgagtttcatgagcgcagcctgaacgccgatttggggcttgcccttgcgcttgattgccagcagggcctgcgtgatgatttgcggttgctgatcatgtcggccacattggattccgggccgctcctcaagctgctgcaacaggatttttccggagcggtcccggtgctgaggagcgaggggcgcgcgtggcccgtggagacgcaccatcttccactgccccgggcagacattccaatggagaggtgggttgcggacgccgtccggcgcgcgctgcgggaggagaacggcagtatcctcgtgttcctgccgggaacgggcgaaatccgaaaagttgaagcgttacttcaagacgtgcgatcggataccgtacatctttgtccgctgtacggcgatctgcccgcagcggagcaggatgccgccattgcgccggtttgggctccggtacggaagatagtgcttgcgacgtccattgcggaaaccagtctgacgatcgaaggtgtgcgggtagtcatcgactccggcttggcccgcacagtgcgtttcgacgcgggaacgggcatgtcccggcttgtcacggagcgcgtatccctcgccagtgccgagcagcgtaggggccgggcagggcggacggagccgggcgtatgttaccggctgtggcatcaaggggacgaagcgggaatggcggcccatatccgaccggaaatattggatgccgacatggccccgctgtgccttgagcttgccgtatgggggatcaccgccccttcttccctgcactggctggacgagcccccggtggaagctgtcaatcaggccattcccttgctccgcagcctggaggcagtcgacgcggcggggagggtgaccgcacggggaagggttatggcccgtcttcccttgcatccgaggcttgcgcacatggttcttgcagccaaagcgtttgggcttggcaaggccgcctgcctgttggcggcaatggctgatgagcgtgatccgctgcgcctgcgcgatgtggatatccgcccgcgtctggcgttgctcggacacggtcagggttcgcccgccgttttccgcattcgtgaggcggcccaccagatagggcggttggttgatgcggcgggagaaccgccgcaccggacccccatgagcataccggaagaggaacaggccggtgtcttgctcgccttggcgtacccggatcgcctcgcccagaaacggagccggggcagttatcgtatggccaacgggcgcggcggctttctggacgatacggactcgttggccgacgagcccgtgctggctgtgggggccgtcaacggtggctccggcaatgtgcgtatctggcaggctgcgccgctttctcaggaaacggttgcggcattgtaccagactcagtttaccaagaacgaagaggtcgtgtgggacagccgggaacaggctgtagcggcgcggaagcgcgtgagcttcggggcattcattatagaagaaaccccgttgagaaacggtgacgcgtcccttgcggaccggatggcgcaagcggtgctttcggggatccgggaactcgggatgtcgtgtttgccgtggacggaagagctgtatcaatggcggctgcgcgtcgagctgctgcgggccgtggataaaggcggggactggcccgacgtttcggaagaagcgctcttaacggggctagaagactggcttgtcccctttttgcaaggcatatcccggcgttctcagttctcgaaaatcgatctggcggcggcccttcatgcgttgctcccgtggcgcaagcagcgggagcttgatgcgatggcccccactcatatggaagtcccttcaggatcctttatccgtctgctctacgaggcctcggcggaagggatagtgccggttcttgcggtcaagctccaagagatgtttggtatgcaggaatcccccgcgatagctgaagggaaggttccggttcttgtccacctcctgtcccctgcgggaaggcccttgcagatcacccgcgatctcaaaggattttggaagaatgggtatccagccgtcagagcggaaatgcgggggcggtatccgaagcacccgtggcctgaagatccttttacgaccctccccacacggctgacgaatcggcgtcttcagaacagatcgtagaggggaaatctttcggctggtcccgcagggggctgcttttcgaaaaggccccctcctttttcgtgcccggcaaggccgcgggcagtccccgagacagcttactttacttttgcgggtgttgcggtagaataaccgctttacgtctatctttattaaccgttccgatttcgaggtattacatgcgcgccgaacagcatcttgaggcttctttcagggctgtactgaaaaatatgaaccttccctggccggataaggccgtcatcgaaccttccaaagatcccaagcacggcgatctggcttccaacctggcgttggtatccgccaaggccgcagggatgccgccgcgtgagctggccgcaaaaatggccgaagccctgcggaatgaggatacttccttggcctccgttgaagtggctggccccggctttctgaacgtgacgttcagccccgagttctggcgtgaaacgatccggcgcattgatgatgccgccgatcgctttgggcaggccactgttgggaaaggctgcaaggtacaggtggagtacgtttcggccaaccccaccggccctctccatatcggtcatggccggggcgcggcggtgggcgataccttggcgcgcatcctccgttttgccggttatgacgtcacgacggaatactatatcaacgacgctggccgtcagatgcggctccttggcctttccatttggctgcgtgccaaggaacttgccggaatagctgtggaatggcctgaagattactatcgagggtcctatatcattgatattgcgcgcgagatgatggacaaagatccagggctgacctcgctttccgatgcggaagggcaggacaggtgttttgcctacggtatgcagaccatcctcgacggcatcaaggaagacttgcgggaattccgggttgagcatcaggtgtggttctccgagcgttctcttgtggagcgcggagctgttgaagaaacctttgagcgcttgaagaaggctggcctttcctttgaaaaggacggagccctgtggttccgtacgacggattttggtgacgacaaggatcgcgtcctgcgcaagtccgatggctcgctgacctacttcgcttcggacatcgcctatcatgacgataagtatcgccgtgggtttgatcgcgtggtcgatgtctggggcgcggaccatcatgggtatgtcccccgcatgaaagcggcggttcaggccgtgggccggaaggcggaagatcttgacgtcgtgctcatccagcttgtgaacctgctggagaacggcacgcaggtggccatgtccacgcgcgccgggcagttcgaaaccttggccgatgtggtcaaggaagtgggcgtggacgccgcgagattcatgttcctgtcccgcaagagcgacagccatcttgatttcgacctcgccctggtgaaacagcgttccatggacaacccggtttattatgtccagtacgcacatgcccgtgtacggtccgtgttgcggaaggccgccgaggcggggctgacgctgcccgaaaagacggatctggcgctgctggctcccctttccgaggcggaagatctggctctcctgcatttccttgatcggtttgaagatgtggccaagggcgccgcacaagccttggcgccgcatcacatcagctattatttgatggaactcgctgggatgctgcacagctactatgccaaacatcccgtccttcaggctggcgatcctgagttggccttggctcgtctcgcgttgctccgttccgtggggcaggtggtaaaaaatggtcttgaacttcttggcgtaagtgctcctgaaagcatgtagggggatcgcctcgctctcagccggaccctgtcccgtggggtccggccttccggttccctcacttgagacgccattcagacagcaggatagaacatgtctctgatgccattttccagtcgctcttcgtcgcgctcatccgggggcggcgatgctggtggcgaaaaaaagttgtctaaccggaaatacacgatcagtttgagtttttccggcctcattacgagcgggatcattacgatcatcgccatcgggtggatttttgccttcggagtcatcgtcggcagggggtataatcccgaaaagaaaatgcccgagctggcgcgcttgttgccgccgcctgaagggcaggacgctccgaaagaagcgaaagggatcttgaagcctgaggaactgacgttcatgacggatctcaagcagacgcagcccgcggccaatgcggctcccaacaagcccgaagcgaaggcggcgcacccaaccgctcagcccgtggccgctgcgacgcccaaaccggaagccgcttctgcggataaggccaaatacgacttcgtctttcaggctgtggcgtacaagagcaaagacagtgccgacaaactgcgcgaacgcatggaaggcgaagggttgcgcactcgtatgaccattgagaaggacaacaagggacgtcccaaatggttccgcgtgcaggtcctcgtccgtggaacggatgcggatgcctcggccgccaagcaggtcctcgtcaaaatgggattgaaggatgcaacacaggtttcgaaaaagcctgttcgggggcggtgagcgaatggatatcttgtctcgtttttttgctgttccgggtgctctcttcctgcgttggatagatgcccttggggatacgtttttattcctgctggagggattgcggcagatattcatagctcctaagctgttcatcaaggtccttcagcagttgtatgtgatcggcacgaaatcgttgttcgtcatttgcctgattgcgctgtttacgggaatggtccttggcttgcagggatattatgtcttggtgaagtttggctcggtggggtttttgggggccgctgtttcgttgacgctcatccgggagcttggtcccgtcctgacggccatcatggtcacggggcgtgcgggctcgtccatggccgctgaaatcggcgtcatgcgcatcacggatcagatcgatgcgctggaagtcatggatatccccggcatgggatatctggtcgcgccccgttttgtcgcttcgttgatagcttttccgcttttgacggccatttttgatgtggtcgggatcatcgggggctacctgaccggcgtactgctgttgggcgttaatgaaggcgcctatttccacggcatagagagcagtgtcctgatgcccgacgtcacggaagggtttatcaagtcgtttgtgttcgcgctgctgatagcgttgatctgctgctatcaaggatataatgcgcacaggcggcgtgacggcatggggcccgaagcggtcgccaatgcaacgacctccgcggttgtgatttcgtgcgtgttcgttctcgtggccgactatgtggtcacttcggccatgctgcgctaggaggttcaggtgaaggatcagcattcttcttgggatatacgcctcgaacacctccgagtaggctacgggtcccgcgtcgtcctcgacgatatcaatgcggttttgcccggaggcaagatcacggtcatcctcggcgagtccggatgcggcaagtcgaccttgctgcggcacgtcatcgggctttcgcggcccatgcaggggcatatcctttatggggggcaagatctgttcgcgctcccagaacgccagttccggcgggtgcggcggcgctttggcgtgctgtttcaggatggggccctgctcggttcgctgacgctcgctgagaatgtggggttgccgctgcatgagcatacccgtttgcccaaagcgactatccgttctaccgtcctgcgtattctggatctggtggggcttgccgagtttgccgattattatcctaatgaattgtccggcgggatgaagaagcgcggcggattggcccgcgctattgtcacggagccgccgttgcttttttgcgacgagccgacctccgggctcgatccgatcaactcggcccaaatggatcagcttctgttggatatgcgcaaggcatacccggaaatgaccctgatcgtggtcagccatgatctggcgagcgtggcccgcattgcggaacacgtgctggtcttgcgtgacgggcgcgtcgttttttcgggttcgtatgaggcgctgaaggcttctacggatgaatatcttcggcgcttcatggacaggaaggctgaagaaaaagccagtcgtgtcgcaaccaccgcgacggatccggacgttcgggccgcgctggatgcgtggctcgaagggtaaacgttctcatcaaggacaaggaaggaatccccatgtcgttttccaaagaagccgctgttggtttttttgtcatgctcggactggtctgtgtcgcttacctgacggtaaagcttgggcgcatggaagtttttcattccgagggatacgttttgacggcctcgttcaattccgtgtccggcctgcgccccggtgcggaggtcgagatcgccggcgtccgcgtcgggcgggtcaagtccatccggctggatgacaaacagccccgtgctgttgtagaattgcagctaggggataatgtgcatcttacggatgacgtgatcgcctcggtcaaaaccagcgggcttattggcgataagtacatcagcctggagcccggcggttctggggaaccgttgaagaacggcgacgaaattacggacaccgaatcggcggtggatattgaaagcctcatcagcaagtatgtgtttgggaaggtgtgattatgatgcgtacaatcagacatatggttttggcgttgtgcagtgtgtttatcctttgcggtaccgtccatgccgcggaatctccgctcgcggttttgcagacgcagatcgatcagattttgaatgtgctgaaggaacccaattataaagatccgattaagcgggttcctcttcgtgctcaaatcgagaaatatgttcatgaaatttttgatttcagtgaattctccgcgcgcacggtgggcagaaattggccgagtttttccgatgcccagaaagaacggttcgacaaggcctttgcgaatctcctgctcataacctaccttgacaaaattcagggatacaacggggaaaagatcgaatattccggtgaagtcctctcgacaaagggtgatcgcgccgagatccagaccatcgtcaccctgtccgacggcaagcccgttccggtggcgtaccggatgatgttgaagaacggaaagtgggtcgtgtatgacgtgctgatcgagaatgtcagcctgatcaagaactaccgttcgcagttccaggatgtcttgacgcgagggactcctgaacagctgatcgaaagggttgaagcccgcgccagagagcttcaggcccaatccaccgtcaattaacggactatttcatgactgctgagcaacgttttttcccaatctggaagatgtgtctgtgtgccgccgttgtgttgtccctgatgggatgcgcggcaaagcatggcgataaggccgttaactctcctgatgtgcaggcggttgaaacgtcgtcggttggagcggctagcgtggcggattccgattctgccttcgaggattacgacgatgaagaatctgaggccattgccgaccccttggaagggtggaaccggttctggttcggcttcaatgacgtcctcctgttgaaggtcgttaagcccgtctacacggggtatacctatattaccccgtcgcctgtgcggaccgggctcagcaatgcttttcacaatatccagatgcctatccgttttctgaactgcgtgttgcagggacgtttcggggaagcctggattgaagtcgggcgtttcgttgtgaacacgactgccggttttggcggtgttttcgatgtcgccaagcagagtaagccgctcatccccgtggataatcgagatgctgattttggccagacgctcggcgtatggggatttggcgaggggatttatcttgtatggcctgtcgtcgggccgagtacggtacgtgacacggtaggccttgccggagactggacgacgtccgcattcttctggatttcggaacccatcggtccccttgagtttgaacccgcgctggcggcaagccttggcctccgcttcaacgatatggggacggtaatcagcacatacgaatcgctgaaaaagagtgctgtggaaccttatattgcggcacgggatgcctacgtcaaataccgccgtgccggaatcatgggtaaccgattccaatggtaatgtgtcattgaacagtaaaaaagccctcctaggagggcttttttactgcgaggggaaaacctgcaaggctacgtgaacttttcaagaaattcagctttcaaaaagtaagacatcaacaggcgttcccgcctcaaggccttctatccgtgcggaaatgcgcaccagcccttccgaatccagcaacgtccgaaggagccccgacagcccggggaccgggacggcgcgcggaaggccgttcgcctgatgttccaacctcacgcggatatagtcttcgcgtccttggcgggaagcgatgttgcgcgacagtatggcctggcgcgaaggccagaatgtctgatcgaaagcgtgtccgtatcggaaattcccctgcccaaaaaactgtgccatgagggaatgcccggcaaggtggcggagaaagggaacccccagaacgtgcatgacgacctgcgcggaggctacctgtcctggaagcccccagacgagtgtctggccgcagcgggccaatatcaacggtttgcccggactgagcgcaacgccgtggcaaaggatttccgtgtcgcccaaggattgcagggcttccagggtcagatcccggacgcctatggagcttcctccggacaggaagacgacatccgccgaaaggccgttttctcctgccagggccgctttgagggaagccgtcagcggtccgagccgatccggcgcgatgccgaatgtggagacatcggcaaccggacggagcatggctgaaagggcgagtgtgttgacgtcgcggatctggccgggacgtggggtttgctcaggggatacaagttcgtcgcccgtggaaaggatggaaaccctcggacgactgataacgggaacctcggtgatgccaagagccgctaagagcccgatttcctgtgcgcggagttttgttccccgctcaaggaggggggtaccttcttgagcatcatcccctttttgcatgacatattcgcctggggcgacggaacggcgcatttcaatgacgccagcgccgaacggcttggtatgctcgaccataatgacggcatccgctccttcgggaaggtagccacccgtcacgatagcagcacactgtccggattggagcgtgaagttgggcggccggtcgatggcgatttccccgacgcagtcaagccacacaggattagcctccgaagccccgaagagatcggaagcttgcacggcatagccatccattcccgagcggttggctggcggcaaggtttccgtggccataatcgtttcagccagtatggggccgccggaaagcttgtccagccgtttgctttcttggggaaggggagaaacgtcgagtagccgggaaatgacttcctcgacaggaaggacgtggagaaaatccttttgcatccgtgtagctccagaacaaggtgagaggggaggctcgaaaaaacggtcctttggtgagtggcttttttcgttttatcccatgcaagggaagacgacaatactgaccccgcaaacagttatgaccgaaaaggggagggcacggtggattcggacaactgagaggggaaaaaccgcagccggcatgtaaggtgagctccaacgatgattcctcttgcctgcgggggaagagacgcttatttaacacctatgaatacaaccgaaactccacttttcaagctgcggaccgaatacgtccccacaggcgatcagcctgcggccatcgagcagctcgcttccaacatcgaagcgggcgtcagggatcaggtcctgcttggtgttaccggatcggggaagaccttcaccgtggccaacgtcatcgctcaggtcaaccggcccgcgctggtgcttgccccgaacaagaccctggcagcacagctttacaatgaattccgcgcgttgtttccggaaaacgccgttgaatatttcgtcagctactacgactattatcagccggaagcctatgttcccgcgtccgatacgtatattgaaaaggactcggccatcaatgacgatatcgacaagcttaggcacgcagctacccatgccctgttgacacgccgggatgttatcattgtcgcgtccgtgtcctgtatctacggccttggctctccggaatactatgcccgtttgatcattccggtcgaggtcggtcaacgtgtcagcatggacgcaatcatcaccaagcttgtggatgttcagtaccaacgcaatgatatggattttcaccggggaacgtttcgggttcgcggcgacgtgctggaagtgattccggcgtatgagcacgaacgtgccttgcgtctggaatttttcggagacgagattgaagccgtccgggagatcgacccgctgacaggtgaaatcttggggaatatcgggaaaaccgtcatctacccggcaagccattacgtatcggacagggataacctggagcgggccatgtccgacgtccgggacgagcttggtgagcggctgcgcttgttccagtcccagaacaagctggttgaggcgcagcgcctggaacagcgcacgcagcttgatttggaaatgatgcaggaattgggctactgcaccggcatcgagaactattcccggcatctggatggccgcaaggagggagatccccctgccaccttgctcgactattttccggatgactttgtgctgttcgccgacgagtcccatatcagtattccgcaggtcggcggcatgttcaagggagaccgttcccggaaaacgacgctggtggatttcggcttccggctgccgtccgctttggataacagaccgttggaatttcatgaatttttggaacgcctgaaccaggtagtctatgtttcggcaacgccgggcaaatgggaactggagcgttcgcaggggatcgtggcggaacagatcatccgcccgacaggcttgcttgaccccgaagtcgaggtccgccccgtaaaggggcagatcgacgatctgcttggggaatgccgggcccgtgtggaaaagcatgagcgcgtgctggtcacgacgctgaccaagcgcatggccgaggacttgaccgaatatctgaattcgatgggcgtcgcggcccgctatctgcattcggacatcgacacgatggaacgcatggccatcatcaaagccctgcgggcgggtgagttcgatgtgctggtgggcatcaatctgctgcgcgaaggtctggatattcccgaagtttcccttgtcactatcctggatgcggataaggaaggttttttgcggtccaccggatcgcttatccagacgttcggacgggcggcacgtaatgccggcggaaaggttttgctgtatgcggacacggtgacggcgtccatgcgtgcggctatgggcgaaacggcccgtcggcgcgcgaagcagcaggactggaacgaaacgcacggcattacgccgacgaccatcagtaagccgcttgccacgccttttgactccctgtacacctcctcaggcgaaggaaagggaaagcgggggcgggggaaacaggccaaacaacctgcggaagcctctgcatccgtggacatcacggcccagaatgtggcccggtatttgaagcagtttgagcgcgagatgcgcgatgccgcccgggatctggaattcgagaaggcggctgccttgcgggatcgcatcaagcagcttcgggaacagtttttgattgcttagcctcggcagcggggcaacgaaggatgacgccatgaatcaagggacgctgcaatcccttttggtcgaggatgccgataaaaaacgtttggaagagcttcgtgcgtttgtgatttaccataaccatcggtatcatacgctggatgcgccggaaatcaccgacgacgaatacaatgccgcctttcaggagcttctgaggctggaagagcgccatcccgaatggcgatcgccggattctccgacgaacaggatcggcggacaggtgttgtcgtcgctggaaaccaaggcccatacgcggcggatgtacagcctggacaacgtgttcgatgcggaggagtggcagggctttctcaagcgcatggacaacgcccaggcagggcttgagcatgctttttggtgtgatccgaaaatggacggcctcgcccttgagcttgtgtatgagaacgggcggtttgtcgaagcactgacgcgcggagacggcgaagtcggcgaactcgtgacggaggccatgcagacggtgcgcaacctgcccaaagtgctgcacggcgatgcccctgagcgtctggaagtgcggggggaagtcattttccgcagaagggatttcgccttgctcaatgagcggctgcggaaggaaaatctcaagacatttgccaatccgcgcaatgcggcggccggctccatacgccagctggatacctcggttaccgcgtcccgtccgttgcggtttttggcgtatgggtttggggatgtccagttcggtggggtgcagccgtggagtacgtatgaggaggtcatgggacggctccgtgactttgggttcgagacgccgcccggaggccgcctctgccggggttccgaagaagtggaagcctattacgcctcgctgagtgaaaaacgggagtcgctggcgtacgagatcgacggcgtggtcatgaagctcaatgaccttgaggcacaagaggcgctgggctatacggcgcgggctccgcggttcgccgttgcgtggaagtttccggcgcagcaggcgacgaccctgttgctggatattaccgttcaagtggggaggacgggggttctgaccccggtggccgaattggagccggtgaacgtcggcggtgtgcttgtcagccgggcaaccctccacaatgaggatgaaatccgcaatcgggacgtcagaatcggcgatcgtgtggtggtccagcgcgccggggatgtcatccccgaagtggtgcgggccgtactttcggaacgtgccccggattcgcagcctttcgttttcccccatgtatgcccgtcctgcggccaggccgcgtcccgtctggaaggggaagtggcttggcggtgcgtgaatgtttcctgtcccgccatgatccggcaatcgttggcgcatttcgtgtccaaggccggactcgatatcgaagggctcggccagcgctggatcgaactgcttgtcgcttcgggacgggtcaaaacccctgccgatctctttacgctcagggttgacgaactcttgcattatgagcggatgggtgtaaaactcgccaccaagtttgtggattcgttggatcgggctaaaaaagaagcgacgttgcagcgtcttctttgcgcgctcggcatccggcatgtgggtgagcagacggcgaaaacattggcggcgacgtacgccgatatggacgtgctgagagcggcgagccctgaagaattgcagaatttgccggatatcggcccggaagtggcaagttccattaaggcattttttgacgacgagcccaacgtggccttgttggcgcggttgcgggagctcgggctgtggcctgtgcgccaggaggcggcggtggcttccatgccagtgggaccgctcgccgggcagaagatcctcttcaccggatcgttgtccattccccgctcaaaggcacagcagatggcggaaaacgcaggtgcggaaatcgctggcagcgtttcccgcaggctgaatctgctggtcgtcggggatgaaccgggctccaaacgcgaaaaggctcaggcattaggcatccgcatcgtggacgaagccggttttctagctctgttgcaggcggacaattaggtgacggcgtcttcttccgaaaacgcggcacaggattctgaataaggaaagagggtggggaaaatgagtctttctattatcgtgatgggcgcttccgggcgcatgggtacgaccattgccaatcttgcgaaagagcagggcatgacgcttgcggccgtactggaacgtccggaaaggctggacgcgctggcccattggggatgcctcgccggaacggatcccgaagtcgtgtacccgcaggttcccggggccgtcgtgatcgattttacggcaccggaagcaagccttgccaatgcccggtgcgccgtcaagaacggcaaccctatcgtcatcgggacgacgggcttcaccccggagcaaaaggcggagctggatgcaatcgcccaaaacggacgggtgttttggtccccgaacatgagcgtcggtgtcaatgtccttttggaactgttgcccgaactcgtgcagatgctcggcccggattatgacctggaaatggtcgagctgcatcacaaccgcaagaaggattccccaagcggtacggcgttgcgcctcgccgagtctttggcttcggccagagattgggacctcaaggatgttgcctgctaccaccgcgaaggcatcatcggagagcgccccaagaaggaaatcggcgttcaggccatccgcggcggtgatgtggtcggcgtgcataccgtctatttcatgggccccggagagcgcattgaggtgacgcaccacgcgcactcgcgggaaaacttcgctcagggtgcgctgcgtgccgcgagctggttgccagggcagccgggcggcaaggtatatgccatgggcgatatcttgaagtcgaggttgaaataatgtcgagtattcctgccaaggattggaaatcggtctgggaactgctgacctccggcatccgcgattatgttcggaaaaacggcttcacggatgtcgttctcggcctttccgggggcatggattccgcatttgtcgcggcgcttgccgtcgacgcgctgggcaaggaccacgtgcacggggtgatgatgccgtccccgtggtcgagtgagggaagcattaccgattccgaggcactggccgccaatctggggatggaaacgttcacggttccgatttcgccgatgatggaagcctttgaaaaagcgcttgcccccgcctttgccggaagggaacgggatgtcactgaagagaacatccagtcccgcatccgcggcgtgatcatgatgtcgttttccaacaaattccactggatgcttttggctacggggaacaagtccgaagtggccgccgggtattgcacgatgtatggggatacctgcggcggtctggctcccattgccgacttgtacaagacggaagtgtaccagctcgcgcaatggttcaatgagcgcgaagggatgtgcgtcattcctcagaacatcttcgataaggcgccgtcggcggagttgcgtccgggccagaaggatcaggattctttgcccgagtacgatatgctggattcgatccttcatgcgttgattgaagaatcgaagcgggctgaggatattgagctgcccggcgtcacgcctgaagatgtcaatcgtgtgcaatcccttatgcgcaggagtgccttcaagcgccttcaactccccccgctgctgcctgtcggtaaccatgccttcggcgtgcatgtccatatgtaacggatagatcgttgatgcaaaaaaagcctctcgaaatccgggaggcttttttttgatcttatgatcccaaaaacgggataatcaagcgccctttttggctttcgccgcttggcgcagccaagagtaccatttttcgagcccttcgcccgtgcggcaagaaacctcaaagagggccagatccgcattgaggtggcgggcatggcgggcggcaacctctacatcgaaatccacatagggcaggagatcgatcttgttgaggaccatcgcactggcacggttgaaaaggagtgggtatttttcaggcttgtcgtcgccttcggttacgctgagcagggcgatcttggcgtcttcgccgcaatcgaattcgacggggcaaacgaggttccccacgttttcgatgaacaggatatcgatctcgttcagatcgaaagcacctagagcttccatgacaaggttgctgtcgaggtggcagccgccgtccgtattgatctgcacggccttggccccggtggcggcgacgcggcgtgcgtcgttgtccgtctggaggtcgccttcaatgacggccatgcgaaattcggaagccagatccgtaagcgtacgctccagcagagacgttttgcccgcaccaggagagcttatgagattcagggcaaggatgccgtgtttggcgaactgatctttcaggcttgccgccagctttccgttggcttcaagaacattacgaatgacaggtatttccacaataagctcctttattccgcctcgatatgctggacgtacagctcgcggcccgtttccattgaatgcccgtattgctcgccgcaggctggacacggcgcaaagaaatgctctcccttgacggccgggaaagtatgtccgcattgggaacacttgagagtgatgggaacctcttcggtttccagcacagcgccttcgaagtcggttcccgccgtaagcgcctcaaaggcaaaggaaagggcttccgggacgatgttggagagtgctccatatcgtacccgtaccagtagcagacgatggacgtcatgcttttccatctcttcgcggacaatggataacaggcttgtaacgacagacatttcgtgcatggcagaacttctctggttgattcctgggacaaggctcggcagtttttggacagaggcacagggaagaagtgtaggcgaaaaagagtggtgagtccagccggacggatgagaaggggagacttgcttgaccgttgttcctggcgggcgtaggtcacatgaaacgccgtcgggcggtatccttttgaggagggcatgatgcaaaagatcgacgcgcattcgcatgtgggctatttcggcgggtgggccgacgttgggtatacggacgagcagatggtcgccgagatggatcggtacggtatcgaaaagtccgttgtgagctatatggacaatactgtggtggagcaggctgtgaaacgtttccccgatcgctttgtggggattacgtgggccaatccatacgaaggggacaaggccgtcgaaacggtcatccgcgaagtccgtgagcacggttttcaggggattaagctgcatcctcttctcaatgcctttacggctaatgacgccgtggtgcatcctctgatggaagtggcgcaacagatggatttgcccgtattcatccattcggggcatccacctttttcccttccccacagcatcattcagcttgcggaagattttccaaaagtacggatcgtgatggtccacatgggacatggaaacggcatctatattcaggccgccattgatctttccaagaaacacgacaacgtgtacctcgaaacatcgggtatgcccatgcacaccaaaatccgcgaggcctacaatacggtcggtagcgaacgggttttctgggggagcgatgcgccgttccatcattaccgggtggaaatgctgcgaacggaagtctgtggattgccggagagcgctcttgagaatattttttaccgcaatatcaagcggtttttagcactttagtttagagctacaaagaagaaaagccccgcatgacggggctttttctcatcgggaagagaagataagcaggagcgccaatgcggtgaagatgcaggcggtgatccggttgaggatgatctgacctcggatggaagcgttgaaccattcggcaagcctgccgccaaggaatgaaacgcctccgaagacggccagcgtagcgagctggaagaggaggccaagggtgacgatctgaagcgggacattcccgagttccggcttggcaaactgtggaaggaaggcgagaaagaaaagtgtgaccttgggattggtaatgttcatgatcacaccccgccgatacagggcccagtatccgggaaatgtactttgctccagccatgccctggaggcgccgctacggaaagaaagccatgccagatacagcaggtaggccgcccctgcacatttcaggactgtaaaggccatctcggatgtttgaaacagtgccgcaacgccgagggcaacggctgccgtatgcccgaagagcccggtcatcagccctaacgtggtcacgataccggcccgaaagccatacagggccgactgggttaaaacgaaaatgttatcgggtccgggggccagccccatcactatggcggtaacaaaaaacgctccgagggtttcgagaggcagcatgttcacattccctatggcattgatgtgtaatgacaggccgtatctctaatgcctcgaagcggaaaaagcaaatcccaaacgagcggatcagccgagctccatatgccgatgctccacggaaacagtatagtcttgccgtttgagtgcccgcatgagtgcctcagtcatcgccacggaacggtgtttccctcctgtacatcctaaggcgattgtgatgcggtagcgcccctcagcatcataaagaggcagaagaaaagataaaaaatcaataagccgctttttgaattctttacccgaaggttcactgaaaacatattcggctatggcgctctcttttcccgtttgtggccgcagctcttcaacgaagtaggggttggggaggaaacgcagatcaaagacgagatccgcttcgcgggggacgccgtatttgaatccgaaggaaatgagattgaccttgatggtatgaagccgctctagggtgctgttccatttgcgctgaatgatccgccgcaagtcatggatggaaaaggaagatgtgtcgatgaccttatcggcgatttcccggacgggggcaaggcgttccatttcttcgcgtacggcttgttccaaaccgacaccctcccgttcaagcggatggggacggcgggttgtggcatagcgccgcatgatgacggccggatccgcctccagataaaggatctttgtgcggaatcccatgccggacagccgatgcagcgcctgatcaagttcggccatgaactcgctgcgccgctgatcgaaaccgagagctatgccatgagacggctcaacggaggaactttgcagaaggcgtaccatttcgggcatgagttccggaggcaccccgtccgctgtgaacaggcgcatgtcctcgaagacatggagcacagtactttttcccgcgccggagaggccggtgatgatgaaaatcggcttatccgcattcgttttgggacattcagaagcggagtccgtcggcttttccgcggcatgttcaggaaggagaggctgatcatccgtcatggtattttccgtagtaacagtaagcccgtccggtggagactccccggacgggcttgttgaaatcgctttgtgtaccggcacaagccctagaagatgggatctatcagtccaaggttaccgttcttacgccgatagatgacattgatgcgatcattttccgaattcaggaacgtgaggaattcaaagtcatttgcatcaagctgcatggccgcctcgtcggggctcatgggcttgggagaaaaatggtctcgcccggtgatcgtgcgttctccagcttcttccgtcacttcaaatgtgtacacatcgatatcgttagcgcgtcccttacgatggatttccttattacgggaaacgaacttcttgacctgagcttccagcttatcaagaacgaggtcgatggaggcatacatatcttccgagacttcgctggcggcaatgttgatgccgtcaccggtaagctgaacttccacgcgctggcggaacttatcgaccgccatattcacctgcgcatcaagagcgggattcttgccgaagaatcttcccagcttctccatacggcggcgggcatacttacgcaaatgttcagacggctcgaaattcttgaaagtaaaggaaatgtgcatgaagcctcctttggctgataaccggtccgcacagcgaataccgagatatccgcaacggacattgctttgtcaggcatgacttctttacaacagccttttaggggtcctgtcaagggttctcaagcggcctcgaacggctaaaaatgggcctttctcctggaggaggacggaatatccattgccatccggtacttggctaccgttctccgggctatgttcactttcaagtgttccttgagaatttcgccgatgcgttcatcggagagaggatttttaggatcttcctcgctgatgcatttcttgatgagcgccttgacgctctccgaacccacctggcttccgtcatccagctctagcgcgctgttgaaaaagaatttgagttcgtacacgccgaagggcgttgccacatatttgttggtcgtgatgcggctgaccgtggattcgtgcatgttgatatcatcggcgatgtctttcaggataagcggtttgaatttgctgatcccttcctcaaaaaagccgcgctggtgtttcacaatactttcgacgactttgtacaatgtccgctgccgctggtgcaggcttttgataagccacgccgcggaacggattttttcgttgaagtattctttttccttgcttgacgcgttttccgatgcgttatcatacacagggctcaagtgcagattcggtaggccgtcctcattaaggacaatgaggaattccccgtccaccttgtaaacaaagacgtcagggctgacaaaggtggacacgccttcgccaaaactcgctccgggcatgggatcaagggactggatgatatccaaatattccttgagttcatccatatccagccggaatttgcggagcaggggcttgtatctgtgggattccagatcttcaaggtgatcgcgcacgagatcgacaagtacctgatccctgtcatatcccaatgcttttatctggatgaggagacattcttgcggagttcgggcggcgacacctaccggatcgaatagttggatggccttaaggaccgtctccacctcttcgacagtgggccatgctttatctttcgcttcggcggtcgaagtctcgccagcaaaatccgcccgcgccatctccgccatttcctcaagagatgcttgaaggtagccggaagaagaaagatttccgataatgatttcaccgagttctttctggtcatcggagagggaggaaaggcggagctgccacatgaggtggctttcaagagtggggctggaggcatatctggcctccagagaactcatttcttcggggagttcatagtctctgggctggacttgctgcggggtacttgcgaattctccgagatagtcttcccagtcttcggagcgggccacttcccgatcgtatgtaggctcatctcgcggggattccggacggacttctgcgggcggctcgttggatggctcatcctgcatttcttcgaggaacgggttttccagcagctcgcgctggaccgtttccacaagctccaagcgggatagctgcaataggcggatagcctgctgcaattgtggtgtcatcaccagctgttgtgaaagtttaagctgctgtctgagttccaatgccatgcaaatatcccgttgtcataagagtctgtccaacccgcaggtacaccttgtgagaggaggggaaccgacggtaaccgtcaggcgaagagcaacagggcatctttatgccttacatgcagggattatgccacatgcttagggatgttgcaagaacagggacgctttttttctctgttcttttctcggagatgtttattggatgaaaaagaaatgagaaaaagactggttatcgtattcaactcacaaaaaaagatcggtaccggagcacacgatctttttttataatcacagagaatgacggaatatggcgtctcagagcgagaaaccttctccaagatacacgctccgggcctgttcgttattgacgatggtttccggtgtcccggaaagaacgacctgcccctgcaccatgaggtaggcccggtcgcaaatcgtcagtgtttcacggacattgtggtcagagatgagaactccgatcccacgatcgcgcaaggcgcgcaccaaaccttggatatcacccaccgcaagagggtcaatgccggcaaacggttcgtcgagcaggacgaatttcggttcccggataagcgcacgggcgatttccagacgccggcgttctcctccggacaggtgcatggcgtgggatttttccagtcgggtgagaccgaaatcttcaagcaatacatccgccctttctttctgctccttacgggaaaggcccgtatgctccagaataatctgaagattttgacgcaccgtaagttttctgaagacggaactctcctgcgggaggtaagaaatgcccacacgtgcgcgctcatggagcggccacgtgccaatatcttgatcctcaaggagaacccgcccggaagacggtttgatgattccggtcagcatatagaacgaagtggttttgcccgccccgttcgggccgagcagaccgacgatttccccttggttcacttcgggggaaacaccgcgtacgacctcgcgttggccgtaccatttgcgcaagtcaacgccggacaatcgggccatcagcggttcccccggatcggactggagtttttagagccggaaaagacagcttcgacacgcttcttggacccgcccatgacttcgctgcggttttcttccgtaaagtacttgatggtttccccggtaacggtgttttcgccatcagtcaggcgaggatcgccttccatgagaagaacgccgtcatccatcgtataggttgccttcgcgcaagttccgttacggttttcgctcttcatgcgcacattccgttcggcgacgatgcgatcgacgtcaccggctgccattccggcaggcataccgcctttttcgccttctttcttctgggcgtcgcctttgggtggcttcaaataaaccgtgatcctatcggcccatatttcaatgtcgggacgtaccacatggacgtttttatcaaagatgacaagttgcttttcagcaagataggtcaattgatcggatgtgatccgcgtttcaacattcttggcgggttttgggggcgtcaccggcgccgcccacagcggggcggagcagaagaggctcaaactcagtgtggttatacctaaaaaaagttttttcatgatgttttcctagctgtaaaccgttggatctatgacgggcttatttccttgcaggctgaggctattcttgctgtggattggcttgcggttcgcgcggagaaggtgctgcattggcgtttggggcgtcggggcggggcttgagtacgaccagcacgcctcccgaaccatgcatttcgttggtagcaagatcccatgtaaaaaaggtggccgtcccggatgccgtggggctttcaagcgcagcgccctcgggaaaggtcatgaggcgtttattggcgtcgtaattcatacgcgaactggtgatgacgtcatcatagcgagtgatgacgacatcatcccagagcgtgagaaaacgctggttgtcggtgattttccccagctgggcctgcacatcgagaacatcgtcgtcggggttgcttgcggagccttcgccgagcgcataacggacgacgggtttgtccacatcgatcgtgtcaccgttctgggacatatgggcccagctcgctttgagacgccacagctccaagcctttatttccctggaacagattgatccccttgatggccaacccagccacttcctcaagcggattgccggattgcgtggcgttgccttgaagcttcgccccgtcaagggacttaatgccgcccttgttggcgacatcaagcaatctgccgatcagcgttgtttctccgccacgtttcgcgacgtaccaacctccggcgagaagcgccaccagcgcggtaataagcaggattcgtgaacgtttcattccaagcgcatccagtgctcaagcagagcttcccgtttcccttggcaagtcagcagcaagtcgacaaattcccggacggcgccgcatccgccttctttttgcgtcacgaacttcgccagttttttgacgtccggcatggcattcgcgacggcagcgggcagccccacgcgggacattggtgcgagatcgacccaatcatctccaaggtaggcgatttcctgccactcgagggacatccgtttgcgcatcccatccagaatagtacatttgttgtcggccccgccatgatactcggtcacgccaaggacttccagccgtctcacgacacagggcacatccatgcccgacaggacggcgacttcaatacccgccgttttagccagccggatgccgatgccgtcgaggacatggaaccgcttcatgaccagcccgttggcgtcataatagaggccgccgtccgtcatgacgccgtccacatccaggacgagaagccggatgtgcttggcgaggctttcaatcgattcgcgccggggagtgggagagtggccggatatcccggtcccatcggaatagagagtattacaagtcataaggaatgttccatatggctgaaagttgcttcaaaagcgccggaagcttggctacgggccagctgttggggccgtcgcacagggccttgtcgggatccggatggcattccatgaaaatgccgtccactcccgcccctgcggcggcacgggccaatgtgggcacgtgatgccgttcaccgccggagcagctgccttgccctcctggaagctgaacggaatgcgtcgcgtcgaagatcaccgggacgcccaatgcccgcataataggtatggaacggaagtcgaccacgaggttattgtatccgaaagaggagccccgttccgtcaaaaggacgcggtcattgccagcctcggtcactttatcgcgcacggggcccatatcccacggagccacaaactggcctttcttgacgttgacgacgcgccccgtccgcgccgccgccaagagcagatccgtctggcggcataaaaaagcgggaatctgaaggatatctgctacctcacctacaggtccggcctgttcgggcagatggatgtccgtcacaacgggcaaccccgtttcctctttaatccgagccagccactccatgcctttgaccaggcccggaccgcggaaacctttccctgaggtcctgttggccttatcccacgaactcttgaagacggcaaacaatccggcttccttgctggcttcggctacggcatgcgccgtgtccagcgccaattcgaaactttccagggcacaggggcccgcaaaaataaagtggtccttccgaagctgaccatagagttcgtccgatgtcatcatgggcattccttagcgttgaaaggagttctcgcttggagacgaccttgcggtcattccggttttgtcgccggaatgaccgcaaaggaataagcattatggaagggaagtctacttcttgcgagccaggcaagacgcacggatgaagtctttgaacaacggatggggcttcatcgggcgggactggaattcgggatggaactggcagcccaggaaccacgggtgatcggggatttcaacgatttccaccagcgtgccatcgggggactggccgctgaaaaccatgcccatatccgcaaggcgttcccggtaggcgttgttgaattcgtagcggtggcggtggcgttcgttgatattggccgttttgtaggcttcgaaagcgtgcgtcccttccgaaatggcgcagggatacgcgccgaggcgcatggtccctcccttgtcgctttccgcatcgcggcgctccacggcctttttgcggaaatcgtaccattcggtcatcaggtagatgagcttgtccttggcgaacgggttgaattcttcggagttggcttcctcgatgccgacgacgtggcgggcgaattcgatgaccgcgcactgcataccgaggcagatcccgaagaagggcacattgttttcacgggcgtaccggatggattcgattttcccttcgacgccgcggtacccgaagccgccgggcacgaggatgccgtcagcgcctttgaaggtctctgcgacgttttcggcggtcacctcttcggaattcacatagcgcagatccacggcgaccctgttggcgatgccgccatgcaccaaagcttcgtgaaggctcttgtaggcttccttcagttcgacatacttgccgacgatggcgatggtgacccggccctgcggattcttgacgttgtggaccagctcttcccacggctcaagcttggcgttgcgggcgggcaggcgcagcatgatggcgaccttttgatccaacccttcctcatagagtttcaagggcaattcgtagatgttgctcacatccacggcggaaaacacggcatccttgtccacattgcagaacagggcgattttggcgcggaggtcggcggggacgggctcttcgcagcggcagaggatgatgtcaggctggatgccgatcgaacggagctccttgacgctgtgttgcgtgggcttggtcttgtgttctccggcggaacggagatagggcacgagcgtcagatggatgtacaggcaattgtcgcggcccagttcggagcggagctggcggatggcttcaaggaaggggaggccttcgatgtcgcctaccgtgccgccgatttcgatgatggcgacgtcgggagcggggttttcgggctcatccttggcgaggctgaggatggcgtttttgatttcatcagtgatatgggggatcacctgcaccgttccgccgaggtagtcgccgtggcgctccttggtaatgaccttatagtagatggaacccgaggtcgtgttgtttttctgggagagcgccgtattgagatagcgttcgtagtgccccaaatcgaggtccgtctccgccccatcatccgtaacgtacacttcaccgtgctgataagggttcatggttccggggtccacgttgatatagggatcaagtttttggatggttacggtcagcccgcgcgttttcaacagcgcgccgatggaagccgccgaaagccctttgccgagagaggaaaggacgccaccagtgatgaagataaacttggtcttcatgaaaaacctcgagttatgattttcccgccgtgacggaggggatacagtgtacgaaactcgctctgaaacaggatacatcagaaaaggagagaacgcgaacacaaaaagcccgcctgagcgggtcgacatgcggctggttctgtaacaaaagcaacgcctttgattgggaaatgtggggacgctccgtctgttccaaagccgtaattcctctgctcctcagcaggccattcagatgcacgcaaacaatatccgccaactataggccgttttcagaaaaaaaacagccattgactgaaaagaaacacccgcataaagtaaatcccccattccagaccggctccctttttttcttggcgagggaacccaactggatcatgcaggcgcgttatcgctttttcagtaagtaagcttttaatttttatgcaggaaaagggtggacaatgagtcaggtcaacacgctggtcattaccggatacggcaccaactcgcatcaggaaacagcgcatgccgcacgtctggccggtgcggacagggctgatgtggtgcatttttccgacattgtggctgcgaaggtccgcctgagcgagtatcagttccttgttttccccggcggattccttgatggcgacgatctcggggcggcacaggccgcggcacagcgctggctgcatctttccgacgcggaaggccagcctctgctggacagcttgaaccggttcgtcgatgcgggaggcctcgtgctgggaatctgcaacggattccagctgctcgtcaagctcggcgtactccccgcgttggacgggaagcgttttgagcggcaggtttccctcagccataacgactccgcccgctatgaggacagatgggtccagctcaagccgaaccccgacagtccgtgtattttcaccaaaggattggctgtccacggcgtgctgccgatgcctgtccgtcatggcgaaggcaaactcgtagcccgcgatgccgcgaccttgcagcggttgcaggacgaaaacctgattgctttgcagtatacgcatcctgaaacgggcgaagccacgcaggagcatccttggaatcccaacggttctccactggccattgccggcctgacggacccgaccgggcatatcctcggcctgatgccgcaccccgaagcgttccaccacgccaccaaccatcccggctggacgcgcggggaagtcgccgtgcccggaaccgcactctttgcgaacgctgtccggtacctgcgcgagaacccagtcaaccacagctaggatgcgccggttcggcaagacagaggaattggaagcatgaaacagtcggaactcattgcgctcattgaacggacggcaccgctcgcgatcgccgcgccgtgggataagtcgggtgttcaggtcgcttccgcacggcaggatatcaaccgcctcgccgtgtgccttgatccgacgccggaatccatccgcatcgcgttgtccgggggggctgaaatgattttggcccatcatccgttgacgatggaggggcggttcaccgatcggctggacagctaccatgaagtcctttcgctgttgtttcgggccgatgtgccgctgtattcgtcgcatacgtcccttgatgcgaatcctttgggtccggtttcctggttggcggacgagctggggctttgccgcatcccttcttctgacacgaaggatggcgaggcagggcatggaatgcccttgccgctgaccgtgctggaacagacggggacaatggagcggggcggcggttcgtatgcctgcggcttcggcgtcgtcggcgattgtgcggttgacatgaccccggaagatctgaaaaaaatgttggccctatggctggtggggagttgcccccgcttggctggggccttgcctgagcgcatccgccgcattgccatctgccccggatcgggaagttcgcttgcgcctgaggccgctgcatgtggcgcggacttgctcattaccggtgacttgaagtatcataccgcgcttgatcttccccttccagtgctggatgtggggcatttcagccttgaagaagagatgatgcggcgttttgccctgcaattgaaagagaatgtgtctgatgtcgccgtgcagttcgtgcccgcgcaggatcctcttgcgccgttttcccccacagactgaggcgtaatccgttatcagatttcaggagaagagttgtgagcctttatctcgaacaaatccgccaactcgtggcccttcagcgcgtggacgatgccatccattccgtggagatggaactcgaacaggccccgaaagaattggaagatctcaaaaaccgtttcgccgccacgaacacgcagcgcgagcgggtgctggaaaagcttgcgcatttgaaggaacaggaaaagcgcatcaccggcgaacttgatgacgacagcagccgcatcaagaagagcaagaacaagatgatgcaggtatccaactcccgggaatatcaggctatggcccgggaaatggacaatatggaaaaggtgaaccgttcccgtgaagaggaacgcgccgccttgttggaagaaaagctgcatcaggacaacgctctgcaggaagtcgacgctatatgggccgacctcaaggccgagctggaagccaagcagatcagcctcgaaacgcggcaggacgaagcccgcaagcgtttggatgagctggctcaggtgcgttccgaaactggctccgctgtgccgcgtcccgtccttgaccgttatgagttcatccgccgccgtctgtcccatcccgtgatcgtacccgtgactgccggggtctgttccggttgccggatcatgatccccccgcagacgttcattgaactgcagggaggccataagatcatcaattgccccaactgtcagcgcttgatttactgggtggagcacttcaacgaagagaccaaccagacggctgatgaaatggcgcaccacgccgaatagtttttgagttttcgggagccggatggattgtcgccgcgtccgtcgcgtttcggcgtgacggacggagaggaaagtccgggcttcacagggcaggacgctgggtaacgcccagggggagtgatcctcggagagcgccacagaaagcaaaccgccgccttcgggcggtaagggtgaaacggtggggtaagagcccaccagtcggcacggtgacgtgacgagctcggcaagccccgttcgaagcaagaccaaatagggaagcggatcggcccgatcaacgcttccgggtaggttgcttgagggtataggtaactgtgctcctagaggaatgacagtcgccatgccgcccgcaagggcggagtggtacagaacccggcttatagtccgactcccgatttgaggctccggtgacggtttttgcatatgcagacttcaccggggctttctcgcattcagcacacaagtgaggtcattcatggcgtggacacttcttctcgcggcggggcaggggaaccggttggcttcggccacaggggggcttgccaagcaattcttggattggaaaggcgctccgttgtattgggaatcggcgctcgtcttttctcgatgcgcgcgcgtggaggggcttgttttcgtgtttccggaagcgtgcatcgacgaagagcgcgaacgggtagcgagcctgatgcggaatgcgtccctagggattccttggaaggttgtcgctggcggagcgttgcgtcaagactccgtccgaaacggcttgtccgctttgccggatgattgcatggaggtcctgatccacgatgcggcaaggccgtttgtttcgcccgtgctggtcaaccggatactggacgggctgcatggtgaagcttcgggggagtgtgtcgccgcatgtatccccggcattcccgtggtggataccattaaagtgatggatgaagaaaaaaaggtcgttgccacacctgatcggaaacatctgatggcggttcagaccccgcaaggtttttccctcgcttttctgcgggctgcccatcagcgtgcggaacaggaaggctgggttgtcactgacgacgccagtttgcttgaactgtgcggacacgccgtgcatgtcgcggagggagaagcgggaaacaaaaaaattaccacgcccgaggatttggaaatgttgcggatgacaggagagcgtatcccgtgtgtcggttacgggtatgatgtccataagtatgctgatggcaatgaagcgagacagcctgcccggcctatgcggttggggggggtgcccattgccggttcgccggatgtgctggcccattccgatggagatgtcttactgcacgcgttgatggatgccttgcttgggtgtatcggggcgggggatatcggaacattcttccctgattccgatcctgcactcgacaatgtcaattcggctgtgttgctggacacggttctggaacacgtccggaaggccaatgtacacattacccatgtcgatctgactgtcattgctcagattcccaaagtcggcccgcatagggaaatgattcggcggaatgtggcaaggctgctcgggttggacatgggagcggtaaatgtgaaggcgacgacggaggaagggcttggttttacaggtgaacggctggggataaaggccgtcgccgtggttacggggcttcgtggcaatagagatgcataaaacttaaaattatgtaaaatttaatatcccgacaagtatactgaaaataacagataaccctctgggttgaatgaaagttccatgtcgttcttgtaaaactttgtatgttggtgtaacaagcagtacgggccctttccgtggggtaattctaacctttttcgcatcgtgagccgttatgagcgaccttcagcagggcatggactgtccttggttttcttcttacgacaaaggtgtgccgcatgacatagtcatccccgagggagggctgcaaaatattctcgacactgcggcggaaacatacggacagcgtgaagccatcgtctttcaaaatacgcatatttcctatagggaattgaaagaattagctgaaaaactggccgcttcgctccggcggcgcggggtcaggccgggagatcgcgtttccatcatgctcccgaatctccctcagacattcatcgcattctggggtgtcatgaaggccggagcggtcgccgtcatgaccaaccctctctatatggaatccgagctgacgcatcagatcaaggattccggcgcaaaacatctcatcacccttgatattttttggcccaagatcgcggctctgcgggaacagctcgaactggacgtctgttatgtgacgcgtgtccgtgatgcgctgaaatttcccttgagctggctgcagccgttttcggcccggcggcagggtacatgggttcccgttccgtttgacggaaaagaggtcgtagcgtggaaggaccttttcaaaacgaccgagcgcctgagcgtggaagtggcggatgctcatgagaccatcgccttgttgcagtacacgggggggaccacggggctttccaagggggccatgctgacccacgcgaacctattggccaaccttacccagctgatggcgatcattcagcagcccccggaaaaggaacatgtgtttctggccctgttgcctttgttccatgtgttcggtttgacgattacattgttgttgcccgcaaggatggccgcacgagtggtccccatgccgcggtatgtccccgccgacatgttggaggcattcaaaaagtaccagttcacggcgttcatcggcgctccttccgtctatatttccctgttgcagcagaaaaatctggcccagtacgatctgcaccatatcatattctgtatttcgggatcagcccccatgcctgtcgaatggctgaagaaatttgaagaagtgacgggcacgcccattacggaaggctttgggctgaccgaggcttcgcccgttacccatgccaaccccgtgtttgggaagcagaagccgggttccataggtgtgccggttcccggaaccctcgcccgtattgtcgacacggaagacggtgaaagggttttggctcacaatgagatcggggagttggtcatcaaggggccgcaagttatgaagggctattggaaccgcccggaagaaaccgcccggaccatccgcgacggctggctgtacaccggcgatatcgcctacatggatgaagaaggttatttctacattgtcgaccgtaaaaaggatttgatcatcgttggtggttataacgtctatcctcgtgaaatcgatgaagtcctccacacgcaccccaaaattcgggaagccgttaccgtgggcgttaatcaccgctcccgtggtgaaaccgtcaaggcgtatatcgtcccggaggaaggggcgaatctgaccgtaccggaagtcgtggccttctgtcgccagaaactggcttccttcaaggtgcctcgcttgatcgaattccgtgaggaactgccgaagacgatggtcggcaaagtgttgcggcgcatcctgcgggaagaggaactgcacaagagcgacacggaacaggataaagaacagcttgtccccgaagaaacctcgaaggaagaggtttccgctccggaggctggaatcggagaaaaggaagcaaaaacgcagggcgaacccgagaagacggacggaaacgcatgagactgcttcttcaacgggtccgtgagggaaaagtcaccattgaaggtcagaacgtggcatccatcggcaagggcttggttgtcctcgttggttttggcccggaggatacgattgatctgcgcggcggcaagctctggaatacgctgatcgaaaagatggtggggctccgcatttttcctgatgatgaggggaagatgaacagagggatagaggaagccggcggagaaatcattctggtttcccagttcacgctgtatgcggactcccgaaaagggcggcgcccctcgttccacctgtcggcgcctccgggcgtggcggaaccattgtttcagcattttgtggaagatgtgcgatccaggctgccgggacgagtccagcagggtgtgttcgctgcggacatggacgtttccctcacaaattgggggccggtaacgctcttgttggactcggcggatttttagcggataagcgaatgtgacagctcaaaacaaaaaggacggctcgttgaaacgccgtcctttttgttttgagtgattgggagatggcagcggttacgctttgaaaagctgggtggagagatagcgctcgccggtgtcgggcagaaccgtcacaatgcgctttcctttccattccggtctgttcgccagaagaagcgccgccgcgacgttggcgccggatgaaatgccgcaggaaatgccctcttccgtcatgacgcgccgggccattttgatggcttctaggccggggataggcagcacttcggtcagcagggagcgatccagcaacgcgggaacgaaaccggcgccaatgccttgaataaggtgcggccctgcgggattgcccgaaaggacggccgattccgcaggctcgacagcgaacagccccaccgagggaaggtgttcgcgcaggtagcgccctgtccccgtgatggttccgcctgtgccgacgcccgcaacaaaggcatccaccgtttcggcgtccgagaggatttccggacccgtcgtgcgatagtgcgcttccgcattatccggattggagaactgatccagaagtacatagcctttcgtggcggccagccgctgggcttcctcaacggccccgcccatacccttcgcggcgggggtgagaatgagttccgccccaaaaccgcggagcagggctttgcgttcgtcactcatggattccggcatggtcaggataagcttgaaccccatgcatgtggatacgaccgccaagccgatgccggtgtttccgctggtcggttcgacaatggttccgttcggcttgagggtgcccttttcgagagccccctgaatcatacggagggcggcacggtctttgatggagcctcccgggttgcgggattcgactttgaccagaatctccgcgtcaagacctgcggtcagtttggcgagccgtatcagcggcgtttttccgatgctctgcaacagatccataacgtttccttttgctccgagagcaggttacaggacggaatgatatattttttccaattcgacacatcgcgcttcgacggagtagctttgccctctgcgggcgctgttcgctccccacagtttccggcgctcaggatcagaggccatttcctgtaaggctcgcgttaaggcttccgtatcatccggcggaaccagcagcccattattttgagctatttcaggaactccgcccactgtcgccgccactatgggcaaccccatgcggatggcttcgagaagcgtattgggagccgagtccatattctttgaagggaagacaaatgcatcggctagttggaggtaatcgctgacgcgttcggtctgccctatgagacggactttttctcggattcccagcgtatcgcagagaggaagccagagatcggggttggctcccaccatgaccagatacgcgtcaaggcaagcggaggaaaaagccttcagaagcggttctatccccttggcaggattattgtttcccacataggtaaagataagggcttgctcggggatgtccagttcctgttttacggcggaggcggggcgcgtgggaatcacgcgatcatcgggaatgccgtttgggatgacgtggattttgtgcttggggcaacaccagctgattgcccgggcacaggcttccgaattgggaaggaaggccttcattgaaggcgaaaggtaggggaggggattacccgggcggtatatgacgccgcgatgtgcgacgcaggccagcttccggttccgccaaaacaggccccaccatgcaacgcgttttacagccttattgtgaaaggcgtgaacgatggtcggcgtatccggcgaggggaagaggctttccacataggcacggtgttgcgccggatcttccggcaacatattccagaggggattggatgccgcattgggcaattcccagagcgtcgaatcatgggggagacagagtgccacatcatggccccgttcgctcaacccctgggcttgatagactgcttggcgtgtaccgccgctgcggttgctggacgaggtaatgatgattacgcgcatgacgtcctctctttcggagcgctgtgtgtgaaaacgcgtttgctcagataagatggcgaaagatatcggtataggtgttccgcatgagcagggccagcttgagccgctgtgccgcagtgtctccaggcttgcgccggaagagggaaacgatatgcccgcttacggtcgtaaagtccgtatcgccgcgctccccgaatttgtcgatatacgatcgcacgaggagatcaaaggagttggcctgttcccgttctttattggtatgtgcctgttcgtatagcccaagcatgaaacgttcgaagaggaactcgccatcggaggggaatgagcgtttcagcccaagacgccagaggccgatgcccatggcgcgcagttcccggatggcccgttttc

SEQ ID NO: 7569 - DNA, 4999 bp, Unknown
  gut microbiota DNA sequence
caatggatgtcccgcccccctgtgccgctacagcccggatggtgccacggtgatcggcgatgatggatttgacaatggctaaccccagtcccgtgccccctttcttgcgggaaaagtagggctcaaacatacgttcccgttcttccggctgcaatcccgggccattatcggaaatgatgagcctgaggctgccacgtccccggtcgtggacagccgtaatgcgcacccgcttggtggcttcgggcggcagggtatccagcgcttccgcagcattggtaaagatattcagcaaggcacggtgcaatgccgcgggatccaaagctatcttgggcaggcgttcgggcagatgcaaatcccacatgacgctgctgtggcttgtacggaagagcgttgtgagttcgtccaacaggggggcgacatcgtctggtgaaagctgcacttccggaagcttcgcaaaagaggaaaactcctgcaccatttcctgcagccgctcgacttgtttgacgataagatcggtacattgaccaaatgccggatcttctatctgtttgccgaattttctatccaaacgctgcgccgatagcttgattggagtaagcgggttcttgatctcatgggcgatgcgcttggcgacttcgcgccatgcggccatccgctgcattttctcgagttccgtaatatcttcaacaacaatgacatatgcccggatgccgccaggcccggagagcgcaaccgcgtgcaatatgagcttccagctccgatccccaagcagaaaatcttcctggcgcttccaattttgctcggggtgttcgcgtagcgtttcaagcatggaaacaaaaatattggagtagcttctgggaagaaattccgcggggtttctcccttcgagcctttcgggctgggcatcaaaaatggaacttgccgctttgttcattgtccggatgcgcccatccgcatccaacgtgatgacgcccgtggtgatattgtcgagcaccgtttcgatatagcgattgtgctcggccagcatcgcgttggcatgggtcaggctcatccggccttcttggagatctttagccatatggttaaaggactgtacaagaagccccagctcatcagcgcctttatcctcgagacggaaatcgagatcgccttgcgcaatgcgcgtggtcccttgcgccaaagccaaaatgggggccgtgaactctttggacaggcggaagccaaaccagacggaaccgaagatggtgatcattcccagcacgcccaaaataagcaaaaaagaaaccttgagcggctttttgagctgcttcagctgagcgtattcttcgaagccctttgaaatccgttcgagtttggccagcaagccctgcccaatgctctccgccgtgatcaggtagccggttttgcctccatcaatcgccaaaacgccgataacgtaatcggcatcatccgttgcccagagcaaggagccgaaggtcgccctggccacatgggtccaatcgattcgcgtgcgtgcttcctgccatccctcggtaaaggctttgggggcgtgccaatacagttccttctcctgcggcgtgacaaagcctaccagggtaaggccgtattctttttgctttgtttgaagaagcgtgttggcgctggaggccgtccaagcgatgcgcctttgtgcggcttcctgagcgatcgcctcggaacggctgtgcaaacgttccgccgctgccgcataaaaactttgccccacatcaagggccgcctggagggatgtttccgtctgccgggtaaaccagtagtcaacgctggttgcgacgacacggttggatgccagaaacatgatgactgtaggaatcagagaaagagaaacaaaaacgacgacaaggcgggtacggatttgggcgccgaaaacttttctgcgccgctccatgatcagctttacgacattccgggcgacaaggaacaggatgatgagcatgaagatggagttgatgttcagcaaggcgatgaacatccatgagtccacgccataaagcgtgagctgcgtccatgttccccccaacaccaacaacagcagaagaaaggccgccaagagttcataacgcctgcggcgccgttcccgttcatcaggaacgccaatctggacaaccttctcctgttccgtcatgcgtgccccccagccttagaaaataaagtcctgagaaaaagataagggcggagtgacttcccatgaccagaaaaagagagctttttccagccacggcggaacttcggcgtgttccagagtgatcttgagctggacgcgataggtctccccggaaacgagcggcgcctgcaaaggaaggagaaaatccagatgctgaaaagctgaggcgagcagggtatcaaactgcttttgccgcacaatggggtgccccggagacgacaaaatgaactcgcgggaaagcaaatcatggcgcaactggtatgagcgcgattcctcggaaatgacttcgttggagagcagggtgcgcacacgctcaagagcaagtttgcaagtcagtgtcattacggcgccatcccgcagctgggaccggaccactccgccgttttccagccctattcccgtactgacatgcacgccgtcgttaagcatctcaatcgtaaaagtacgtaattccagctttggtgtctgcccattagagagtgatccgtctgacgttttgagttcgacggacgtgcggctcccccgttcctcccctgacgctgatcgggcatgggcttccgcaaggaaaaagagcagaagggccagaatcaggcaggccgaaaaaccgtatggtatgcgctggggtaatgacatagggcaaatgctgttgaagatgtagagcctgaaacggacgataaaaaacacaaacactgttgtttggcacaggaaccaaaacttggcaagctcggtggaggcacgccgtcccaaaagaaaatgacaagacacgagaaaagagccttgtcagcggttaaaaactggctatataatcggcagtcatacacggcacgacgtcagaatggagttatccccttatgcctatgtacgatttttattgctcttcctgctcttgcgagtttgaagacatggtcggccccgatgaagcctgtccgccttgccccaattgcggaagtgcagacaccgaacggctgctttcggccgcaaacctgaaacacggggcgaagcctttcaaggtgggtcctgtccggccaatgcctcccaaacccttgcgcggaggcggcccttgcgggggcggaggctgtggcggctgcggtatgtagccaaaagccgcttgtatcgatgatacaggcggtttttttacggaaaaaaggccccggacgtgttctgtccatccttttgcgttcgtaccatgccgcatggctcctgtaaataaagggaggggcgaggggacagcgtttgggcggggcgaatgtcttttttgaagcgattttccaacacaatatactgaaaaacaaaggcgatccggaaggatcgcctttgtttcatgcgtaccgtttcaatcaggcatacatttgatcgatggtcgcctttacagcccgatgatgctcggtatcggaatatacagaggcataccgctcattgatggctgagaaccaatcaaggatatcttcactcaacagcgcaaaatcagaggaataaacgccgtcgaacatcaggttcttcacaaactggttccccggatcgacgatttcgatgaaccggacttgcttccagagatttaccattttttgtcttcttgaaatcatgtctcctgcccctcgcagttattgtgagttagttcctgttcgcattactataggatttcctcctgaaagggaacccttcaccacgggatggggcaagaatttcgctttggaaaagagaatctattttattgatagatggataacgttgccgcataccgccgcatcatgcgaaaagagccgagtcgagggtggggtggcgaaagacaaacccatgctccagcagacggacaggagatgccttttgtccggcaaggagcagttcatcggccatatcgccgaaaccgagccgcaaaagaggcgaggggacgggaagccatacgggccttttcagcacttttccgagggattgcacaaaatcattcatggtactgtgctcaggggccacaaggttgaaggggccgctcagctcttcatgatcgagtaaaaaaagaatcgcggctacttcatcgtcaagatgaatccaagcgaacggctgccttcctgtccccaccggccctccaagcccaagctgaaacaccgggagcagcttggcaagcatacctccacccaatcccaacacgggcgctgtccggatgatgcaccggcggagtcccaaatgctccgcctgctgtgttgaacgttcccattggatggtggtggtcgccaaaaaacctgaaccggcgggactgtcttcggtacagtcgggagccgaagcgttttcgggccagaatccataataaccgattgccgaagcctgtatcaagactttgggttttacgattggcatttgcagcgcgataacgagcgcctgccccgcgagaagccttgagctgatgatgcgttctttttgtacagaactccaacgtttcgccgcgatgttttcaccaagcaaattaatgacggcatcggccccattgaggagttggctcaggctggagtgatcctgcccatcccataactggtattcggggccggtggagggcgttgcggctgggacatgccgagtcggaacaaccacctcatcgccacgggaaatgagcgcctgcgtcagggctctacctatgaagccggaaccacccaagataatgacccgcatacagcactcctcatcgaaactgatatccctcagcgataatgaaaatgaggggagctttatatgattacttcggcggatacaaaaaaagccgggctgtgtcccggctctcggctgtggagagaggttatttcatctgaagaa

SEQ ID NO: 7570 - DNA, 1454 bp, Unknown
  gut microbiota DNA sequence
cacgcagaatctcgggaacctgctcgtcgcccagcagggtgaggtattccgtgacgtgctggtgataggggcggttcttgaggaaactgatgcgggcctgccgccagcggggcttgccctgggggtcgagaatctcccgcgtcgaggactcgccgggcgagagctcgttgcgctcgatgagtttgtcgagcagctcctgtttctcctcccgggcatggtagaaattcttgtcggcgaaataggtctcgattgccttttcgacttgctgtttgtcgaagcagcggatcgcctcgctgatgttgaaaacgatgcgggcggcattgcggtccctgacatatacgtcgatgagcacggagatgaacgcctcgtcgccgatacgtcccatacgtgtgacggcgatacggcgcaggaactcgaagcggtcgtaggcggccagcatcagcgcctgcttgtattcggggccgttgagcgactcgagcagccggaaggcgttgtaacgcacgacgctgtaaggcgactcggagcacttgtcgagcaggatggcgggcagctgcgggtagtcgttttcccaaagccggatcatcgccaggttctggatgtcgggtatggcattgtcgagttgtccgagccagaagccgttgttgcgcttcagcgccatcgaattgatgtcgagttcgggatgggcggccttgaagcggtaggtcgggtcgccgatcacgtgcgactcgaggatgtggatgttcttggcccaggcgccgatgcgcagcccttcgcccagcagtcccagcaggtcgaaagccgacttgtcctgaagcacgttgacgctgttggcgaacgtcgtgacgcagcgtcccggagccatgatgtagtgtcctgcgatgaaatcgtcctcgcggtagtcgccgttgtagcaggcgtcgaagaccacgaagcgggcattcggggcgatggcttcgacctcttcgaggatgatgcccgtgcgcaggtcggcgatcgagtcgagacggagcatttcgggctcctcggcccggttgtaccacgtggaatcgagtcctttctccgcggcgcgtttggcggccgattcccggccgctgccgggacggcgggccagttcgcgcaggctgcgctgcatctcggcggcggcatcttcggccgattccacatagggcgtccccgaaaggtactgccggtggggcattccgtgttcgtggaagaccatcatgtccacgtcgtcgcggcggacctcgcggatgagcgactccttgacgaagggctgcatcgagtaacgcaggaatttggcgttgtgggtgcggctgaacacgttgccgaactgctcgtcgagcagctgctgttcatcgcgccaggcgatgagcgaattggagtaggagccgtggcccgtgtaggagacgaactggtcgaaaggcgtcgcgtcgcggtgttcggccacggctttc

SEQ ID NO: 7571 - DNA, 148 bp, Unknown
  gut microbiota DNA sequence
gcgtgaagctcagggtgcccgtgagcgcggcctcgccgtcggcaaccgtcgtctgcgtggtgtccagcatgctcagcaccggcgcgtcgtcaagcgcgtccacggtgatttggccggtcgccgtgccgcccgtggtcgtgatgctcac

SEQ ID NO: 7572 - DNA, 839 bp, Unknown
  gut microbiota DNA sequence
gggaggacatggagctggctcagcgctgcgggggtcgtccggccatcgcgctggtcaataaggaggacaagcccacccggttcgacgccgatctcatcgcaccctattttgcgatggtgctgccggtctgctgtcaggaagagggagcgcggaaggtgatcgcagcggcggtagcccgcctgctggggaccaaccaaatcgacccccacgccgccagcctctcgggacagcggcagctttccgctgccacccgcgctcgggatgccgtagccggagcgctggacgctgcgcagggactcgggctggatgccgtgtcggtctgcgtggacgacgcgctggatgcactttgtgagctgacaggggagaacgcctcggaggcggtcattaacgaggtatttgagcggttctgtgtgggaaagtaaggacagtatcgttgcgcgcctgtgcgcggggcagagcgcttttacgttaagtggaattgttctcttttgatgtcaaaagagaaccagaaaaccaccagcgatttcgacgcgctggatccacgagaaaggggctgctcgcccctttcagaccccaaaggagaagtcgaaacggaaaaaagctagccgcttcgctaaacgcttttttctcgtttctccgatttacggcttcgccgaagattttatgttgcaaatagaggaaagtatgaaccatttaggagactacgacgttatcgtcatcggtgccggacatgcgggcattgaggcggcccatgctgccgcgatactgggcgcaaagacggcggtgttcactatgagcttggacgccatcggcaatatgccctgcaaccccagcatcgg

SEQ ID NO: 7573 - DNA, 5015 bp, Unknown
  gut microbiota DNA sequence
ctgtaccggtgcttagacagcggtacagcgggacacctgaaaaatggtcaagcgagaccttccagttttcttttcaatctgtggacagacgattttgattttcccatctcctcggcgcagtcacgaatgctgtatccctcgccgagcagccttttcaattcctccagttccacatcttcaatgtcccgaacccgccaatgcagggcattgccttcggtaatcaggttggcctcaaagggtttggcgtcatcgcccaatatgccccgcgccttggtcagatggacctcaaaacgggctccttcggccatgctgtattccctgggcctgcgcagactgatcaccgtgtccataatgtcttctctggcgctggtgccgcgctggtcgccggattttccggcatgatggataagcaggacggtcatccctctgcgacgtaattccagcagccacgcctgcatggtctgccatgactgagactcgttttccttgccggtgcggcacaaggttgcgatgttgtccagcacaaccatgtccacgtctttcagaaacggctcaatcatggcctgtccgccagctgtggacaaatccggcatggggcagggctgcaaatccggtgtgatgagcgccatgtttttcaacgtatgcgggggaatggacatgccgttgacaagagcggaaaggcggttctgcatggaagtggcgggcatttccccatccacatacagcgttcgcttgggcatcggcgcacgccagttgaacacggctccgccggaagccaccgcaacagcgatgctcaacgcggcgaatgtcttgcctatgccgcgcggggcgtacagaatgcctatgccctgtaccggaagaacgggcgataaaagatacccccgttcaggtatggacatggaaagaaattcgcccatgtccagagcgataagaccttgctgtttggtcagcgctgtttccagttgcgagcggacggcctcaatgccttctatctggtgaagatcattaaaatccgtaccgttgtcgtcggtgaagtggggaaacagaagctgagcgtttgcgagtccggccgcttcctctcctctcttgcgtccggcttcgtcattgtcgccgcagataatgattgccctgtctgtgaatcggtctcttgccggtttggcgaccacgggcatattgttggcggagaaagccacatggaccgtccagccagtggcaagatggatgcttgcgccagtggcaaagccttcgcagatggctatcggcttttccggctgcccctgaatgatgaattgtcctccagataccttgccgccaacgaggaaacgcttggttccatcagggtagatgcgttgcaggctttgcagattatctgcggtatccagaacgggaataagcagcgcaccgtcccgtgcctgccgtatgccttccaaagccggaatgcccttgctgcgtagatagggatggttggcgtcgcacattagtgccgagttccattcctgtctggccagttgagctgcttcagcatggcgttcggcatattccgcttcgcgttgccgctgtatggagtgttgacgttcccgccatgcggaaagttcagacacggaaagcgtttgcttttcttctgtgcagaacgtgccctgttcaccattttcccagttgcaccaccaaagtgtcgcagggatatcgacatgcgcgatatatgcgccgttttgtttatgcggtttggtctgggtaggacaacgatgcagttttccgtccgccatgatttcggccggaatcaatcccttgtcggtcaggatgtcccgaaagatttgcaggggattactcatgattctctccctgacggccgaggtttttgataaatgcggcaatgtcctccgcccgccagactgttgtacggggaccaagtttcacgggtttgggataacgtccggtgcgacatccctcccaccatgcgctcttgcttatgggaattatgctgagaacctgaggcagacgcagaaggccgtgaacggggatgggagcttgatgctgtttcataaaaaaatctcctgaatctggttggatttcaggagaatctggcacacgtcaaacgattcccgtgagggaatcggacgggaaaatgacgggaaaatctaaaaaagacgggaaaacgacaggctggtcatgccttgactatggagtatccattcgttctcttgagaagattgtccaccatattacgataggatttttcgtccctgtactcttttttcgcaagcaggcgacccacatgtgtcttccgccccactgaggcattatggtctgtcccggatgattgggagccgcaccagtacagcagaacgtaggcgatcacctcaaggggatacttctctttcatggcgtcacggacagccgcatccggccttccttcccaaacggctccgggaatacgaaaaacgagttttccatcctgtggcgacctttcacataggggaactgctgccgctttgtcggcaacggacgattccggcggagctgcccgtaaaagggattccacaagggcgcgggtgatgccttttacttcccggcgcaggggataatagcagagatgcctgatggcggcgtccctgtccaccattatggtatcggcaaagatatgcgcaatgaagtggtaacttgaaactggaatggagcataccggcttctcaaacagcatcgagtccgacgaatactgctcgaagattttttctgtgttcagtctatccagactgttgaacagaacttctcgttcctttggaaatacagacgccgtatcttcaaaggattcttcaagaataacatccagtccatatcgcagggagttaagaggaacaactgtcgatatcattctgaaaaattccatcacgtcaaagccgagcagatacgtctgaatgcctgtatccggttctggagctgaaggaaattccggtatctgcgttccatatgcggcgtgactgccagcaataaatgcctgccagcaggattcatacgttgtacgccataattccagtggctgaacggcgtcaggccagagtgcctgaacaagcatttcaccttctctggctgtcaggccatacgcctgccgtactctgcctatggtaatgttctgccggtctgtcatagaggaaaggataccctgtcgcccaaaaatggacaataaaaaacagcggcagggatagtcatgtaccttccgtgccgctgtttactggaaacaggcgttatcagctataccacgcccggattatatccatgtcgtcatagccgtattgtctcatacgttccttttcttcctcgctccagccggtgtcgttgctcgtcacctgcgtctcgtcttctattttcccgatggagatacaaacatcacggtcggtcatggtgtcctctttcatgcttcctccctgattcttttctgttgtgtgttgcgtaatccgtccaggtagtcagcccatgcctgcatcatctttcgacgctcaggcagatattccgcgtaattgtatgccgcccgcacttcgtcctgctcgccgtgagcaagctgccgctcaatccagtcccggttatagccgagttcattgagcagtgtggaagcgatggaacggaaaccatgtacgctcatctcgtgtttctgatagcccatacgccggagcgcattgagcatggtcgcatcggaaatggaccgtgcttctgtgcggatagaagggaagaggtatttcccttccccggagcatttctgaagttcccgaagaatggacatcgcctgccgggacagggggacaagatgctgacggcgcattttcatgcgttccgcagggatgcgccattccccggcctcaaggtcgaattctttccattgagcggcccgcaattccgtgggacgggtgaagaccagcggagccagcttcaaggcacagaccagagggaaatagccttcataggcgtcgatatcccgcagaagctgaccgactttctccggttccagcactgccgcccggtgaacagtttttcgcggtcgcaaggctccccgcagatcggctgcgacattgtgtttcgcccggcccgtgatgaccgcatagcggaacacctgactgatgatttgcaatactctccgggaagtctcgtagtttcccctctgttccagaggcttgacgacctccataacgtcccgtgtctcaagtttggcgatatgcgtcttgccgatggccggaaaaatgtaggtctccagccggtacatgacagttccctgatgcttttcggaaaactctgccatacgggtttcatgccattctctggcgatattctggaagctgtcgcgttccgcgatggctctggcctgccgtaactgccgtttatggtctgagggatcgattcccttggacaacatgcgtttcgcctcttcgcggcgttctctggcgtctttgagcgatatggtgggatattccccgaaactgagcagcttgctcttgccgtcaaaacggtaggccatcctccagagcttgcttccgttggcgggaacgaaaagaaacagaccgccgccatcgaaatatttacgaggcttcacgtcgggtttcagactgcggatgtgggtatcggtaagaggcatgggcactccttggctgtcgttggacgaagagatacccacatggataaaaatattttaattccgcgcggttattcatgtaggtatcggaaatgtcgtaccacatttctacctacggatatacccataaaatgattggatgcaagcggacgaggctggacttcgggaaaccataccggaaagaaaaaacaaagaatgccaaggccttttggaccttggcattcttctttgtacctaaatttggcgtccccaagcggatttgaaccgctgttgacggcgtgaaaggccgctgtcctgggccggctagacgatggggacgtctgggtgcgtgttggctgggctacgtggacttgaaccacgattaacgggaccagaatccgtcgtcctgccaattgaacga

SEQ ID NO: 7574 - DNA, 24532 bp, Unknown
  gut microbiota DNA sequence
gcgcagaaagctgtttagtaaaaacacccctcactgtcaacaaaaaaagaggcacttcagaagaaaaagttttctgacaatatttttatgtgttattttatataattagatactggcctaaaaacttgtgtcgatgagggtatagggaggcagtgcgcaggggggtacggagccacgtccggtatgctgatttggcaggtcacttgacatcagcgggcatggcattgcagtattacccggtggacattcccatacgaacacgcctcgttttgctcctcgccatcgtcatggctgggggctttctcttttttccgtcgcagggaacttctctttcctccgattcgttttattccgccgcggtgtttccgtgtacggaaaacaccccagagccttgcccggttcctctcgtcttgtcgcctgaggaggcttccttcgggggggaagcgttttggagccttccggagcaggggagggcggcatatactccttatgaacgttccacccccggtacgtcccgtttggaacgggggcacgccttcagctcattcgtggcgttgtcgggcaacagtttctgcccgggaatactcctgcggcgaggcaacgttttatcagccgtttccatactcccccgtggatgggtttcttgtcacgcttgtccccgttcgcctccggcggtttgaacgtccagactggtctagtcctttttgttcaatcgcaacggcgttctccatattctggggaaggagcgtatatgtttcttgatttttcgtgggtggcagaacccacggcttggggcgggttgggcacccttatcctgcttgaagtagtgctcggcatcgataaccttgtttttatttccattttatcctcgcggttaccggaagataagcgcaggcacgcgtttaccattggcctttcccttgccctgatcatgcgtctgggattgctttccacggttgcatggctgatcgggctcacgaaaccgtggttttccctttttggctattcgtttacggcccgggacattatcctgcttatcggcggcctgtttcttttgttgaaagggactatggaactccacgagcggctggaagggtttcagcccacggaagagaaagccgttcaccaagccgtgttttggcaggtcatcacccagatcgtggtgctcgacgccatattctctttggattcaatcatcacgtccgtaggcatggtgaaggaactctccatcatgatgctggccgtcatcatcgccgttctggcgatgctgttggcttcgcgcccgttgacggagtttgtggacaggcatcccacggtcatcattttgtgcctcggcttcttgctgatgatcggcctgagccttattctggaagggctgggctatcatattcccaagggatacctctacgcggccatcggtttttcgattgttgtggaagccttcaaccagctggcgctacggaaccgaaggaacaggatcacaacgcgcggattgcgtgagtccgccgccagagcggttttggagctgctgggcggaaccacgatccccggcggcgaaacggaaatggaaatggccgcgctgggctactccgattgccgggacaaggtgttcaggccggaagagcgggccattgtcgcgcgggtcatccgttttggcgggcggaccgtgcggtacattatgacgccccgccataaggtgcagtggctcgacagcaacgagtcgccggaagccctcctcaagctcgtcggcgcatcgaaacacgcattccttccggtcatgtgcggggataccgacgaagtgctcggcgtcgtggatctgcgcgagctgctgtggcgctaccagaagaccggtcgtttttcgcttgaggcctccgtggtccccgtccccatggttttcgagcataccgggcttcccgatgtgctggacgccttcaggcagcacccggctccgatgggcatcgttctggacgaatacgggagcgccgtgggcgttgtgacgcctatggacatcttgtccgccatcgccgggcatatgggggatgtggcccccgagcctgattccttccgtcagcctgacggctcatggctgcttcccggacgtatggccgtggacgaggggctgcatacgttgggcatccagccggaagaggagctgagctgcgccactatggccgggttgctgcttgagcgtctggggcatatccccgctgcgggggagagcctgtttttctgggggcacttgtggacggtcgcgtccatggacggcctgcgtattgatcaaatccgcattcatccacagcgttcaggggacattacggaaaaaagtgaataaaaatacgtggattgattttgccatgagacgactatggatttctttgcgagaacagtttaggttagggcgattctaaaaaggaaaacccttcccaagcgcttcggattgctttttaagcgcggaatcctgttttttgagagaaaatacctctttggaggattgtgcggcgtggcgtttcttttcaaacgagtctggcgactgtgtcgtccggcgctgccgtgaagaggaacgctacaccaacacagaggaatcggaatgaaacggaatctcttacaatgcatggcccgggtgctgctgttgcccgtggctctgatgttcatatgtggggtgctggtttccgctcatgcggaatattccggccccaaagtgcgctttcggctggcgcatccgtgtccgccggggcatcacactagcttggccttcgaaaagttcgcggaattggtcgcccaaaaatcaaaaaacaagatcaaggtgcatgttttccccaatgccgttctggggagcgatgtcgtcatgctcaaaggcgcgctgaccggcgggctcgaaatggcggtcagctccagcccgaacctgacttgggtggtgccgtcgctcatggttttcgatctgccgtacatcacaagcgtcaagtatcagaagaacttgtatgaggcgttggataacggtgagcttggccggtatttcaagggaaaattcaatgaagtcggcctagaaccgatcatgtactgcgaatacggctaccgggatttcttcagcgttaaaaagccgatccgttccgtcggggatctggcgggcattcaggtccgcacgacggcttccgccgtcgaggtcgaagtggcgaaagcccttggcatgaagccgaaaccgttggcgtggggtgaaacctataccgcgctcaaggaaggcatcgtagagggtgaaggcaacacgttttctttcctgctcgacgcggagcatgaggatatccttaagtacgccttcgcatcacaacacaattacagtatgcagatcctgagcgccaacaagaaatggtgggaagaacttgatccgcaggtccggagcatcatccgtgaagcggccgccgaggcattgaagtaccagcgggaagtcttggccccgcagtcggaagaggaggctgtcaagcggtttatggctgatggccttgaggtttccaaaccttcggaggccgagcttgaggagctgaaacggaaaacgcgtcccgtttggaaccttttttcggacacgttgtcacaggaactcattgaccttgtggtagccactcagcagtaagctggttttgcttacaggagagagtatgaaagaggacttgtcctttttgcgctcttgtacttaagccataaggctattactctaaagagaggcggggggccggggagccccgttgtttgctgctatgccccggaactgccccggcgggtgatgaatcgccagggcgtttgctgcagagtatgacaaagaagccgaaattcttttttaccttacatctgtttttttgagtttttggttgaaatcgttgtcttccgtgaaaatggatggcaaaaatctgcttggcagatcagtgtcctttttatggtcggttcaggccggaaggtgacgcctgagtatgccatggtattggagtccatgtgagaaaaggcatatttgacccatcagtgggaagctccgcggaagaaggtttttggccttcggatgcccgtaccgtgcaggcgctgctctgtacggcattgttgtccgcgttgttcttttcatggctttggcaggcgtttcgcctgtatagctatccggggctcgtgccttacaacgatgaagccggggaactgtttcacctgccgctgttcacggggctcgcattgcttgcttacggcctccggttgcggttccgttttacggaacaagagtcgtgccaaggatacgtgctccccgttcttgggagcacgcgcctacggcgcaggcttgtgacgctgctgctgatgtggacgccggttgtgttgatggttacgccggtttccaacgaattttccggatgggtacgctccggcagctgggccgtcagcgctcttgccgggataggggccggcatcgcaggctgccgcattggtctggcgctttgccggttttccggaggccagctcgtcctgagccttggcctggcgagcatcgttgcgccgatatgcaattatcttgtcctgttgtgcccagagccgtattgggtgatccccgcgttgcttttccccgccctgttcgccttgctgccctctgtgtatcccactgcctctggtgaggagggggagcacacctatcccttttcccgtatcccgttgttcctgtggtgtggatgcctgctcacggcgtttagcgaaagcgcttactacaatctgtatggggcgcttgaaccggtcatgcccgggccaagcctgagcgtgcttgttctcgtcgtgctgggagggctgtcggcgttactggtgctggggcaagcccaccgttcgccgatctggtatgcctttttgctcgtcatcccggtattggtcgtgggctataccgcgtggcctttgctgcacagggaatcgcccggcctgtcgcttggcggtttgctgttcgggtataccttgctgaacatctatatgatgacgtcatttctgcacacggtttcgtatcgcaagggtacgcgcaggctgcagctgctggcttgcgggatagggggcatcgcgctggcgtcatggatgggaagccataacagcggctggattacggagagcattgccaggggtgactcgctcaattcactgtttgcgtttcaggccttcgccattttggcggggagtttcatcttcgtcgtctacctggaaaaagtgggctttttccgtctggcgaagggggaggcggccgctccggaacgggtggccgggcaggccccgagcacgccgatgtccttgatggactggccgatcgaggaactggagacgcacttccgcgagctggggctgaccaggcagcaggcgatgatcgccgcattgctggcccgcaagacgccggatacgaccatttgcgacaacctcaacatttcgccgagcacattgaagacccatatacggaatattcaccgccgccttgggatcagcagccgccacgagctggcgtggctggtgacggcaaatccggcgggcatttccgaaacgcagggaggcggccgttagccgtattgcgttcaggctggcggatggcgggaagtgccgttgccgctcgggaaggggcagttgaagctgaggaggcgttctttcgggagcgccttttttgcgtgccatgaggtcctccgtgaggcgggtatccccaagaggatagaggcgccgtattgtccttacgagggagctgcattgggtcagggaagcgtttgctttctgggctggcagcttggtggcagcttgaaggcggcccgcacctcgcgtaagggaaggctaaacgaaggggggatacatgcggtttgaagaagctcttttgcttgccgggaagggccaactgatcacccggcccggatacggcgtttcttttgcggcgattcgggaagggcaggccgtgtatgggcattttatcggagaaaccggctttaccgatgtgcgcgcgtatgtttttacggacgaagacaagagcgctacggattgggagctcttcatccgtgtcctccccgatgcatgggaaggctgcgatgtgccgaatgggtaaaaccgtgagggcgggtgtaccacgctgtccccgttttccgctcgccaatcgggaatctggaacaatcgggaatctggatgcgctctcttttctgaacggcgccacagtgggttatgatgaaagccgtgtgcctgcggggacgtccggcggacgggaaagcgctggaagaggcacggtgggcaagatgcatgtaaaaggcccggagggtatttctccgggccttttacatgcaccaggctgcgggaaggctggatgttgagttgcagacagttgcgctatggctgtttttgaaacagcctattgcccatatacgagcaaatgccgcgcggcccttcgcttcctgcctcttgtccacgcctgccggatttccgaggcaccgtcataggccttggcggccccacccagaaaaaggggtggggttgtacctgccgagccagcggattgcccccggaaggaggaagccctttttttaccgcgattcgctgtaggcttttctgcccaaggtggctccccgtggttttttgccgaacttgccggggcgctggcggcgctggccgggcgcaaagggtttgcgtggatgcgggctgtccgtctcatcggcggccttcgccgacaccttgaccccgcttatgaatacacccttgttgagcgtggccagcacatgcgcggccagctcggcggatatctccacgatactgaagttgttctggatatcgatagcgccgacgctccgccccgggatgccgctctcgccggttatggcgcccaccaatgcgcggggggtgacgtcatgcgcctgccccacatcaatgtggagcctggacatggggccggactcctgcctgcggggaagcggctgcatcctgccctttgatttcgcctcggcatttttggcggggcgttgcggagccatcgtcagttcatccacttcgccgacattgtcctgattcccaaaatcccgctgcatcaacagtttgagcaaggccgcggagatatcccggctggaagcgtcgccatccgggaagtgttcggtctggaaatcctccaccagtacccgccagcgatccagagagctttcggccagggtctggcggacttcatccaacagcttggacgtgcggatgttgctgacgtcgcgcagggtcggcagctggcccggctggatgcgggctttggtgtagcggatgatttcgcggatcttgtactgttcgcgcaccgtgacgaaggtaaaggccttgccttcgcggcccgcgcggccagtacgcccgatccggtgcacatagccttccacatcgtgggggatgtcatagttgatcaccgcatccacatcatccacgtcaatcccgcgtgcggccacatccgtcgccaccagaatctcaatgccgtcggtacggaaacggctcatcacccgatcccgctgggtctggttcatgtcgccatgcagcccgtcggcctgatagccgcgctgctgcaagtgtacggttatctcgtccacgctgcgtttggtggcacagaacaccagagccttgcggaacccctgcgagtccagcacgcggcacagggcatccatcttctggtatggacggacctcgtagtacacctgctcgatggcggggaccgtgagcatcttgtgggcgatggtcagcatctccggttcgcgcaggaaacgcttgctcagttcgcggataggctggggcatggtggcggagaacaggacccgttggcagtccgccgggctttgttccagaatgagctcgatatcctcgcggaagcccatgtccagcatttcatcggcctcgtccagcacgacaatccgcgcctcgctcaggcgcagcgtgccgcgctgcaaatgatcgataacccggcccggcgtgcccacgaccacctgtgcgcccttggcaagcgcccgaagctgccgctcgatgggctgcccgccgtaaatcggcaaaaccgaaacgccccgtttgtgtacggccagtttgctcagttcttcggatacctgaatggccagctcgcgcgtagggcaaagcaccagcgcctgcacgctcttgccggaagcgatcttttccagaatgggcaggccgaacgccgccgttttgccggttccggtctgcgcctggcccacggcatcctttcccgtcagcagtgccgggatagccaaaacctgaatgggggagggttcttcaaaccctaaatcttcaacagctttcaagagttcctgggacaatcccagttctgtaaacgatgcggtcatgatgttcctgtaggtaaaaatatcaaaaagggggtaaacacagtctcattgcgtttgatgcacaataaccatgatttccaatacatactcggaaagcggggagcgccccgtacgggccggggtgcggcaaaaaataccgtgtgcggaaacgtgatgcacaagtccgttttccggcggagcctatggtgatgttggcctttttggccagcatttccgcatatggaagcctccgccataaaccggaaaggggtttcctgtttcaccctgcaacgtccgctgtacaagggagggccgaggcctgacgccatggagatgttccggtttggggatttcgccgggtggctgatcgaggttcggaaaaggaccattggtggcacagcggcaacgccgcataagaaaaggggttacatcgtacgatgtaaccccttgagattcctggagcgggaaacgggatttgaacccgcgaccttcagcttgggaagctgacactctaccgctgagttactcccgcaatgcggtgtaaaaaaaatggagcgggagacgggatttgaacccgcgacttcaaccttggcaaggttgcactctaccactgagttactcccgctcaaatggaggcgacgtccggatttgaaccggaggatggaggttttgcagacctctgccttaccacttggctacgtcgccttgagcgtgtttgttggagcgggagacgggatttgaacccgcgacttcaaccttggcaaggttgcactctaccactgagttactcccgctcaacgaagagaaggtttaccgtcgaaccccgcttctgtcaagcgttgtttctcaaaaaacacatatttcttttccatcttttccgtatgccgcttaacatgtcgaggatgttattcctttgccgggaaccctcaggaggggcctttttccgcatccggcatcagaacgggggagcgggcggccgtccgttgcaatgcccgtcttggaggcggcagatcaggcttccgtgggtaatcattgaggaggagagggccgcgccgtattttaaagggaaaaaaggattgccacatgcaacagatacgtaccgtttccataggcgaggtgcaagcgttcctccaaaaccatccgggaggtttcctcatcgatgtgctgccccccgaattccacgcccagcaacatatccccggctcatccggcgtctgcgtcttcgaaacggcttttcaggagaagatgcgggctctggtgccggatatggccgcgccgctcttggtatacggagctggaggctctttggatagtgccgttgccgctgaaaaattgcagcgcgaaggctatacggatatcagcctgtttgccggagggcttgacgcctggaggaaagccgggcttccgctcgaaggcgagggagtggatttccccgtgcgggatgagtcccctctgccgatgtttaaggagtacatgctgatccccgaaaaaagctttatccagtgggcgtgccataacactgtccacagccatgacgggacgctttccgtgagcggcggggaactccgcttcccacacggcccgcaaggggaggggaacgggttcttgacgatggacatgaacggcatcgcctgccgggatctcgcacaggacgagatgttgcccgtcctgattgcccatttgaaatccatcgattttttcgacgtcatggcctaccccacggcacaactggatatcctgtcgctgatgcccctcacgggggccacggtgacggggcgtacgcaccgcttgcaggggcagctcagcgtgctgcggactgagcgggccatcgaatgcgatgcggagctgcggaacctgccggatggggagctcagcatgttctgccagttggtctgggacaggacgctctggggcgtgcgctatggttcggcgcgtttttatcgttttctgggaatgcacagcgtcgacgacaacatcagtctcagcgcgatgctgtttttccgttcccagaggccataagctcagatctgcgcaatgaaaacaggaacaggatcgtcacacggcgatcctgttcctgttttcagcggcccggatgatactggccgtcgtcaaagccgcggcgcttcaattcttcggggcggtactgcccgtcatcatggcggggctggggatggcggttatactggtggtctttccgccgctcacgttccagccgatccttatcgtgctttcttcccggatgatcgcgatcccggtcgttccacttgctgtccttgcgatccctgttgtcccaatgctggccgttgcgacgggcctgttccctctccgtgcggcgctgctcgcggatcatgcgttcctgttcctggcgcattttcccttgttggtagcgatcctcggcgcggtgcatcctttcgcgccgctcaagctggcgctgttgccgcatctgttcccggtggtcgtccctgtcggccacaagagggttctccgatccggcggagtgggccgggacggaaacgtccgccgtgtacggcagaaaatgacggggagtggatgcataggcgttgctcagggccaggcaggccagcagcgttccggcacaaaggcatgtaatgtgtttcatggttttttcctcaaacctctcatcagtgctgtgagaaaggccgttcttccgggctgtgcgcaacgcgcaaccggaaggcgctctttccccggcagggtggaatgcgcgtcttctatacgcctctttcccggcgttgcaagcgtacggaaagtttctgtgaatacaaatgattaagctggatagggagaagaaaggggaaggcggggaggggaaatccgcagcgaggcgggaggaggggaaaacgcaaggctgacaggaaagaacggaaacggattccggccttttctgtcagcccttgttcctctacttataggaaggaagaggcgtcttgatgagtttcaggaacttgtcggtgacataggagctgttttcaacctttttcagctcgtcctgcgagatcctgccgatggccgcaaagaactgggccagatcgccctgccagctctgggcctggctggggccttcggaggcgtcgaacatctggagctgttcttccaggttgaacaccggatggttcttaagatccatctcagcgagatccttgctgtagtcggtaccggcccagtcaacgtagaaacgcaggtattccggcagcagcttgtccatcggttcattcttcatcatgtcgatggcgcgcatgtagatgctcaggaacttcgcggtgacttcggggttcttgtcggcgaattcgcggtcggcgacgatgacgatgggaaggccgcgatagcagtcatgcggcgtgctggccactttccagccgcgcttttcgcccacgtaggtgaggggcgcccacagggtcacgatgtcgccgatgccgtattcgaatgcggcgagcgcggacgcctggtccatattcttgatggtcacgtccttttcggtcaggccgagggccttgagccacgagctcagggcgaagtgggccgaggaaacggtcgtgcagaggacggttttgcccttcacgctttcgggggtgccgtatacgttcgggtagctcttgttatagcccttggtctgcatgatcgggctgtcggggcggaccatgacggcgttgaccatcgcctcgtcgttgcagttggcaatgacgtaggtgtcgtggcgcaaggcgcccatgagggcgggaatcgctcccatgccgccgaagacccatgtcttggcgggcagggtgctgagggcgtccatgccggagctgaagtagagcagctcgacatcgaggcccacttccttgtcccatcccttctgcttggcataccagatggggaaggtttcctgagcgcccatccacgcggtggggactttctggagttcggcggcgcctgccgtgcccacataggccacgcagaggacggcagcgcagaggccgcgaagccattttttgacgttcatatgcactattctcctgtactttgggaagagggggaggcagaaagcggggtagaaagctctggagagtcttctaccccgcaacattaagctacagatttctcaacttacttgtagcttgggatgggggtcttgacgagcttcaggtacttgtcggtagcgtaagcgccgttttcgaccttcttgagttcgtccttgttgatgctgcccacgctggcgaagaacttcgcgatgtcgctctgccacttctgagcggtgctcatgcccttggaagtatcaaacagggcgagctgttcttccaggttgtagacggggtgcgtcttgaggtcggtgagggacagttcgggggaatagttcttaccggcccattccaggaagaagcgctggtattcgggaacgagggattccaggggttccttctgcagcatgttgacggcgcgcaggtagatgctgaggaatttcgcggtgatttcagggttcttttcggcatacgcggtgtcggcgatcaggacgatcgggttaccgaccttacacatatgcaggtcgccggcgatcttccagcccttttcctgaccggcgtacatatggggagcccacagggccacgccgtcgccgatgccgttgtcaaacgcggccagagcctgggcctggtccatattcttgatggtgatgtccttgtccgtcaagcccaggaccttgagccaggagctcaggccgtagtgggcggaggaaacggtcgtggtcaggaaggtcttgcccttcacggtgtcggggctgccgagcacttcggggaaatccttgttgtagccctttactttggcgattgggctgtcgggacggacgagcacggagttggtcatggattcgtcgttgccgatggcgatgacggaagtgccatagcgcaggttgcccatcatggccgggacgccgcccatgccagcgaaaacccaggaaccggacggaagggcgttcagaatatccatgccggagccaaagtactggatgtcgatgtcgagaccagcttctttgtcccagcccttttctttcgcataccagatcaggaaggtttcgtgttcgtccatccaagcggtgggtactttggtgagcttttcagcgaaagccataccagcgagcgaaacgcaaaatgcggcagcgagaaaagcactgatgagtttcttgaaacgcatacctgttcctccaagttgaaatgtactgaggaaaatccctctacccttatcataatacatgtcggggcatgcacgatgatcgtattccggacgtcagcgtgacgtccctgcggcggccttttcggcatcttcaaccgtcgccttgcggacggcctgaacatgccgggtgcggatgcggaaagcgcagaactgcagcccgcagccgatccccgccaaccctaccgcaagcgccgttcccagatggaaatacaaggctgccgcggcgaggatgcacaatgcgaaactggcgagcctgaggtacaggagcttcctgtatacctccccggtgcgttcccagggagcgtcgtcgcattggcgttgcgcatcgttgtttttgggctgggccttgcccgaacagcgccggacaaagccctgtaccgaccaccagaccagccccgcgcacagggatccgatgatgaggctgacggtggtcgtttccatattacagtaccagggccgtgttgtcggtgatgatggagcggagcttcaacagctccatgctggtgtgctcgcgggggcggggaagatcgatcatgtattcggtcttgatgctcccggggagcttgccttccatcaggatgatgcggtcgccgaggaacagggcctcgtcgatgttgttggtgacgaagataacggtgcgcttttcctgttcccagatgcgcgcggtttccttctgcatgaacatacgagtctgggcgtccaactgcccgaagggctcgtcaaggagcatgatgttcggggagttcgcataggcgcgggcaatgcccacgcgctgcttcatgccgccggacaactggtgcgggtagtgcttctcaaagccggtcagccccaccatgtcgatgtagtgctgcgcaatctcatgccgctcgttggcggggatattgcggagcttgagacctaattccacattatcacgaacgttcttccatgcaaagagcatgtagccctggaagacgatgccgcggtcggggccggggccggtgatgggctggccgtcaagcgtcacgaatccggtgtcgggcgtttccagcccggcgaagatcttcaacagcgtggacttgccgcactgacctgggccgaggatgaccagaaactcgttttcatacacatcaagagtgacgtcgcggatgacggggacttcctgattgcccttctggatgaaggtcttgctgacgttttcacagcggagtttgagtttcggttcgcagttgcaggtggtcatatgctttcctttctcagctgtgcttagaggttttcaatggtgcgcttccaggggcagagcttgccttcaaagagcgtgaccaacagtgaggttccgtaagccgctgccgcgatgaggaccatgccgccgagcacgagggtgggctggtgggtgtccatgccgcgcttgatgaggaagcccatgccgtcgcgggagttcatcagttcggcggccagaacgcaggtccaagcggagctgagggagatctggaggccggcgaagactgcggggaacgacgcggggaagcatacgtggaagatttcatcccggcgcttgccgccgaggacgcggataacgtcatacaggtcggggtcaacgaggcgcacgccgttgtatgcattgagcagacaggggacgaacgtaccgatgatgatgatgaacaccttggacatttcgccgatgccgaaccacaggatggcgatggacacccaggcgatgggcggcatgggcttgaacaggtcgaacagaggcttcacaatcgcgttgacgtacttgttcagggccatgaacaggccgaggggcacggcgacgacgctggcggcgatgaagccgatgagcacgcgctgggtgctggcccagatgtggccgataaggttcgttccggcgaacttcatgtacgtcaggcggtacagctgatccaccacttccagcgggcgggccagggagtcgcggaagatcttctctttcgccacgtagtcccacaaggcgaggaacaggacgatggaaaccacgttgaggaagtacttgttggtaatgaacttgtaaaagctgaacggttcgcggtttttggagtggtcgacggtttcgttggcgatagaactggtcatgccgtttacctcctgatgccagccagcagtttcttttcaatctggtcgatgatgaagccgatgactgcaccagacagacccacgcaaatcatgccgaggacgatgatgtcgggacggccgaggcggccacccatagtgatgaggaagccaaggccggagtcggcggccagcagttccgcggccacgaggttggtccagcagtaagccagggcaagctgcagggcgccgaacaccatgggaagggcggacgggatgcagagctgcgtgaaaatctgccagttgttggcgccatatgtgcgggccatctggataagggtcgggttggtcatgcgcacgccgacgtaggagttgatgacgcagggcacgatacccgcgatccagatgatgaataccttaccggcgaggccgatgccgaaccagaaaacggtaagcggaatccacgcgatgggggggatgggacggataagttcgaagatcgggcggaacagaccttcaaccacgttgaaccagcccatggccaaaccgagcgggatacccacgacgagcgagagcacatacccgatgaaggcttcctgaatggacgtccacgcgtgcgtcgccatgatggcgccgtcggggttggggttgctgagtttgtcgatgaacgcggcgaacacctgggagggcgatgccagcaacgtatttggaatgattcccgagcgcaccacgccttcccagaaggcgaaaaagatgatgatgcttacgtagggaaggatggtcagaagcaatggctgtttgacgcttacttctttgtaggccatgagtcacatcctcgtgtctgtgctgcgttagagaggcgagcctcgtctaacctgggttaccaccaacggatcagttcggtgacttgcttgcgcagctccacgaacttgggatcgatcaggttgcgggggcgggggagatccacggggatttccgccttgatcttggtgggcttgttggtcagcaccaggatacgttcagcaacgtaaaccgcctcttcgatgttgtgcgtcacgaacagaacggtactgttgagctttttccagatattgaccagctcgtcctcaaggtagaaacgcagcttgacgtcgagctgtccatacggttcgtccatcagcagcaggtcgggattcacggcgaacgccctcgaaacggcgatacgctgcatcatactggctgaaacctggttggggtacaggtcggcgcaggaggacaggccgacgagatccatgatttgggtcgcgcgcgcttcacgttcttctttgccgacgcccttgacttccatgccgtaagccacgttttcgcggacggtacgccaaggcagacaggtcggttcctgaaacacatacgagatgttgtgcttcttggggttcgcttcttccccgtcgatgaggatctcgccttcggtggcgggcatcagcttggacagggtgttcaagaaggtggttttgccgcagcccgtggggccgacgatggcaaggagctcgccttctttgatgttgaagttgatcccatcgaggacggtcagatccccaaaccgttttgtgaggttattcacctgaatcttgatgcgtgattctggggtggtgggcactggtggctcctttgtcttttttcagggcgaacacgctggtgccgcctcctagggaggaacgcgctttggccaattcatggacctcgtacgctggtccatacattggctgaagcgctgcctctggaccctgtgtggaggcggacacgtgggcaagggattgctccctcacaagttgtgctttcggctccaatcttgttctctaatgagcaaagatggtgccagaggtagggccctagcctcaaaaaaacgcttcctacctacgtttctggagtaaagaaggcttttatttgaggggaatagggatgatgctcaaaaaagaaaaaaagagcaaaaaagctctatttcctcagaggttgcgttggggcttcggaaaaataggatcaaaatgtcccaaaaagagaatggggaggattttttttgggacaaaaacatcccaaattataaaacgtggtattccaatatgatatatgtataaatactgtgccggcaacactctccccgtcatggttgagaaaaaaatcccgtataataaaccatgattgagataaaaagaacgaatggaactgcctttggaagcgttcagtccccaagagggcacgaaaaaatgggacagaaatgcgacattttttctgcggccctcaaacggaaaagcgcctccctttttactgggggaggcgctcggatcggggcgtggattgcagcgtgcgggcgttattctttttccaggccgaaatctttcatttttctgaacagggtacgcctgtccataccgaggctgtccgccgtcgggccgcgtttccagttgttcttcttcaaagcgttcagcaggtagaccttctcgaaacgggaaagcgcttccgccagcgtcagggaatcttccggggcttcggaagcggccgcctgtgcggtggtctcgccgatgacggtatcgcccagccgcgccgtccccaggctcaggtattggtagagcacattttgcagttcgcggacattgccgggccagtcatagagcatgaacgcgtgcagcatctcgctgtccatgtactcgaagcgcttgttgctcgggtaagccttcaggaaatgctccaccagcagggggatgtccgccttgcgctcccgcagcggcgggagatggatggggatgacgtggatgcggtagtagaagtcgcggcgcatggccccttcattgacccgctcgaggagatcccggttcgtggccgcgatgatgcgcacatccgggcggtggatctgggcgccgccgacaggcgtaaaacccccgtgctcgatggcgcggagcagcttcacctgccccatgaggctgatttcacccagttcatcgaggaaaagcgtgcccccgtcggcctgatccagataccctttcttgtcggccgtcgcaccggtgaacgcacccttcttgtagccgaacagctcgctttcaaagaggctttccgggatggccccgcagttgaccgccacaaagggctgctgataccgggagctgccgtcgtggatggcccgggccgccagttccttgcctgtccccgattcgccgtaaacgaccacgttgtcgtccacggccgccgctttggcgatgagatcgaagacggcggtgatctgcggcgaattgcccacgatgtcgcctgaacatcgggctttgaggcgctcgcgcagctccttgttttcctgccggatcgtgttgtcctgcttctgcttttcggtcacgtcgttgatgaagccctccacaaggaggggggcctgttcccccgcgcctccggcatggacgcccgcgccttgctcccagacccatttttcctcattccatgaggtgatgatccggtaggtcagttcgaacggctctttcttcctgagcgcgttttccagcgtttccgagacgtgcgccctgtcgtccgggtggacgagggcaagcaggcccatgccgtccggccccatgaaatgctccggcgtatacccggtaaggcgggtgaccccctggctgacaaagcggaccttccgatccggcgagtgctcgccctgataggcgaggccgggaaggttgttcatcagggtttcaagctggcggcttttctcgtgcagctccatcccgatgagcatgttgtggctttcgagctcctcccggaggcgcttgttggtgatgtgggtgcggacgcgggccagcacttcgtcggcatggaaaggtttggtcacatagtcgacgccgccgacttcgaacccccggtgcttctggccgggcgattccatcacggacaggaagatcaccgggatgccctcggtttctttgtccgccttgaggcgctggcagacttcgaagccgtccatctcgggcatgaggatgtccagcaggatgagatcgggatgatggctgaaggccaaatccagcgcgcgctttccgttcttggcgatgatgaggaaatagtcctgttcgagggtctggaccaggatgtccagattgacgggatcgtcatccacgaccagaacgacaggtttattgggctgcatcggaaggctccgtacttggggcgctgctcgaaaacagggaagggcggatcctttccaaaacggtcagagcagcttcatagtcataattgtccacatgcattttcagggtgtggagtaagggatattcgtccgcattgcaaatcaccagcaggctgcccagggcaatgcggatgcgcccgggcgcggcctggaggagggcctcgaccagatcattataataggtgcccagtttggcgatgtcgagtttgggtttggaggcaatggccgaggggccgtccgcgggtttcgtttccttgtcggacgggcacagcttcgcggcggcctcaaggacctcgccgagggcctcttccagttcggggagcagtgcggcgagcggcctgccctggagcgtggacaaggcggcattggggtagcccttgtccagttgcgattgcgcttccagttccagtgtgcgcgccatatcccgcaaatgcagcgctcccagattggccgaagcccccttgagggcgtgcgcccgttcgcggagggattcccagtcatgggtgcggacggcatggcggaagagggcggcatcctgcgcgtggtttctggcgaaactttgcaggatggaggggtactgctgcggcgacaggcctgtctggatcacggtctcgagcgagaagcaggggggcagaaacgcccatgattccgcatcgggcacggaaggccgcgccggactttcggcctgcgcttccggaacccggtagtactcggggagcaggctatggatggtgtcgaagagcagcgcctgtttgaacggtttggaaaggtacgcgtccatccccgcatccagacagcgctgcttgtcggattgcatggcatgggccgtgagcgcgacgacgggcaggacatagccgcgttcccgcatgatcttgatggtttcgtagccgtccatgtccggcatctggatatcgaggaacatgaggtcgaaagcctcgcgttccagcagggcaagggcttcgatgccgttgccggccatcttgagctgggcgcgggtttcttcgagcagtacggacatgatctcctgattgacggggttgtcctcggctacgaggatgcgcacggacgacagatccggcgtgaccggcgactgcgccgggcgcggccccctgaagcccgcttttttccgatcaaacagcttgcggagggtggagcggacgcagcgcacggtgatggccgggatgacctcgacgggatagggcttgtccttgaattcggagatggcgaggccttccctcgggccgcccacaagcacaagcgggaccggggcggcgcagcgcagctgcagctccgccgcaaggcgcagggccggggggcagtccccatcgccgagcaggcgatcgatgatgatgagatccggcctgagcggctctttccccaacgaggcgaggacggaaagcgggcccaccctgctggcgatgtggctctggcactggatgccgagtgcctccagcgtgcggcgcatgaccctgacgcccgtatccgacgagctgaccacgaccgcctgcagatccatgaaggtattgccgccgagcacttccacctgttcctgaagcgccagccgtatggagaacgcgaacgtgcttccctgcccgacttccgattcgacccagatttccccgcccatgttttcgaccatataccgggcgatgctcaggccgaggcccgtgccgccgtgccgccgggtcagcgaggagtcggcctgtttgaacggctggaacagctgcggcagctgatccggggcgatgccgacgccggtgtcgtgcacgaagaacaggaattgcgccttattctggttttcggaaaggtggaggttgccgccgtgccggacctgcaggtggatgcgcccgcccggaggcgtgaatttgacggcgttgcccatcaggttggtcaggatctgctgcaagcgccccgcatcgccgagaagcgccaaaggcgtggagggatcgatgtcgatcaggcattccagctcacgcgccatgctgccgcgcatggtcatatcgcaaacgcgcaggatcacttcatcaagcatgaacggggcggtgtccgtgtccatttcgcccgcttcgatcttggagaagtccagcgtgtcgttgacgatgtcgagcagggcgtaggacaggtccagaatcgtgcgctgatggttgcgcggcagcgggttgtttttcaggtaggctaattcggtaaaggaaatgatgccgtgcagcggcgtgcggatttcatggctgatgttggcgaggaaacggcttttggcttccgtggcggcgtcggccgccttcatggcctgctggagctcggtgttgaggcgctggagatcctcggccttggcgcttttttccagttcggcggccagccgcttggtacgttcctcaaccttgcgccggagctggaaattccagaaaatgatcagcagcaggacggacaggacgacttcaatgccgagcaggctggtccagaatgtgcgcgggggaaggtggagcgacggctggcggctgagccagcggttgttgatgagttcccgctcgggaggctggatctggtacagggctttggagaggatgctgtgcagttcgggccagtccgagcgcacgccgatggacaggccgctctgggcggggatggtcgaggtcgcctgaagccgcagatgcgtgttgtcttccagcttgggcaggacgctggccttgtagtcgaccagcgcgtcggaatgcccggacatgacccggaacagcccctgcagggggttgctgacagggtccaggatgatgtcgggataacggctttcaaggtaattgtgccagtaatgcctgtatacgacggaaacccgtttcccggcgagctccttgaggctggtggcgtgctgcgcgttttcatggatcacgatgatgccggggagggaaatatggggccgggtaaggagcaggtttgcgtcgacggcaagcgtcggttccaccatggcgaacaaatccgtccgccactgcttggcgtcttcgagcgccgttgtccagttggattgcggctctatgcggaactggatcccgatgatgcgggaaagaagccgcagatagtcaaggctgatgcccgcataggcgttgagctgcttggaatcggacaaagggatgaaggctggggtcatgcttacggtaatgacggggtgttcatctatccatgtctgttctttgggggtgaacagctgaggcatggccgtcatgggcgagagcatactgatggacgattccagcgacgggagatagctgtcgtccggcgcgtccttcgtgaccagcagcacatgccctgtaaacaggatgaatatgacgagtatggtgccgaggaaaacaaaaatacgcataaacgtctcgcagagaaaacggctcaggaaggaacaccagtatggcagagatgcgctgtaaggtcgagagggcatcttgtcgttgcgccttcggttgactatggtggcgggggagcgtgttttcccgaagcccggcatagctatgagaaggatgagacaatgcgtattgatgaagtgaagagacagcttgaggcttttggcgttcttgacggataccgcgagttcgccacgtccagcgccactgttgaactggcggccgccgcagccggatgcgaacccggacgcatcgccaagacgttgtcgttcaagacggctgaagggcctattgttattgtggtgatgggtacggcacggatcgacaaccggaaatttaaggatcagtttaaggaaaaggcgaaattcccgcagggagaagaagtggaatcgctcatcgggcaccccatcggcggtgtttgcccctttgccgtaaacgaaggtgtccgggtttttcttgacctcagccttaaggccttcgatcccgtctatccggcagcgggggccccgaacaatgcggtatgcctttcgctcgccgatttggaacgtgtaaccggcgggacatgggttgacgtctgtaagcaagaggccgagtaggcggcgttgttggcaggccctgcacacgagaaaagccaatccatatggattggcttttctcgtgtgcagggttggggcttattcggtaagcgttttgggatcaatattgtacttgcggattttggaccacagggtgcttgtgttcaacccaagcaagcttgcggccccgtcaggcccggcaattttcccgttggcctttgcgatggccatcttgatatggtctatgatgatcgtgtcaagcgtggggaaggcatctccgcttgatgaaagctcacatttctctttgatgttcttgttcgctgagggatgcctttccgcaataaaagagtgcttcagcgcattcatgtcgttatagaggagaatactgttgaaggtatctataagcatcggctgtatgaatgaacagatatcgatgtcttcttgtgaatatctgttctttccgatgctgtatatggacatgtaaatatggatgccttcaaggacatgatgtttaagaggaatatagatgctggaagactcttcattgttgaaaatactgttcctgaattcagaaaatacgcaggtttcttcacccgtaaagttttttatggaatgaacgtctccggtaaagaaattatcttctatatacatgcgcctgagagtgtcttccggtatggtaatttgatctgggaaggggttctttgaatagtcagcatactcagctactttgaagatggtatctttctcaaaaaaagaaatatatacggcggatacaggcatgtatcgcttaaa

SEQ ID NO: 7575 - DNA, 1792 bp, Unknown
  gut microbiota DNA sequence
acttgacgttgttgttcggagtccgtttgctaagcgctatgggggtcacgctgattctgccggtcatgccggcaatggcgcggacattcggcctgagcattgcggaggcgggcatggtggttgtctgctttacgttggcggaagccacaatgacgcctgttgcgggcgtactgtccgatcggttcgggagaatggcggttttgcttccggctctgctggtattcgcaggagggggattttgtgcctctttgcggagagctggcgagatgtgttgatctgtcgtgtcatccaagggattggtgctggcccgcttggcgtgctctacaccatccttgcggcggatatggtggatgagaagcatctgccgcgtatcatggggcggcttacggcagtttcgagcctcgggaccatcgtctaccccgtcattggcggcctgctcggagaatggtcatggcgggcgccttttttcgtcttcacgctggccctgccgacagcggttttgtccctcatggtgacgctggaaaaaccgcaaggggcgatggactggcggcgctactggaagcaaacggggaatatcctacgtgagaggcgggccattggcttctttgtgctggtatttttgtgctactgcgccatctatgggcccatcaacacctgtttcccgatgatggccgaagcgaagtaccacgcatcttcgtctcgtatcggccttgtcttttcgttcgtagccatcggttcctacttggcggccgcagggcttccccgcctccatgcaaagtggtctttccgtacgctcatcttggttgcgggattctgttatacgctgcctctggcttttctggcctccgttccgggtttgtggctttgcgcggtgcctctgttcgtttccggtgcggcgcaggggctttccttacccatcatcaacgataatgtggcactgctcggcacgcccgatgaccgcgccgccatccttgctgtaagcgagacgtccgttcgcgtaagccagagcgtatcaccgctcctgttcagcatcatttccatgaagtggctctgggatggcgcctatgcctccggttttgccgtgggtatattgattctgctggtagcgttttttgtgttcgaaccccgtaccgctccatcgcagaaataaaagagcgtttaccctccagctctcggggcaaacaaaagggccgggaaatgctccccggcccttttgtttgcaaagaaaacttcccgttaaccagcatattctcaaaatttaaaatttccgtttgtgcggcgccttgaccgttgcggggagcaccgtctgagtatggtcccgtcgttggttttgggactgtgaaacgggaaggctgtaaacagactgaggcgtgccttgtttatacgatattcagttatatgctataaatatggatgacaatagtgctctataaaaaaactatatcaaaaaataaagctgtatagagcatggcaatggcgtattgtgccgcttttcgcatgacagcttcttgcttccaacgatgaacgtatgataaagaaatgtatcattgataagagtatgtccatacttttacgaggccgtacataggcgaacaggttgtattccgtttgtctcgttctttgttatcgttggagtatacgatgcccaaaaggcttctgtgctgtatttttttggtattgatgtgtgtcagcggctgtgacgatgcaccgaagccgaaaatcggcatttcctttggcgttggtgaagctaagcgctggcccgccgagaagggctacatggaggaaatggctc

SEQ ID NO: 7576 - DNA, 7347 bp, Unknown
  gut microbiota DNA sequence
ccaaaacccagatgcaggattgttttgagctgatcgacagcggtatctcagtgctcatccttataccgcgcgacgccaggaaagcgaacgaaatcctcgcgtatgcgaagaaaaagaacgttaaggtcatctcgtacgccagggcggtgatgggtgaagacatcgatttttttgtgggctacgatacctacaggatcgggcagagtttggggctgcatcttacagaaaagacctataagggaaatcttgccattttgaagggtgacaagaacgattttaactcccccttgctttatgatggcgcgatgatttctatcaggcccttggtggaacggggggctatccatatgattcttgacgaatacgtgaacggatggtcagtggatcttgcgaagcgtatgctcactgacgccatcatcaaaaacgattacaagatcgacgctgtttttgcccacaatgacatttttgccggagccgctgccgaggtcgtcaaggagcttggcatcaagaatccggtgatcatcacggggatggacgccgaaactcccgcgctcaagagactgctcgagggaacgcaggacgccaccgtgtacatggaccttaaatcgatggcgtatacggcggtcaatgaagcctacaacatggctaccaagaagaagcccaacgtcaactccgagttcgataacgagagcaagtttaagatcgacgctttccttatcaacgggaaactcattacacgtgaaaacatagacagagtgctcatcgctccgggccacttcacacatgaacagatttacggcaactgagtagtcttccgattgttttttgcaagaaggccgggacaatcccggccttttctctgccttttagccatcggagcatcggctatcgaagggctttgaggtagtcgtccgtaacggcgttcatgcgccgcaggcgctgccggtcttccttgcgtaccatgccgatgctttcatagaatgcggcaatgtctgtaagccagttttgaagtttgcttttgccttgtgcgtcatcaaagagggcaagctgttcctcgagattgaacaccgcatgattcgccaaatcctttgcggcgatttcggaggtaagtttgcgccccgtccattcttcataaaagcggacataatcggggacgagcgtttcgacgggcgtttccctcatgaatgtgattaccctgaggtacatcttcaagaacgcctcgacccgttccggatactggatagcgtactcatgattggcgacgatgaggacgggctgagagacgccgcaattgctggacaaggcggccggtttgaatcccttggcgtcggcatcgtaggtcagaggagcccacagtgccacaacgtcgccaagtccgcccgcgaaagccccgagcgcctgtaccggagacatatacttgacgcgcacatctttttcctcaaggcccaatgacttgagccatgccgccatcatatagtgggcggaagtgcctttcggacagagtatttcttttcccttgaccgtggcttgatcgccgtagatgtcaggataggccgggtttgttcccttgatgctgaggagcgggctgtcggcgcggacatagagggcgttggcggcggattcgtcattggcgacggcaatgatgtcgaggcgctcgctcagtgttgcggtaagcgcggggacagccccacaaccggcaatggcccaatcgtaggcaagcacgccctccacaatggccttgcccgagtcaaagcggagcatggtgagatccaacccggcttccttgtcccatcctttctgcttggcataccagacggcgaaggtttcgtgttcacccagccatgccgtcttcatggggatgggtgatgcggaccgggcgggagtgctccaggccagcgcaagaagcaccagacagataccgacaaatgaccgtttgaatcccataacgcactcctctcaatggtcccggaccgccgcgatggcgatccgggagagccgtcgctagttgaacttgttttcccgcatgatgtcgccgatggtcttccacatattgtcgagagccttctggaaatcctcggcggacagataatcggtggtcaggccggccttggcgaacttggcctgcacgtcgggatcggcgagggcttccttgacgagattctgcatggtcaggatacggtcttcagggacgcgcttgggggcaaccaggccatgcgaagaggcaaaagtatactcggggccgatctgttcggcgaaggtgggcacgtctgggaattcagcgaggcgttcggggctggatacgccgatcatggtgaaatcgccggaaaggacataaggcttttggttggtggtcacgccaaagccgctggtgacatggcgtccgaggagggctgtggagacttcatggccgctggtgtagctgacatgggggagatcgacgccggggaacgccttcagcaggcggctcatgaacaggcgctgcgtggagagggctccgtgggtggcataattgtactttccgggggttgccttggctgcggccataagctcgttgatggtcttgatgccggagtcggcgtttacggcgaggctcagccacatattggtgacttgcaccacagcgcggaagtcggccagcgtatagccggtcttcttgatctgcggcgtggtcgagaaggtggctattgccgggaagccgaaggtatagccgtcgggacgggccttggccacgtcgagcatggcgggggcccccgcgccgccggccttgcagacgatgttcagcgtgatttggtgcttgttttgaaagtactcggccaggatgcgggctgcgatatccacggctccgccggggccgaacgggataatgatggtaacgggccgatcgggatacgcggcggaagcggtgcggggcaggccggacagcagcagggtgcagacgaggagggcgcaaaacagggcttgaagcttcttcatggtctcttccttgcgagggtaaaggttacagggaaaccttcgcggcgggtgcgaatgcccgtgcggcctgaatggccgtgagcgccgcgagtttgcaccggggaacaaaggtagacggaatcatgtattcatccgcggaatgcaggttggagccttccggccccatgctgcatatcgccggaacgccgaggacgctggagcaataaccggactcagccgtccccttggagggtgccgagtggacggaatacccgatgagttccccggcctgttcagccagggaaaaaagcttcatgacgccgggagtggggacaagcggaggaaggcgtacgccgccgctgatgtgtgaactcgtgcccgggatatggttctttgcggtttcagcgcggagcacttcagccagtctccgtccggcttcaagcgtcttgaacgtaatatggatgcgtgcggaagcattgggagcgaccgagttcgcagacgttccgccgttgacgagccccgtgttgaccgtggtgtcgtggtcaagatccacataggcatcgaaagcgaggatcttgtgggccagttcgaggatggcggaagcgccgtcctgataacagcgccccgcgtgggcggatatccccatgatttcaaggaacatgtggcctgaacctttacgttccagcgtcaccccgccgccgggatagcccggttcggtacagatgacggcctgcgcgccgttgagctgctcgcccagaatgggggttgtggaaggggaaccgagttcctcgtcgggcgagaacgtcagcgtcatggggacgtccatcaggccgagttccttgagggctctggcgacaaacatgttttggacaataccggccttcatgtcagtcacgccgggacccgtggcgcgatccgccgcgcgatcaagccggaaaggacgcgcccccgccgtacccgcagggaagacggtgtccatatgcccaataaaggccacgccgggtccgcattccacagaatgggtacgcgccgagaagacattgccaaggccattcatccactgctcgtcagccggtgcgggctttttcggaagttttgccgtgtggaaaccggcctccgcaagccatcctgtcaccacttcgcctaccttgttcacgtcggcggcatcgttggtgaaggaatccatgttgacgatgcgttccagcatggagagcatttccggttccttatcggaaaaccatgcatcaacccgttccttacattgagaaagttccatagctgaggctccttttgaggattacgccgctgccttgcgaccggcgcggaagtcgtcgtaaacgggcttgaggaggacgagcaaactgacgagcagaatgatgcaggccacagggctggtatagaagatgctgtagtcgttctgggaaatcgtaagcgcccggcggaaattggcttcggcgatgggctcgaggatcatggcgagcaggagcggcggctggggaaagtcgcacttgatcatcaggtagccgaccgttccgaagatggccacgacaagcaggtcgaaggtggagttgttgaccgcatagccgccgaccacgcacagggtgatgacgatgggcatgagcacggcgccggggatggcaatgatcttgcccgcgccgcgtactgcaatgagcccgcacaccagcatcataatattggcgatgatgaaggcggcgaagatgccgtatacggtaacgggatgttccacgaacaggagcgggccgggggtgagcccctgaatcatgagcgcgccgagcatgatggcggtaatgatgtctccgggcaccccgagggtcaggagagggatcagcgcgccgccgcataccgcgttgttggaggattccgttgcggcgatgccctccacacagcccttgccgtacatttccggcgtcttggaaaagcgtttggcctccgaataggcgaggaaggatgccgcactgacgcccgtagccgggatgatgccgataagcgtgccgatgacggaggaacggatgaagttcacgacgttgcccgtcaaatccttgagcgagatgccgcgcttcgatactgtgctttccttaagggacacgccacggactacgtcttcaacggttacgagcacttgagagacggcgaataagccgacaagcacgggaaccagagacagtccgttgaagaggttggggttgtcgaaggtattgcgcatgtcccccgttacgggatcgaggccgatagtggcgaggaacaggcccgcaagcgcggaaatgagccctttgacgagatgcccggacgacagcgaggccaccacggtaaggccgaacacggccaccgcgaaatattcgggagcgccgaaggacatggccgcccgggccagcattggagcgatgaaaatcagagccagagcactgacgatgccgccgacgaaggaggctatggtagccatgtccaaagcccggcgggattctccgcgggccgtgagggcggggccttcaagcatggtcgcggcggcggacacagtacccggcgtgccgacgagaatggcggtgatgcagccgccataaatggctcccacatacatgccgagcaacgcggaaaaggcttccacggcgggcataccgaaggttagggggataagcagggccacccccatggctgcggtaagtcctggaagcgcgccaaagatgatgccaagggtgacgcccataaggtttgccagcagggagcccatggaaatggcgttcatgatgccgtcaagaatgttcgctaacataaatcctctccaatccgtcatagagattatctgtaaaggagttccgggcggctaggggagcagaacctgaaagaaccagccgaaagcgaagacgagtaccgccgtcgtcaggacggctacggacaggatctcgatgggcttgcgtctgcccagcagtggaagcgctatgaggaggaagaggaaggtgctgatgctgaatgccccgttagcctgaaagggcggattttccatattcaagaagagctcgccgagtccagtcagggtaaccaggtataggtagaacaagccgatgaaggcgaggatcttcttgaaaaccttggattcgggccagtagactttaacgggggagcggcggaacccctgcacgatgagaacaaggctcagcgcggtcaggagcacgagaataccggcgggaaacgcgccggggccgacatgctccatgcctccggcatccggcagggtagcgacgctataagcgccgacgccgcacagcccaagcaaaatgaaaccgctgacgacatctgtgggactcttcatggctgttcctcttggtggttcaagtaggggtatggttacagggcattcgccgacatacgcacaccggcggcaatagccgtacggcggaacactttctgagcttaggaacggatatatggattaggtacgtgagcccctatgggcgctgcggcgcgctcacctccttgatgccgaagagtgcttaagctttcagcaacggttccccgcaggcagagggtggagatggcagtcatcttgctagtcccttgccgtgacgaaaaggtgtttgtgaacgatggtatcgagatgttcttcgacggctttgcgacaatcttcagcggactgccgctcaagagcatcaatgatgcgcaggtgggaagcgactgagaactggtgccacgatgcgtcgcgtaagtccgcggtccgaccgccggcgtactgctcgttcaacagagccacggtattgatgagcaatctgttgcccgaacactccgccaggcagaggtggaattgggcgtccagctcgccgtcatccccgtcgatgagtatgcggcgctgttgatcgcaggcaatgatcttcaagcggtcgagctgctcgggggtgcggcggagcgcggcaagttcggctaccgcgggttcgagtatccggcgatattccatgacttcgtcgaacaggtgtccttccgaatccaccgcctcaagaatggcgctcctgagaggttccatgtccggtactctgacatacgtgccgtcgccatgacggctctcaaggagcccccgctcggcaagggcatggatggcctcacggacgctgtttcgggaaacgccaaaggactccgccagagcccgctccggggggagcttgtcgccatcttggaaatggttctcggccatgaattgccggaggcgctccgagagcttctggtagtgccgggggcggacggtggtaggcaagggtgtctctttgagcatctgaaacctttcctgttaattggtaagaccaaaatggccgattgttcttttcttgtcaaccattttgaaagtatcaaaccaatgggttgatgtataaaaatatatatgaacaatatgtt

SEQ ID NO: 7577 - DNA, 42579 bp, Unknown
  gut microbiota DNA sequence
aggggcccctttttcaaaaggggcccctccccttccccaatcttcaaatcctttcctccccaactacgcaagcgcaaccagatcgtagtcgcggcactcgacgatgtcggcatcaacgagcgcgccgggctcgacgccggggccgctgatgtaaaccataccgtcgatttcgggagcttgaaaccacgcccgcccggtgtgcaggccgggccactccggatggggcgcatccacgaggatagacaggcggtcgccttcaaaccgggaaagccactcggcgctgatgtcggcctgcgcttccatgagcaaatcgcggcgccattccttcacacggtcttcgacctgatcgggcatggcggcggcgggcgtcccttcttcggcgcgataggcgaacaccccgagatgctggaaacgcacctcttcgatgaactcgcgcagatgttcaaaatgctcctccgtttcaccggggaacccgaccatgatgctcgtgcgcagggcggcttcagggaatacgttgcggatgcggtcaatggcctcgcgggggttgcgcgcaaaggggcggcccatgcgggacaggacgtccggatgggaatgctgcacagggacgtcaaagtacggtacgaacggcttgcccgcctcgcgcagatacttgagcatttcgtgcgtcattccggcggggtaaagatacatgaggcgcaggcgttcgaggcccggcaacggcaggaggccgtcgagcagagtacggagatcctgcttgccgtcgagatcacacccccattccgtgagatcctgcgccacgagattcagttccttgaccccctgatccagcagggcgcgggcctcgcggacgatcatgtccttgcagtgggagcggtgcccgccccggatattggggatggcgcagaacgaacaggcatggcggcagccgtcgctgatcttgagccatgcgtaagacggcccggtgctcaggatacggcccggaaccgtgggttcgggaaggccgagcttgcgcgcgagcatggcgggccacgcctccagatcgctgttgtccagccagagatccacttcgggcagctcaggtgccagatcttccgcgtggtaacgccccacgagacacccggcgaccgccagcagcggacgcttgggcagctcctcgatgtcggcgatggcctgcgcaatcgtccgcacggattcctccgtggcgggctggatgaaggcacaggtattgatgaaaacaagctcggcctcatccggcgactcgacaggaaccagcgccaccccaagggaaccgagaagacgctcagtgtccacccggttcttcgggcagccgaggcttgtggaataacaacgcagggaaacggacatgacgcacctcattctaggacaacgctgccgcacagcagcgggatgtcgtatggcttcaaaaacagcaaaacgcactcatataaaaggggaggttccgacctcaaccttaataaacatttttcccattaccgggaaagaaccccatggctcttcttatcattccctttgagcgggcggcaatgggatgtttttctctcggccggaaggctccagcgcggcttcgcgtcaggaaacgatttgcgggcggggccggacgaaggaatattccacggcagggttcccgccctttcccgaaaagcaacgcccaacctgttgacggagcataggattggcggcaaactgcgcggcgcgagagttcgccgcgcgacccgttggtggtacgcaatatagcggcaatgcgcaaggagcagaccatgagcgaacagcctcacgatacggaacccgttaccatcgtcctcgccacacgcaaccagggcaaagtccgcgaactggcggagccgctgcgcgccttcggcctgcgcgtcgtcggactggacgccttccccgatcttcccgaagtggaggaaacgggcaccacttttgaagaaaacgccctgctcaaggcccgcgaagtttccaagcgcaccggccttgtcgccattgccgacgattccgggctcgaagtggatgccctcaacggcgcacccggcgtgtactccgcccgctacagcgaggacatgccggatctgcccggcgccaccaaggacgaacgcaatacgatgaagctcctcgcggccctgtcgtccgtgcggctgtggaaccgttcggcgcgcttccgcaccgtcgtcgccgtctgtacgcccgaaggcgaaaccctcatcgcccccggcacctgggaaggcagcgtcgcctgctccccgcgcggcaaaaacggcttcggctacgatcccgttttcctcgatcccgagctgggcctcaccgccgccgaaatgtccccggaagaaaaaatgagccgcagccacagggccaaggccctgcgcgagctgctgcgcctctggccctccttctgggaagggtatctccggaagagagcttgacttttccgcgtccgactgtgactttggggctgacaaaaaccctacttaaagagtatactgatgcccacgggaaggacggcttttcaacggaaaccgtccttgtatgggcattatgccgctatccgacagacaggagaacagttcatggatcaagccaccctcatggataaaatcaagaccgggaccacgctctgcaaggccatcatgcgcaacggctacgacgcctatgccatcaatgcgccgctgcagggcctgatcttcgaaaaaaccggcgtattcgacgtggacatcgcctgtgcctgcgatacggaaaccctcttcaaaattttccccaacgccgtcccctacactgaagaaggcgctatggccatgcttcaggaaaacggcgtcaccctgcgtttctatagtacggatgttgaggacgcctcccatccggaaatgagccagctccgcatcacgccgcgccttgcgcgcctcctcgccgaactccagctcaagggccagctcaaaagctccaacaccaacgaccccgaagctaaggagttcgaagacttcgacaaggccggaagcgtcaagctggtcggcctgccgagcaagacgctcgccaagaactacctgctcgccatccgtgccctgcgctacgcggcgaacttcgatttgcccgtcaacccgcacacgtgggtgagcatcatccagtccgccaaccgtatcctcgactacgtgcccgcccgcgaaatcatggaagaatggcgcaaggtcgccgccgaatccatgtggaagttcgtgcagctcctctttgaagcccagcttctgcacggcctcatgcccgaaatcgccgccctgtcctgcattaagcaagagcgcaacgacgacggggacatcgaaagcgtgtttgaccacaccatcgagtgcatgaagcgctaccccgaagaagggttcagcatggactggtacggcaccctcgccaccatgttccacgatgtgggcaagctctacaccgccgaacacctcaacggccgctggacattctaccagcaccaccgcgtgggtgccggcgtaacccgcaaaatcctgcgccgcctgcacttcacgtccgaggacattgaccttatctgccatctcgtgcggcatcacatgatgttccacttcatgctgacggaccgcggcatccgccgtttcaaggccctgcccgaaaccgagcgcctgatcgccatgtgccgcgccgatatcgaggcccgcgacggcagctacacctacttcaaccataattccaagtacctcacccgcgccgagacggacgagctgttgcttgaaccgctcctcaacggcaacgaaatcatggagtacaccagcctgcctcccggacccgccgtgggcaccatccgcgaagcccttctcaaggcgcaggtcgccggagaggtcaccgaccgcgattccgccatcgctttcgtcaagaattatgcggcaaagctgaagtagttcgattcagattgatgattggttgagattggggagggggaggagaaacttaaagaaggggccccacgtttctcctccccctccccaaacctgtccatgcggctcgcgccctcccctctccacttcaaaggctttcgcgtttatcgaatccctgttgccgactttcccaagattcgaaaaaaggatatgcggcttgaggcggagttcccgccctatccggcacaggccggaatgagtaccgctttcggcataccgtcggggcggcatagcgatccgggctgttcccgagctttttattcaccttatccgcagagcaacgcaacgcgcatgatagacattctgaatctgacgttccccgagcttgaacgcttcatcgtggaggatctcggccagcctaaattccgggccgcgcaagtctggcagtggatctggcaaaagcacgctacctcattcgacgccatgaccgacgtttccaagcagctccgcgccaaacttgcggaagtcgcggaaatcgtgcttcccgagatcgtgacggtgcagacctcatccgacggcacggaaaaactgttgcttcggctgcgggacggcgcgttggtggagacggtcatcctcccgagcacggggcaggacggttccgtccggattgcccagtgcgtgtcttcgcaaatcggctgcgcgatgggctgcacgttttgcagcacgggcacgatgggctttatccgcaacatgaccgccggggaaatcctgagccaggttctcgtggcccgtatgcggctcggcgacaaccgcatcgaccaccccattatccgcaacctcgtcttcatgggcatgggcgagcctctgctcaacctgcgcgaaaccacccgcgcccttgagatgctgaaccacgacaaggggatggatttctccccccgccgcattaccgtttcgacctgcggcatcaaggcgggcctacgcgaactcggcgacagcggcctcgccttccttgccgtctcgcttcatgcgcccaatcaggatctccgcgccaagatcatgcccaaagccgcgaactggcatctcgacgatctcatggcgacgctggaaaactatccgctcaagacgcgcgagcacatcaccttcgagtatctcctgctcggcggcgtgaacgatcagcccgagcacgcccgcgagctcgccaagctcgtttcccgggtcaagggcaagctcaacctcatcgcctacaacccctcggagactcagctctacaaggctcccaccgaggcggacatcctcgcgttcgaaaaaatcctctggtccaaaggcgtcaccgccatcctccgcaaaagcaaggggcaggacatcaaagccgcctgcggccagctgaagagtgattgggagcgagaaaaaggggatgaagagtaagattggagggagaaaggttccccttcccccctccaaacctccccccttcccctcccaagacttttgtatggctcaacgaaggatgggcaggccgcgccatcccgtttcggaggcgtacgtctcctggagacgcaacagaaaacaaaaggcccgcatcgtgatgcgggcctttttcataagcaaaaccgatccgtttcccctaaagcgaatccattaaaaggtcattgttttcaaaaagcaaaaaacgctaacgtgtttcccttctttcatgcttccgcccacagggaaaacggcccaacagggattcgataaacacaaaagtctttggaaagggagggatggggtttgtggaagggagggaaaagcttttctccagaaaagttttccctcccttccccaatcttcattttccttccctcactactcccctgccgtgtagcagcccaacagcctgaacgagtggcaggtgttgcggagttcggcgaggacgccggagagctcgggcttgagcaggttcgtctcgagatcggcgaaaaaggcgtatttccagctctgagagcgcaaggggcgcgactccagcttgcggagattcacccccgccttgaacaacagatccaaaatacccgccagagagccgggcttgtcgggcagcgtgaacagtaccgaagtcttgttggctgcggaagtgtccgtgggcttggggccgatgaccacaaaacgcgtctgattcgtcggctcatcctcaagattataggcaaggatgggcaaaccgagcatcgtggacaggctcttgtgcccgatggcggcgctccccggctcggaaaccgcccggcgcgcggcggcggcggtggaatcgcaggccataagagaggcttcgggcaggtgctgacgcagccagcgctggcactgggcaagcgcctgcggatgggaatacaccactttgatcgcttccggagacgattccacggacaacagcgtgtgctggatgcgggcgaccgactcggtctggatgtacacatcgtattccatgaagagatcgaagcactgccccacggagccctgcaggacgttctcaagcgggatcacgccgagcgcgcactcgcctccgtgcacggcggcgaaggcctcccggaagttcttacaaggccggtaatccataagattcccgagcagatccacagccgcgaaatacgagttcgtaccctcggggccgagataggccacggatacaggacgctgaagggtacgggacgaagcgaaaatttcatgccagatggaacgcagatgctcctcgggcagggggcctgagttctcgctggcaaggttgtccagaatctgccgttcgcgctgcgggcggaagacaggaccggacgtattcgccttcacccgccccacttcaaggctcagggaggcacggcggttgagcagggccagcagttcgcggtccacggcgtcgatctggaggcgcagcccctgaagcgcttcggactgtttcgcggctgcggcttcggaccagccgtccggggtatcgttggattcgggcatgactatatctcgcggatgttttcctgaatgcgcataccgaaatgacgcccggccacatcggctcggcagatgacttcgtcgccgggccggagcgcgaccacgctgacgggcgtcccgtcaggccgcacaaggcggatggtttcggcgttctgcaaaaagacggagccggtgcgcgtgccttccggcgtttccatctgggccgtgatcatcagcatgggccgcacctcggtcttgatgcgccctatggtggcgagcgacgtgcgcccgtccttatccacgataaggacttcgtccccggagcgcaattcgcccacgtagcaggtcttgtcgccgggcatcaccgcataggcgtgcacgccgcccgcgttgatgcggaaaggccgcgccgccacatattcgttgtgctccgtttcggcgtgcgtaaggaaggtgaaggcgctggagttgcccaccagcatcccctgcccccgctccatgagggtcagcgtatcgacgcagacgcggtgcccgaggcccacggtcttcacttcggtaatggtcgccttgtccagcgtcagcgtgccttgcgacaatttcagctccgatacgatgttcttgaggcttgccagcgcttcgggaagcaccaccacgacgggcacgccgcattcgagaacccccgccgcaagacgggcttcggccagcgaagcgacctcgaccgcgagctttccggccacggcgggctgcgcgagcagattttccaccgggatgatctcccacccctgagccagtacgagccgctcgcccccggcgatgcgggaggcgatggattcttcctcggccttggagccgagccccacggacggcatgtccgcctcggcccgcacgtcgcacagggccagggagcggacgccctccacgtgttcggcttcggtgatgatcccgtcgacgccggattcgagggccaacgtcacgtcttccttgctgaaaggcacgctcttgaaataaatgtcaggcatggtcccgttcctgttgtttcaaccgcatcaggcttcatgtcctgaccggaaaatgacggccccggaactccccggaacctttccccttcccttttcccagcgcagcttccgccgcgcagacgcctctaccaaaccggcgtttcccggattgaggccggggggagcgcccgtcaggaaacgccctcccccgctcccgctagccttccacaacggccagcgcttcgtccagtgacaggccctgatggaccaggccgcgcagggcacggacgagctgcacgcgcttgggatgctggaacacgttgcggcccacggaaaggccggaaccgcccgccttgagggaattgtccaccatttcgaggaattcgcgggtggtctcggtgcgggggccgccggcgatgaccacaggcacgcagcagccggcgatgacgtcggcgaaggaatcgatgtctccggtgtaagggactttcacgatgtcggcgccgagttccacgcccacgcgggcacaatgggcaacgacggcgggatcgtattcattggagatgcgggggccgcgggcgtacagcatggcgaggagaggcatactccattcttcggccacacgggcgacttcaccgaggtcggcgagcatatcgctctcgttgtcgtcgccgaggttcacatgcacggaaacgccgtcggcaccacggcggatggcttcctcaacggtgcatacgaggcgtttcttgttggagtagctggacagggacgtggaagcggaaagatggatgatcaggccgacgtctttaccttcgccggaagcgcggaagcagcagcggcacagccctttgtgcatcagaacagcatcagcgccgccgtcggccatgtctgagactgttttgtggatattctcgatgccttcgataggaccgacagagacgccgtgatccataggaacaataatggcgcggccggtttcacgattgaaaatgcgctggagacgaacttgcttgccgagattcatggtattccatcctttgtgtgtttgcacagggaagctgctgcatggatccgcggcaaaaagaaaggccgcggatttgcacccgcggccctgaatgtctggttttgctttacaacaacaccccacacacccctgtaccgcaggcgcgaccaaaataaaaaaagaagccccaaaagcggctgctttcgttggaagcggtaaatgcggtggcggtgtagttggtcatgttgtcctcaaatgtgtttcgtgaaaactagtcctcaatccggtttcctgtcaagaaaaaaatgtaccttttttcatcagcgcgaaaacgtttgcttttcgccacagttccgtcactgtccgctttttcccccgatcctcggcttccggcaatgcacaagagggaaacgaataaaaggcggcctcttgtttgttaacgaaaaaacgattacagtctgattaatctcaaagagcgctcctgcgccgttccgcagtaaagctctccactgtgcaatcttttacagggagaagagtcatgcctgccttgaagaagatcctgtgcgccctggacctgtcggatcagagcgaatccgtagccgaatacgccgttatgctcgccaagatgtccggagccagcattgtggcagtatacgccgcccccacgctgacccagtacacgggtttccatgtgccgccgaataccatcgacaactttgtcggtgaaatcgtttccggtgccgaacgctcgatgaccgactttgtatccgaacacttcaccggcgtggatgcccgcggcgttgtcgtcgtcggctacgcggctgaagaaatccttgccctcgccgaaagcgaacaggccgacatcatcgttatgggtacccgcggacgcaagggcatcgacctgatcctgttcggctccgtggctgaaaaggtcgtgaagaacgcgacttgccctgtgctgaccatccgtcctaccgacgacgattgattgacaggggggcagtccggcgaaaccgggttgcctccttttccttccctcggacggaaccgctccgtttcgtccttcttggtgtttgcccaacgttccgcgccattcgataggaatgcggaccgcaggacttcactgccggaatccggacctgccccccatgctttacagaaaaacgcttccgcatcatgggaggacgttttatggctccctccagctttcccgccttttccagaaaatgcacgccttcggaggcagatgtttccttgtgttccccgtttcagtgcttggggtgtgcgtgagcgtgtactatcacttacgcccggcattccctttgatcggaacctgttcgcagcgctggggatgatcccgggcgcgatcctgtgcgccctgtttctgctcatgccctacggaggctggattcccgccctgatctgtgcgtttgcgggcgccctcttcgctcccgccaccgccgcattgaaagggctggatttcggcctgattcccacgatgctctggggcttcatggccggaatggccgcgtatccgggagtcgtccttccgcaagcggcgcagcccgaagacgaaccgacgggctagcctgacgggttgccgcagagcctcacccccgcccctgccgccaaacgcagcgggccacgacgcaacgcagccaaggagacggcaatgggcttctccatacggtccgagcttgcaagctacgcgcgcctcaagcgctggtgctacttcctcttcgtcatatcctacggcggattgctggcgggcttgacctacgcggccatgacgcatcaatccccgcccctctggatcgggctcatccccggggccgccctctccgtccctctgctcctgctgcccacgcaaagctggcttccctgccttttccacgtcctgctcggggtcgtcttcgcccccatcatctgtgcccggcgggaagcggacctgtcgctcatcgaggccgtggagctgggcgccgtggcggggctggccctcatctaccccttttatatcctgtgcagtacgctggaaaaagaaggcacactcaaaaaatacgccccggatcagaggcggaagggctcccaagagacggaggaatgaggttcgccgccccttgcagccgcttcagcttgagccgtgcagcaagccctttcgcctgcaaaagaaccaagcctcgcctagggggcgcgggccgtgctgagaagtacggggaaagggcggcggagagcggagaagagtaacggcagtggcaggagaaaagaggaggaccccttccgcaaagaggccccctcctcttttccaatctggcttttctacaattccccggccttcagcaaggcttcgcgggcgtccgacagacggccctgcacttcgagggcgcgggaaagcaccagccagccattccgatattcgggacgcagggccacgctctggcgggccagcgattccgcaagctccggatcttcgccgccgtcaaggtagaggtcggccataaggctgagggcggccacatctcggggattgcggagcaacgcctggtgcagatgttcgcgggcctgatccgctttgccgagccgcagggcgagacgggcaagatgccggtacgggagcgggctcccggtgtcgagggccgccgccgactcgaaccgggcgcgggcctcttcaagccgttcctccgcctcgtcgagctgcccgagccggatcagcgcatacagatgcgagggcgacagccggatgcaggtgcggaaatgctccgcagccgcctcgttgtcgtgcaggctctggcagaccgcgccgaggttgtaggccagcgcgggatcgtccggggtacgctggatcgcctcctcgaaaaagcgccgggcttcggcatggcgcccaagcgaggcaaggcagacgccgagggaattccacgccagtacattatcctcgtcggccagcagggcaagcttatactcttcgatggccccgaacacgtcgccccggcagtgccgcttgtccgcgctgatgttcagggcgagagaaccgaactgcccaatatgcggcgcggggagcaggagcgcgtattcaagcgccttgcgggcgccttcgatcatgtccgaaggccggagatcgaggaacggccagcaggccagccccacgcccgcgcgcacgccgaggcgcgaggcgatgtcggcgcacagcttttcgtacagctcgcggagcggttccgcctccagatcgggatggaaaaagatgaggctgttcagcccgaagcgtccgccgagcaccttcctgccgcatacggaacgggcgagatcggccacctgcgccataatgtgctcgggctgcgtcatgggctggatcgcgccggaagattcaccgtcgcggcgcgccatgtccacgtgcagcagggccagcgaaaaccgttcgcactcgctgcacgcccgcgccagatgggcaaggaaatcgccatgccgcaggagcccggtcagaggatcgggacggtggaacacgccgtcgtcctgcccttcgggggccgcgttctgcacgctcagcctttgctcctcctgaagcagcgtcagggcgtcgtcgggctcaagcggccacgcgggatcgccaaggtgcaggatctccgccacggattccgattcacggacttccagcaggacgatctcgcctttgtagagcggctggagggactcgtccccggaaccgcccttgaccgcgtagttcaccgaccagaccgagaagtgctggccttcccgcgcgcccacgctccggccgagcgaggtcaggacccgcgaaaggggcatcacctgccggatgtgcccgccttcgagaagcagcctgccgtaccccatgacccggcccgcctggaaaccgccggggccgcgcgtgcgggccacttccgccgcgagctgggccttgtgcagcaggatacgcccgtgctcttccgaactgcgctggcgggtcccgtccatatcctgcggatagagcgcatagcccgcatggggctgcacgccgaactgcctgccgatcagcggatcgggcaggcgtacctgctccatcgcccgcaggatggcggcggaaaggttttcgcactcggggcgcgtggcttcgggaaggaacaccgcaaccgcgctgtcgccgatgcgcgcgccgaacgcctgctcggggagctggccggaaaacgcctccaccagcttgcccacgagccgatccgcaaaaccgtagctgatattccgggccacctcgcgcacgccgtcgaaccggacgacaatgaggccgagcgtaccgccccggctgctgccttcgccgctttccagcccgaactcccgcgcgaacgccgactgtatggccccggtttcctgcgtgagccgctccaacagcacttcatgggtcgcaagccccgaacggggatcaagccgcccggccttatacagctccagattctcaaggcacagatcgacgatgccgggcagggacggcagcagcgccgtcacgcgctcggcgtcgggcacacgggccatgaacacgccgaggagttccccgtgccggacgagcggcagcaaaagctttccctcgtccggcagccattccggttccttcgaacgggtctggcggggaaaatagacggcgtgtgcctcgaacgggagcacgcggtacagactgtcccgcagccgctgctccagatccagcagatcacgccggacaaggccggtcgtcaggcccgacatgcctaccacgtcaggcggacgggcacgccgcgatccgccatgtattgcttgagctgcccgatcgtatattcgccgtaatgcacgatggaggcgatgagcgccgccgaagcgcggccttccgtcacggcgtccaccatgtgctgagggctccccgcgccgccggaagcgatgacggggatacgcacggcgtcgcagatcaaacgggtgagcgtcagctcatagccgtccttggttccgtcggcgtcgatggagttgacgcacagctcgcccgcgccgagcgcctcgcagcgcttcgcccactcgatggcgtcgattcccatggccttgcgcccgccgtggatcacgatctcgtatccggacgggatttccggggtgacgggaacccgcttcacgtccatgccgaccacaatggcctgcgagccgaacgcgtccgcgccctgcgaaatgatttcaggatgcttcacggcggcggagttcacggaaatcttttccgcgcccgcgagcagcacggcccgcatgtcctgtaccgtggaaatgccgccccccacggagaaggggatgaaaatctccgaggcgaccttttccaccacgtcgaggaagatcccgcgcgcctcggcggaagccgtgatgtcgtaaaagacgatttcgtcggccccggcctcgtaatactgccgggcggtttccaccggatcgccgatgtcttcgttgcccacgaacttgacgcccttggtcaggcgcccgttgcgcacgtcaaggcaagggataacccgtttcgtcagcatacccggcctcccgcgctgcgtgccatgcaccattcatagaaattggaaaggatcttcaatcccggccgcccgctcttttccgggtggaactggatggcccacaggccgtcctgcccatacaccgcgcaaaactccgtaccgtaacagcttgtggcgatgaccttttccggggccgtctccacataatagccgtgcacgaaatagaaggccgcgtcagccgggacatccttcaggatggggctctcctgcttgcgggaaatcgtgttccagcccatgtgcgggatgcggataggcgccccgccttcctccaggtgctcgtcgaaacgcacgcagcggccttccacgaggccgagggtcggcgtgtcgttctcgtcgctgtgggccaccatgatctggcagccgaggcagatcccgagcaggggcctgcccgacgagacgacattgcgcagcacagcgtcgaggccggaatcctgaaggtggcgcatggcctgtccggccgcgcccacgccggggaaaatcacgccggccgcgctgtccacgacggcgggatcggcagtgatgacgcagggaatgcccagatgatcgagcgcgcggcgcacgctggtctggttccccgccttgtagtcaaggatggcaagcatagttcttcccggtaagccgttgtccgccgcctccgcgcggaaaaacgtccggcgggcgggagcgggtgaaagcccatcgaaagggccgaaaacacgatactatccggtttagcgccaggtcaaggcccatggagcgccggcccaagtgtcggtacgcccggaagcccgcatgttccttgccttaagaggcttgttgagggcgcatggaaagccggggttgacagaatccgtagtctgggtgaaatatatgacaattccacactccatcacgaggtaaaccaaggccctttctcttccgccaggcgcgggaggcctgccgtacggggccgcagcgctaaggatacgcatgataaagcgagccatcaccctgctgctcttggctcttcccttttatttggccgccgtccagcaggcggaaggccgatctccgggccccatgcttgaggtcttcaccgggggagccaccttctacagcgactcgttccacggcaagaaaacagccaatggggaacgctacaacaagaacgaattcacggcggcgcaccgctcccttcctttggggaccatcgtccgcgtgaccaacctttccaatgggaacaacctgctcgtccgcatcaacgaccgcgggccgggcaagaaaaaactcatcctcgacgtttccagggccgccgccagcaagctgaacatgatccggcgcggcgtgatttccgttcaagtcgaggtcgtcgccgacaagcggggcatcccggtcctccggaacaacgccttttacctgcggctggccagcgcacgcacgctcaaggacgcccaaaacaagctcaaaacgctttcgtccgccagctcctccaagctcaccaagcagacttcccgcaaccggtccggcgaactcaaaatcctctcggaacgccttcccaacggccgcacgcaatacttcgtcggccagggccccttcacccgctaccgggatgcgcaacacgccctgagcaaagccagagccaggcacactgaagcaagcgtcgcctgcctccccacgctggtcgccgaaaacacccgctaacgacggtttgagccgccctccgcaagcgcctttccgtatgcccggcacccgccactcttcggggctccacaccgcgccttttgggacaacctcccctgtttttcatgggagtcttttcgtgtgtcctgttggactttggcccaaaagcagcttaatcagctagtattaaagggaaaatatactcagctcccagaatattgttcaaaaaatcactaaatctttttcgttcttctttgcacaactttttccgtcaacaactatcacactgtttaaacatactttttatacaaaaaagacaaagagggaaacggttttcaactcccgaaaagccctttccggactggtgcagaaattcactctatcctctatcgtgccctaatcacgcgccatttgcacgagttcctggctccgcggggctaaatgtgcacaaaatcctttgatgacactgtgtttctcgagccttccttgacacaaacaagaactgcatggtatttttaacaagaagtaagataactgagatcaggctcgcgcgtttgcgcccgggccgtcttagaatatcccgcggcgctcagccgcaccacaatgcggttaccaaccaaaccaagtggaggtaaggcaatggcaatcaaacatccaactcccttgttggatcaactcgaaactggcccctggcccagcttcgtgtccgacatcaagcaggaagctgaatacagagcggccaaccccgacaacgtggaatttcaggttcccgccgacgctcccgacgacctgctcggcgtgcttgaactctcctataaagaaggggaaacgcactggaagcacggcggcatcgtgggcgtgttcggttacggcggcggcgttatcggccgttactgcgaccagcccgaaatgttccccggcgtggctcacttccacactgtccgcgtggctcagccctccggtaagtactactccaccgaattcctgcgcggcctgtgcgacatttgggaactccgtggctccggtctgaccaacatgcacggttccaccggcgacatcgtgctcatcggcacccagaccccgcagcttgaagagatcttctacgatctcacccacaagcttgacgtcgacctcggcggttccggttcgaacctccgtacgcctgccgcctgccttggccagagccgctgcgaatacgcctgctacaacacgcaggacgcttgctatcagctcaccatggactatcaggacgagctgcaccgtcccgccttcccctacaagttcaagttcaagttcgacggctgcccgaacggctgcgtggccgctatggcccgttccgactttgccgtcgtgggtacgtggaaggacgacatcaagatcgatcaggaagctgtgaaagcctacgttgccggcgaattcgcccccaacgccggtgctcacgccggtcgtgactggggcaagttcgacatcgaagccgaagtcatcaacctgtgcccctccaagtgcatgaaatgggacggcagccgcctcttcatcaacaacgccgaatgcgtgcgttgtatgcactgtatcaacaccatgccccgcgccctgcacatcggcgacgaacgcggcgcgtccatcctctgcggcgccaaggccccggtcgttgacggcgctcagatgggctccttgctcgttcccttcgtcccggttgaagctccttacaccgaagtcaaagaaatcattgaaaagatttgggattggtggatggaagaaggcaagaaccgcgaacgtctcggcgaaaccatgaagcgtctgtccttccagaagctgcttgaagtcaccgaaatccccgctcttgctcagcacgtcaaggaaccgcgttccaacccgtacatcttcttcaaggaagaagaagtgcccggcggctggaaccgtgacctggctgcttaccgctccagacatcaacgctaaagagaagggagaattaccatggcgtttgtttcttccggctacaatcctgaaaagccgatggaaggccgtatctccgatattggcccccgcaaatacgactcgttcttccctgaagtcatcaagaagaacttcggcaaatggctgtaccacgaaatcctggaacccggcgtgctcgtgcacgtcgccgaatccggcgataaggtgtacaccgtgcgctgtggcggcacccgtacgatgtccgttaccaacatccgcgaaatctgcgaaatcgccgacaagtactgcgatgggcacgttcgctggacgacccgtaacaacattgaattcatggtgaccgacgaagccaccctgaaggccctgaaggaagacctggcgggccgcaagttcgccgccggctcctacaagttccccatcggcggcaccggcgccggcgtttccaacatcgtgcacacccagggctgggtgcactgccacacccccgccaccgacgcctccggcccggttaaggctgtgatggacaccatgttcgaagagttcaagaacatgcgtctgcccgcccccgtgcgcatttcgctggcttgctgcatcaacatgtgcggcgccgtgcactgctccgacatcggtatcgtgggtatccaccgcaagcctccgatgatcgacgaccagtgggttgaccagctctgcgaaatcccgctggctgtcgccgcctgccccaccgccgccgtgcgccctgtcaagagcgaacacgacggcaagaaggtgaactccgtggccatcaagcaggaccgctgcatgtactgcggtaactgctacaccatgtgccccgccctgcccatctccgacggcgaaggcgacggcatcgccctgatggtcggcggcaaggtttccaaccgtatctccatgcccaagttctccaaagtggtcgtggcgtacattcccaacgaaccgccccgctggaacaccctcaccagcacgatcaagcacatcgtggaagtgtactccgaaaacgccaacaagtacgaacgtctgggcgactgggccgaacgcatcggctgggaatccttcttcgaactgaccggccttgagttcacccatcacctgatcgacgacttccgcgatccggcttactacacctggcgccagagcacccagttcaagttctctgaactggccctcgccgcccacggtggcgaagcccacgaagctgcttccgccgctgaagtcaccgccgaagacaaggaaattgtcatcaacttcctcaaggacaagatgtcccgtcccggcgcgaagaccaagtactacttcaaggacttccttgaactcttccccgccaagggcacccgcgacgtcaagaacgtcctgtccgtgctcgtgtccgaagagtctctggaatactggtcttccggctccacgaccatgtacggtctgaagggcgccggcaagcaggcctcttccgaaggcgaaaactagtcttaacggttgcgggggagctttcctccgcgcctttccctcccgtccccgctttgccgggaacgggagggaatattgagggaaggaagcgattccttcccttttcttttccgggagacggcatggcccaaaacattcgactcaggcacgcgcagtccggcgtcatcacaaccggattctacgggttcagctggacgacgttgttcttcagcggttttcccgccatattccgtggcgatctcatcaccggggtcattgtcctgatcctcagcgcgtcatccttctggctcgtggccatcatctgggcgttcctctacaaccgcgtgtacacgacacggctgcttgaacgcgggtatgtctttgacgacgatccggagaaagtccgggaagccaaacgcgccctgcgcattcaggaataaacatggatgccgctttcccctccatcaccgcgccccgccttgtcgtctccggcctttccggaggcggcgggaaaacgctcctctcgctcggcctcgcccgtgccctgacgcttcgcggcctccgcgtcaaaccctgcaaaaaaggcccggactacatcgacgccgcatggctcggcctcgcttcgggacgcacgccgaccaaccttgatcccttttttttgacggatgcccggttgcgcgcgcttttctgcacctcattcggcgatgccgaccttgccattattgaaggcaaccggggcctgtacgacgggcgcgacgtgcagggaagctgctccaccgcgaccctcgcccgagctcttggcgcgcccgtcctgctcaccctcacggtcaccaagatgacccgcaccgccgccgcggtcattgccgggctggcccacttcgagcccgtcaatctcgcgggcgtggtcctcaaccgtgtggcttcctcgcggcacgccgccctcatccggcaaagcatcgaaacatacaccggcatccccgtcctcggggaaatcccccggcttgccgaaaaccccattcccgagcggcacatggggctcgtctccatgcacgacgaaactccggacgctctgggccgggcctccctgctcgccgccctcgactcccttgccgggcttattgaacgccacatggacatcgacgcggccctgcgcctcgcccgctccgctccggatctgcgggacgtcgaaccgttctgggaaggtggagaggatgccgctttccgggaagcgggcacccttcgggaaggctccggcaacgctcctcagagtgccgatgcgacggctgaggataccgatctcggaaaaacgttcatcgcccccggcgatactacgcagccccataatgagcgggtatccgccgaaagcgcgtcttccggcatggagccctctcgcccgccggaaccagccagcacaaggaaaccgtccgcctcagcgttgatccactccggccttccgcccgtaacgcctgtaaccatcggcttcgtacgggatgcggccctgtggttctattatgaggaaaatttcgaagccctgcgccgggccggagccgaactcgtcgaattgagcctgctctcgcccgaaccgtggcccggcgatcgccttgacgggctctatctcggcggcggattccccgaaatggttcccgaacgcctcgcggattccccgcatctggcggaaatccgggaatactccatgcgcggtatgcccatttatgccgagtgcgggggattcatggtcctgtgccatgagttgcagatcaacgggaagcagtaccccatgaccgggattttccccgcacgggcggaattctgcccgcgtccgcagggcctcggctatgtggaggccaccgtggaagccgaaaacccgttccatccggtaggcgctctcctgcgcgggcacgagttccactattcccgctgcgtcgcgctcggagaactggaaccgaccctgcgcctctcgcccggcgtgggcatgtccggaccggggcatcgcgccaaagggcttgcggcggaaggcccggacaacctcaagagccgcgacgggctcctcgtccgcaacactttcgcggcgtacacgcacctctttgctccagccgtcccgcactgggccgcccgcttcgccgccgcctgccggaaaaatgcctgatccccagagagggtggcgtttcctcaaagagtcacacgcctccctctccccgaaccttccttcccacgcgcttcatcttatccgccaccttaggtttcgagatccgttttgacgctcccactctcgttgatgaaacacccgccatcgttgcgccgcccccaaaaaagaaagggagcatgatatgttccgtgattttctcttaatcaggaatcatttctatttacatcctatcgtgtttgcggtaacgtttttcccacatcacagaacaacactacgctcccgttttttgggggatggaggcttatcatgattgaggaacgcaccggcatcatcactttccagggcaatcccctgaccctcatcggcaaaggcgtttccgtgggcgaagcggccccggaattctgtgtgctcgccaatgatctcacgccgcgcacgctggccgactacaagggcaaagtgctggtcatcagcgtggttccttccctcgacacgcccgtctgcgacatgcagacccgccgtttcaacaccgaagccgccaagctttccgacaacgtccgcatcctgaccatcagctgcgacctgcccttcgcccagacccgctggtgcggagccgccggggtcgacgccgtcgaaaccctctccgaccaccgcgacctttcctttggtacggcctatggcgtcgccatcaaggaactccgcctcctcagccgcgccgtgttcgtcatctgcgccaacggcgtcatcgcctacgaacagatcgtcaaggaagtcacccacgacgtcgacttcgaagccgctctcggggccgtgaaagcctgccttgaaaaatagttccgccaaggcgtgaactgaccagcctccccgccggacctctctttccttccttccgagaccttccggctcatatggcaaaggccgctcctgatctctcaggaacggcctttattctaggcggaaggcggctcttccgccgctgcctccagcgccgccacgcgggacttgagggcctccagttccgtttgcagggcctgcaccgcattggacggctcccagttgccgttgacggcgttccacacggggacggcccccgccgtgcggctccggctgtccatcaacgggagcagcttcccgagccatgtattgaggcgctgcatgttcgccgtcacgatggcattccagccttgctgcccataggtgatcgtttcaagcccggtcggggtcaaactcgccattgcgtcttctccttgcttgtttcgccggtccgctcccccaaatggccgcagggccggatgggccggaactccggccacgggaaacatgccgttgcgttcttatccgttggaatgcccggctcaggccacgtattccccgtcctgcgattccacggtgacgtatgccgccggggaaacatacccgagctgccgcgccgtcacggacagcgcgaagcgtcccgagcgcgtaagggtgatggacgtgccgttgaccacatgctccgtacccgccgccgtaaggacgaaatccccggagaatccggcgggcaccggctcgttctcgttctcggtgcgcgtcccggccccgccgaaagcaacgtccaccgggctccagcttacggcgacggaatcccccgtgcgtaccgcccgcagcccggcgacgggccacgggaccatcgcctttccggtcacggcgagagacaggcgatccacccgatccgcgccgagcacctcgtctcccgaaacgggccgcagtttgatgttgtgcgtgcctatgggcagtccctgcaccgtgtttccctcgcccggattccggaatacccatatcgccgctcccgacgcgtgcgcctggacgggcgtattcatgtagccccgcaccacgccggagagccgcgtcgtctcggagccctcaagcacgaccgtctggaaaagcatcaattcgtctccgacgagcgccatgcgccgcgccccaaacagatccgtccggctgaccgggccgaaggacggatcttccttatagggccggtacagcagcccctgcgtgtcgtccacggcaagcgtactcgccggatacgcctcggcaagggtcccgtattgcgcccacggagccgaaagaagcccaacggggctgtagtcggcgttcgtggcggaacgctccaccagcaccccttcctcggaaagcagctcccgcgccgccagcacgagcaccacgggctcggatccggtttccgggtttcgcggcagttcgaaaagccgcgcgtgccgcaagggaaccggcgagaggtccggagccgaccacggcgggatgccggtgaccggcgggtacacgacggtcggaggagccatcggatcgggcagggtttcccccggaggaacgaacgttccggacagccgctccacaacctgcctggcctgaatcgaaatgcggttctcggacaggttcccgcgtacgacttccagcacgcgcacccgtaccccggaaaggccgaaacgcgagtgcgtgatctcgaggatctgcccctgctcgatgtgggcatagtcacgcgacacgtcgaacgagaacgaggccgccgggtaggattccacatcccgcagttcctcgatgcgccgctgcgccgcgctgcggtcggtgaaggcggtcagatccacgctctttttgcgccgcagcccgaggagctggatggaggccgcgttgttggcggtcacggcacgctcggaatagtcctgcgccgcgtcggtgaacttgccggaaagatcgttccacgtcgtatcccacgccgcccgcttgaaggaaaaggaaccttccagaaagtcgccttccccaagcgtcgccgagggcgccacatccggatccggagcccgcagggacagcgtcccgtcagcccgctcgatgagccagccgcccaccgccccgaacacctgcataatgtgatcgcgtacgggtttctgacgcgagaacacgatgttcaggccatagcccttctgtgcccagaacgacgcggcggcggaaaaactcggcttgtcgatggaagaccacgaagccccggcatcaaggagcagctggaggatgatcgccgccggattcacgccgttggacaggatggcgtgttccagcgggatatccccgcagaaccgcaccacgtaatgcagcgtcggcatcatggatacgttgaagcccagataaaactgccggagccagacatgggacactcccgggaggcggctggcgtacggcccggcctgcgcgggataaaacgcgcccgtgccgttgttccagacctgttcggcgcacgagatggccccgccctgctccgtgagcagccggtcgtcctgatatacgccgacaagttccagcggccccatgccgatgccctgccacacgtccatgcggtagtggtagccttgcagcaccttctgctttttctttttgccgcccttgccgcccacggtcgtttcctcatactccggctcgctggaaaggttgccgtagtacagcaggtttcccggcagcctgacggtgccgaacacgcgggggatgaccgtaccttcctcagccgtggtcagacggaaggcgtcgagattggccggggccatgtccgcccccttcgtggagcgcgggcccttggcgaacagcgtcgtcgccacggtcgccccgatggtcacggcggcgatgataagccctacgcccatgcggccacctccgcttcggcaatgacgatgcggaagtgccgggtcatgcgcctcagccaccagttcccgagcggcgtaaacgatacgccccggtcgttgatggcgtgcagcatctgaaacccgccgtcggcgcagggccagaccagaccgcaatggttggtcacgcggcgctccgtagtggaaaacgccagccagtcgccccgcaggagcggcgtacccacaggcagggaagccatctccaaccccggacgcaagtagtcgcgcatatgccggtggctggcctccagcacgtattcgtcccgcgtatgctcgtgccagtcgcgggggtagtagtcgtactccagacgggtcagcagcccggcatccagcagcgcctgcccgacgaacagcgtacagtccgcgccgcgccccctgcaccgctgcaaatgcctgtagggggtcccgagccatgactccgcctccgcgcggaaggcttcccacgcggcctcgttgtcgaaatagtgcataacgatccttcctttggaaacggaaaagaggcctcttcccctgaagcatccccttccggtttcctatttgaatccccagacggcgggattccggctcgggatggaggcgcagccgccgaaacgggcggaattgccgaaacggtcccggcaggtggcgggcgagccgtcgcatccggggtatgccgtgacggtccctccgttgcccacccgggaatcgaagggcagctggagcgtgatcgtgtcgccgccatgcgcgacgatgaaccggaaatcccctcccgccgccgcgtacccgcgcgtaaaatacccgttcgggtacgcggcgaaggacggcgacgccagcagatacccatccacggacacggacgccgtcactccccatgactgcgccgccagcccgcaaccggaatcgaacagcacgaactggcactgtcccgagtagatcatgcggggcagcatggcatcgaggatgcagcttgacgaaaggcagttgaccgaaacctgcgtggcgtccgcccccgggatcacctccagcaccacgccgccgaaaacctgcaccgtatccccgctctcgggctcgtgctcataaatgttcacccgcgtcggcaggatgggcagtgaagccagataccgggtgagcagcgtatccatgcacgccgtcagcgtcaccgtggcggctttgccgtccacgctgccccgcagttcgccgcgttcgatggcggcgggcgtccactccgcgccgcgccacaggacgggctcccgcgaggttgtgagcgtatgtatggtatcggctatgatttcatagagttccacaatctggggcaatacggtgcgcatcagctttcctccggtatggtgcaaaacgacaactcacaccgggaaaccccggcggattcgtgccggatggccacgcagtccatgtccaaacgggcgaagtagtcccggcccacccgggaggccgggggcacggtcacgccgagttcggaactgagatgcagcgccagttcccccacgttcgcggtttccacggccacgagacggcggagcaggatatccccgcccggcaaggcgatccacagccgctggttggggatgaaaccgtccttcgcgccgttgtcccgcacgtacaggatcgccttgtccgccgtggacccgcgggtcagcgtgaaatattgacgcggatcgcgcaccagcagcgctttccaccgcccccgcagggctgtggcccgatccagcaggtcggcgagttcccgctcccgcaacaggtacttctggcgatgcgtcgacggggccacatccctccggacgcccagttccatcacgccgccgcgcacggtacgcagcgtacgcaacagggacgacgtgccgccgacaccgtcgcccgaccagtcggggcggtgcggccagaggtatgcgcccgtcccggaaggagcgttgggcaacgcccccagcgcaggctgcgcgcccgccagttcccggaattcaaccgaccacgtttccatcccgtcggaaaccacggcaggctccgcgctcgtcaggatacccgtaaacagcgggaccagccgcgtggcgccacccgcgaacacatcggaaaccggcgcggtcacggaaagcgtccggcccgccgggtcccttgaaagcagggagcaagccatgaatgtaccgctccggcgctcatgcagcatgatcaaatcgcacagccgcgtcagattccagcagtcgctgaaatccctcccaagcatgagcacctgccgggtggcgtcgatccccgtcacgtccagagcctcctgccacaaagggacgccgaacacgcgatctttcccgtgctggacaaggtggtggagccgctgcccgttcacgccgtcgccccagatcgtggcacggagcgtccgcagggggcgcttcgccaacgggcggcgctgctcgtcgccgttctcaccccgcgtcagcacggtgtcgaacgcgtaatcgatctccaaaccatccgaccaatcgggccagaacggaaacagaagcacgcgcgacgccgtgatcgtcaggctccgctccccgatgccggtaacgaacatatacgtcgtatcctgctgcgccgggccggaagacaacacggtgagaaggcccttgagcgcgccggtaggcggcagcacccccggagggaaccccgaaagcgtcgtgcccgcggacgatgcgctgttgacgccgacgagctgcacgggggcgaacgtcgcgttccagagcaccacgtcgagcgcctccatccccgagagcagccccagatggacttccgagggatacagatggatctgcccgtaaatgaggtccgcaacgctctcggccatgcggtgccccgagggccgggggagcggcgtggcctcatgccgcacttcgtccccccggtgcggggcgtcgccgatccacgcgcccgacgtgccggggacgctgtacgagcactccgggacgccgcccgcgcgcggccacagcacctcgaaaatcatgcttccacctcaacggcgaggccaatctcatccgagtccgagatgtctggcaggaccataaacacccggctcccgatgctgatgcgatccttgggcttgagcccatgcaggttgaccgcccaatacgggagctcgcccgcgaggcgcacgtccgcgccgttgcagacatacagcagcggtttgatcagcatgtgccggagcgtcccgctgttctggaggagcgccgcgttgtactgggggaccgatgcgcagaccccgcccttatgcgtatagtttatggttttcccgcccgcgttgacggtccctgtcaggcagtagtctgtgttcacccgcccgatgacattgcgcacggtgacgctggtgcggaccacgctggacgcaagcgggctcgtcctgtagccgtaggtcccctcgggcgggaatttctcggcattggcccccttccagagcagccccacgttgccgtagttgttgttgcaaaaataatactcgttgttgacgtcccgctgggccacgtacagcgcggaaagcatgagccccatcgcgctgttcgcgctccacgccgaccacagcaccatgttgagttccgtctcggcatcgaagccgtccgccgctccgaacatcagaggtacccagcccgaatacggcgtattggccccgtcggaaaacgtgtagaccacccgcatcgccgtcatgacgaatgtcgggcagaccagcacgatctgttcggcgaccggcggcagaatccaccagcccgtggacgtgatgctgtatttccccggggtcctgagccagatgggtttcccggtcgtccgcgagcaatagccgtgcgccagcctttcggtgaaccggcccggctgcgcgtcccatgccgcggaagcgtcgaaccccgtattgccgtgcacggccagcagaaagcgctccgcgttgtcgtgcgcctgcaagagccgcagcgaaaaaaagagccgccggttcccgccgcccgcactgtgcaggtacagttcgccgtcggcgtccacggcgtttttgtccaccgtccaccccccggcctgggcggcactggcgatgttggcgagcacgcctttctccgtccctacgttcgtgtagctgaaaaccttgcagggctgcgccatcattcatctcctatggccataaaactatgccactccacccggttaacgtcggggaagaggatgtagccgtccacgtcgctttcaatgccggccagcgagtcgggagcccagcgcaccccgtacatctcgcctatggccgacgccccggtgtagtcgcccgtgttctcaagctggatgacgtacatgggcaggagcaggcgcggcgtcccttccgggaacacgatccccgtcccctgcgtgtctatcttcatgtccgtctcatagccgctcgacgagcccagcaggctggtcgtggggcaaatggcgaagtgcgaggtccatacgccgtccggcctgcaaatctgatgacaggcgtgataataagaaaaggtcgttgccaaggggaaagagccccgccgtacgaatgccagattccgcctgtgcagatccgcatcgcgcgagcccgtgctcgtgatggcgtcgtgccatgtcgtgtattgccacaggctcgtgtagccgtccgtcaggcagaccaaaggccacgggttctcgctcggcagcgaaaaacgccggagctgccccagataggcgttggcgtataccccgttgcactcagccacgatcacgacgcgcgccttgttgctccagatccagacgttcatggcggcattccagcaaggcaggaaggcatgggtcccgttctgccccgtcccgttgccgtaggccgtatccagaaaccccgttccgcccggcgcgctgtcgaaggccttgtagaccttgcagacaagcccccccttcacgccgtcggtatacgtggcggcgcaaagccccacgtatacctcttccgaaccggacagcccggtattgcggaagaccgtcgccgggccccatgccagcgaatcctgacgcgccaccgtccagtcgcggcccggcgtgcccggatcgcccgtgatgaagttcgtcactttggccaaaaggtcggcatggttggccgccgttatcttgccgctgaatgccattgctttcctcctcaggcgcacggcccgcacaggacgtcaggacgcaatcccttcctcgcccaaaatattgatgagcacgcgccgcccccgcgtcgaagccagcgcccgatcgaattcacgttgaaaatccataacgttgatcacggtcagcccctcattgccggacgccttgccgccttccgtcagggaaccgtttccgatctcgccgccgagggcataggccgtgcgcttgcctcccgatgcagggagacgcggcgacgcgaacggctccagcagttcccgggggacactcctgcgccgcagcgcctccaaagccgataccccgtaatggcgtaccgtgggcctatcgagcatatattcgccgggcgtggcgcggatcagcacgttgtccgcccgctcgcctttatcctgcccgccgatgagcccgccgaacgcgaaccctttcagcggcgtgctcttgatggcggccacacgggccatgcccgcggcgacggcggtggcggccatgatcgcgcccactaccgggccgccccactccatgccctgcgcgtacgcggcctgagcggccttataggtgctgatggtggcctcggcgatggccagtgcctgatacagctggtacacgcccttgctctgggcaaggccggattcgtagatctgcttcatggcatccgccatgccgccagccagcgacaacgccccttcaagccgctgggcgtcgatcgccttctcgcgctccgcctgttcggccttgatggacacttcccgatccgcctgtgcctgctgcgcctcagcccagttctgcccatgcgccacaaaagcttccagctcggcctgatacgcgtccttccgggcttccagctcctgcgccatccgctcggcctgttccgaagcgttttcccgctccatgtcagcggtttctcccgcctgacgccgccgctcggaatagtagtccgccatcgtcttgccgctgtcccggaatgccgcatccaactcctgaagcgcccccttggacagcccttccagctgatcggcggccccttccgccagcttccccagatccagcccggaaacggcctgcccggactccttgttcagcgcggagacatcagcccggagcgagcccaccagttcccgcacattcgagagcgcccggcccatatccttcaaccccgcggaaaccgaatccttgaggctgagttccagcgtatagccgccatgtcccatctcccgctcctatgcttccagaaaggctttgaactgccgcccgtccgtatgcagcgccacacgcagggcaagggcggcgtccttcatgcgttcgtcccggcgctgcgcctcggcctcaagcgcttcgacgaacgcgctccacccatactcgaatacgtccctgtgcccggcccccgccagccgcatcaccgtacggaggagttcccgttcagagccgcctccatcagatcgctgcgcaactgagcccggaacgcctccagcaccctgccgaagcccaacgccccggctatcctgaaaaaagccgcgttgacctccttgacctgctcccacagcatctcaagctcgcccggcgtcatgtccatgaggtcattggtagtgaggttggacatcctcggcagcagccgctccaaatcgtggaccagcgggcccttgccgaactgctcgcacatatccagcacttcgcgcaccgtcagttcctgaaggcgcacgctcagggtgcccttgtcgttttccatcgtgaattcagctgattttcgcattgggtatccttgtcgggaaaaaaatgatgcgggggagggaaacctttctgaagaacccccataaaggggacaagcggttctccctcccccgcgccccctcccttcccaagactttcgactggtggggaggcggcgcggagtaggtccctgccgtttggaaacgaaactggaaaagaaggaaacgcggttcttcagggaagggttccctcattttcacaatatgttttacggttatccgagatagcgcacccggaagaacgggctttcgggatggttcagatcatcggcgagcacttcgccggtcatggggatggaggccagttcctcactgatgaggccgacctcgccgctgagcgaaagggtcaccttccagcactgcacgacaagccccggcccctgatcgggctggcctacgaacagcagttcgccggtgacgtcgctggcggtcagcgcatcaacaagctgctcgtcggaagactcgcaatcggcggtcaggaacaccgtgtcggcggagcaggattcgcggacgcgcagcaatccggtgcgggcgttgagatcgtagtcgacgccctgacggtagcggacggtcggcgcgctggccttgtccgtgagcaccacatcggcgacgcgggcgatcccctgtagcgtggctttgattgcagaggcggcgatctcctcgccgggcacaaaagtccctcgcacgtttacgcactccaaaaccccgtccgttacataggcgacggtcgccgtggcgctggacgtcgagcccaccacggaggagccgggcgcgaacgtccccccggccaccgtgccgtgctccagacgcgtgaagccgagcttctccttgccgacgaacgtatacaggcccttgttggcgctgacggactggccggacaccgtcgcggcggcctgcatctgcttcgccaccgccgcgcccttgaaggcccggaggatgtttccggtggtgaattcctccagcgtgaaggccacggccgcccccttctgggtgaccagctggagatccttggtcttcgtgccgctcatcgagctgaaatgctccagcttttcttcggtcaggctgatggtgaaggccggggcgtttccgagatggtcgtagccttcgctccctacggcgcggaaaaacagctcgcccttgccgtacaggtaattccttgtctgcggacttgcagtcatatccaatccttacagtgcaatattgtgtatggtcgaaacggtcatgcggtagacgctggctccatccagaacgaacccttggatagaggacggcaggcacggccccatgcccggaaggggcggcacgccgaggagccgttcccgggccgcggcaagcagcgcataggttccggggtgccccggttccggtttttggccgtttgctgccgatcggtaacttttatccatgacgtagacctcgaactccatgcgttcctcaaggcggcggcccgaaggcatgaacgcgggagaccccgcgtacaggaccagcaccgccggaaaaccgcgccgcagccgggcccatgtatccttgtccggttgtccctgaaacgccgctacggtctttgctcccggcgtttccctgagcggctggagcagttcgagaatcgcgtcctcaacctccatcggcgtgcggctcacggcgtcaccccatcccacgggcgggtgcccggttcgagcaacacggcccccggcgtttccgttcccgcaggcggcaggccgggaatgccagccttgccgtccgcgacgtcgcgcagccaattaagcgccttggtgtaacgctcacggatgggatcggtgtcgcggatgtcgcccccggtgagccgataccgggcgatgtccccggcaaccgaaaccaccacgggcggaataggatcagagtccgaaagcggcgtcgcatagcgatccgcgagatagctgtccacttccgaggatgctcgctccagggcgtcggaaatgaccgcttcgtcgagttcgcccgtgccctgcctgtccgaaagcgtgcggatttcgtccgccccgaacaggctcacaagctgatcaagcgtggcgtatgccataagaaatgcctccggcggcaatccgcccattcttgttcggctgaggcggactcccccgcctctcctccggctgacgccgtgcgggggagcccagagaagggcactttcacaagaaaagcccctcccacgccttcgctccgctaaatcagccagtggctgaccagcagcgtcgcggcgcggtaccagatattgctgccgccgtcggggtcctgctcggcggaaacgacgcggcgggcggcggactgaagggacgggggcacgacaagcatcgtcccggcctcaccgccgaaaccgaggccgaggggacgcccgccatcggcgcggaagctctgcatggcttcaagggcggcggcgaaattggcggcgttcagctcctgcgtgctgcacacggcctgctgccagaagccgtacccgccgttgcagcggtaacggatgccgtaggggatcttgtccttcataaagacatagtcgttgtccggattggtgatgacctgcaattccggggcggtgcgctcctgaaagatgaacgggcgcagcgggcgggagacatccagcacgaaccacggcgtcccgtcggtgaccgttccgtccacggcggcgggacgcaaccagttggagacggtttcggcgtcgcctgagccgtccgcgttcaggtacacgggatgatccacggcaaagaacgccttgccgtcatagcatgtgccggacatgccgttcttgaggaggccgaacacgatctcgtcgggatgcgtcccggcggcatagcccatttcgcggaacagcggggcatacacgccgatgtcgtcgtcctccacagccgtgcgggggatgtccacggtggcctcatagaggttgttcatcaccgaatagccgtgctctttgatgtttttgaaggagcggtcgccggaccattcgcggagtttggggaactgcccaatccagccgtacgtattgcccgccgagctgctcggcacacgggtggacagcctgtcccactgggacggcgcggacgaaagcgcatcctgaaattcacgctgaaaacccacacgcagggccgaaacaagggaactcgtcactactgccattgatatatcctcatgatgaaaaacggttctgaagagaggagacgggccttttccaaaggaaaccgccgtgtcctctccccctggttccctcccctctccctaaaagccttcgctgataggaagatgatgcggaaggaacccctgccttttcacttttccaaaccggaggacggacgcgaaagaaacagcttttcaagccgcccatcccgacgccgaccctccccggctctcccttacccccgtacagcgagatactcggcctcgctcaggccgagctgggcgcagacgaagcgctcctcatcggagagcggagacgcggcgggagccgacagcgcggggcggctgcccgtgctctggaacgacgagagcgcggcaatgggcgaaacggcggcaagataggtttccagcgcctccgggttctggcgtcccagcgcggtggcccagccgacaagcccacggctcaagcgcccgtcggttacggcggtttcgacgctccgggccacgcgatccccctgcgtgacgctgagcgccaccgaaagctgatcgcgcagggctgtgttggcgcgtaccagagaggtcagggccgcctgaggatggcaagcctgcaaaaagtcgaacagcgtgggccgggcgtttccgggcagcggatctgcctgatggggaaaaggcggctgtccgggcaaagcgggcggatcggacgcggcgggattcgcgggcgtgagcagggattcgagcttgtccaattccgcctgcaaggtttcctcggctgcgtcttcaggcaggccgagcagctgtttcagccgattgagcgcattcatggctgtctccggttgaggggtgtcggatggagggaaatcctcggtcgcggcgacggcgccaagcccgtcaagcgcgggaacattggtcagggccgcgcctttcagttccagtacgtcgccgttttgggggttgaaggagaacaccggggaaatgaaacggtattcgtcctgttcgatgaaagccttggcgccttccgtccaccggatcgacgcgaacagcccctgccccggctcgtaccggagcgactcgatccagcctgcggccggagcgggctgcccgttgtggcgggcgttgaggctctggtgctcatagtcgacggccagaggcgtctcgcgccgcctccattggtcgagcacatgttccgcgccgggaccggagaggttccatgcgttgaggtttcctcccgtgagcgtgccgggcctgccgtcgcgcgcggcgaacgcgccgtcgggcagaagccggatctccgggaaaggccggcggagcgaatccgccaccgcggacaacaaaaggggatgtaggggtgattgcttcatgagctgcaccctacgcggcattgcgccgcaagaaagattgaacgatgtcagcgggtggaagaagcaaggagcggaaaggatctggcgtggaacaggccgaccctaaagggaaaaacggcaaaagggctacgaggggcacccttcggcacaccgcaggaagaagagggcggtaatttggtgaaaaacaaagcttatgcgataaaaacaatcgaaatcgtaaaaaattttccgcacaaactccgaaaaggcttgtaagcgaaacccgccggatctatgattggtcaactgaacaattttcggggtggagcatgaaaaaagttctgacgacctgcggctattgcggatgcgggtgcaacctgtatctgaccgtggagggcgggcgcatcaccggcgtcctgcccaagccggatcatcccgtcagccaaggcatgttgtgctccaaggggtggcaggggcacggcttcgcgcgccatcccgatcggctggatcagcccctgctccgtcaggaagacggcacgctgaaaggcgtttcgtggagcgaagcctaccgcgccattgcggaacatctgcgcgcggtgctccgcacgcacggccctgacaagttcgccatgctcgcctcggcgcgctgcaccaacgaagagaactaccttgccgccaaactgacccgcgccgtgatcggttctccgaatatcgatcactgcgcgcgcctctgacacagccccaccgtagccggtctggctacagcgttcgggtccggggcggccaccaacggccttgaggaaatccgcttcgccgacaccatcctcgtgatcggttccaacacgtcggcgcagcatccgctggcctacgcccgcatcacggcggcaaagaaacgcggggcaaagctcattaccgtggaccctcggcgtacgcccgtggcaacgctgtcggacatccacctcgccatccgtccgggcagcaacctcgcgctcgtcaacgcgctgatgcacgtcatcctgtttgaagaaaaagggcaggacgacgccttcatcaacgagcgcacggagcatttcgacgcactgcgcgcctcgctggagggctgctctccggaatgggccgcgccgctcaccggcctccagcccgaagccatccgggaaacggcccggctgtacgccaaagggcccaattccatcatcctctactgcatgggcgtcacccagcaggtaacgggaacccgaacctgcggcgcgctggcgaacctcgtcatgctctgcggcatgatcgggcggccttccaccgggctcatccccttgcgcgggcagaacaacgtgcagggctcctgcgatatgggcgcgctccccgaaaccctgcccggctacgtcaaggcggattccgagctggggcaccagcgtttcgcccggctctggggcccgttcgccgacgagcagggcaagaagctcaccgaaatcatggacgggatgcgcgacgggagcatccgggcggcctacatcatgggcgagaaccccatgcagtccgatccggacgcggcaaaagtcgaagcagggctgcggaacctcgatttcctcatcgtacaggacattttcatgacgcccacggcgcggcttgccgacgtgatcctgcccgcggccagctatctcgaaaaacaggggacgttcaccaataccgaacgccgggtacagctcatcaacgaagtcctgccccccctgcccggcacccgccccgactggcgcatcctgtgcgacgtgatcaacgcgctcggcgggcgggcggactacgattcgccccgcgagatcttcaatgagatccgtcaggtggtcccgagttacgcgggcatggactatacccgccttgccgaggaacaggggctgtgctggccctgcccgaccccggatcatccgggcacgccctatctgcacgccgcgtccttcacgcgggggcgcgggctgttcacggtcaacgacgtgcccgacgatctcggctgcgccacggatgaaacctatccgttcacgctgctcaccgggcgcgtctcgcaccactaccacaccggcacgatgacccggcgctcgtgggcgctggaccgcgagtatcccgaggcgtttctcgacatgcacccggacgatgcggcggccttgcggctcaaggacaactggaaagtgcgcgtgacgtcgcgtcagggctccatcgtggcccgcctgcggacggccacggctctccagcccggaaccgtttttctccccttccatttcgcggagagccccgccaacgcgctcacgagccacgagcatctcgaccccacggtcaaaatccccgcgctgaagctcacgcccgtgcgtgtggaggaggcgaagtaggggaaaggaatatcgggggagggggaaaccttctggagaaagtttccctctcccctcccccgagccccctcctctctcccttcaaagactttcgtgtttatcgaatccctgttcgcggtttttcctttggaataaagagttgctgtgtattcaactaatcagcaaggtttttgaaacaaatggggcgcagcctccccaccagtcgaaaatattggaaaaggtgggggcgcgggggagcgataccccttcaccagcagggtttccctcccccgtattcccgcctttcccccaggagccctcatgttcaagttcaaagcatcggatctccccgaaatactgacgcgctggtcggcgcggtattcggtattcgtcccgagcggaagcccggacaacgcgcagatgcgcatctggtcgcgccgtacccggaaagaggtccggttcatggagccggacgaatacaccaacctgatcgtcgcgcccaagggattcgtcttcggcgagcgcgaggagctgttccgctgggaaggcaacgagaagacctgtaccgccatcagcgcgccgtcttcgtcatccttgcaggaagaagacaagatcctgttcggtctgcggccctgcgacacgtacgggctggcctacatggatcgcttttttctcggcgagcaccacgacatcaattaccatttgcgccgccagcacgtgttcatcgtcgccgtgaactgccttgaggccgggccggaatgctactgcgcctcgatgggaaccgggccgttcgcggaaatcaccgcccacaccgaatacgggatgcaggcgggcaaggggtatgacctgcttctgaccccggattacgggcccgaccacaagaaaggggagaagggagagaacgactggtactgggtggaggcgggatcggaccggggcaaggcgctcctgtcgcacgtcgcgccgctcctgtaccgcgacctcgaattcacgggccgcagacgcaagaaagcgttgcaggaagacgcgctgaagacgttccgccgcacgctggacacgtccacggtccggcaggtgcttgccgcgcacttcaaggacgaagaatgggacgccatcgcctcaagctgcatcgcctgtaccggatgcacgcgcgtttgccccacctgtacctgtttcaccaccgaagaggagcaggacacgccccattccggcacccgcgtccgggtctgggactcgtgccagtcggtatcgttcacccggaacgcggaattccataacccgcgctccaagacttcggctgtgcgctaccggatctacgacaagctgcaatatatcgaagagcgcttcggcatgaagggctgtaccggatgcgggcggtgtgcggccgtctgcccggcatccatcgacatggtggacatcatggcccggatgaaggaacggacgccccacgaggtgctggaagcccccgccccggcggtcaacgtgcactacgagcgcgaggaacgcctgttcgaccctcagccgtatacgccgctcgtagcggagatcatcgatatttttgaggaagccaagggcatcaagcggtttacggtccgctaccgcgaccgccccaatcaaggccgccccgccctgcgcggccagtttttcatgctgaccgtgttcggcgcgggggaaatcgccatttccgtgccgttcagcgaccgcgtgaaggatgccttcaccttctacgtcaaaaaggtcggcaaggtcaccacggccatgcacaacctgaaggtcggggacatgatgggcctgcgcgggccgttcggcgtgcccctgccctacgagacgctgaagggacgcgatctgctggtcgtcggctccggcgtgggccatgcgcccgtgcgcgcaacgctggtccgggccatcgaaaacaagccggacttcgggcgcatcgccattatggcgagcgcttcgacctatgacgggctgctgctcaaggacgacctgcgcgaatgggcgaaagtccccggcgtcgaggtgcactactcgctctccaagcctacggatcaggtggatgcgcacatcggctacatcaacgacctgctgcccggcctcggcctcgactggaaaaacacctcggcgatcatctgcgcctccgcccgccgcatcaaggccgtcgcccgcgacctcatgcaactcggcatgaagccctcggacatttacacggccctcgaaaccaacatgcactgcggcatcggcaagtgcgggcactgcaaggtcgggagccattacatgtgcgtggacggccccgtgttcacgtacgaggaaatgctccagcttccgccggagttttagacacattgaggaagggagagggacgctttccaaaggagtacgcccctcccctttcccacttcaacctcccgctgtcattgaatccctcggcccaatcccccggcagcctcatacggaagctgtgcttcttgtcttttttcaagaagataaaaacagataatatcatgatattatagtgaaaaaaatattttttccgcacaggagagatttttttcgcgagagttccccaaaaaacgcttgacggaaccgggccgtccgactatacctctttctcgtgatgcggctgtagctcagctggatagagcaacaggctacgaacctgtaggccgggagttcgaatctctccagccgcaccagaaatgaaatcaaggacttggatgtaaaaatccgagtccttttttcatgcctgaaaaagcgtttccaaccctatttccaaccctcacgctacaaagagctatcgcttgatagcactcctgataaatccttcgacgtttttgctccgtcaaaacctgtttaccgccttttggggaaatgaaccagaaaaaatatttttcctcaacagaggtaagggtatccggtttttccggataccctttagcgagttttactcgtccatctcatccgctatgacggtcaggatcgcaaccaccacgggtatccattttccgagactcatatcttttttctcctatctggttatgaaacgagacaaacggcactggcgggcagttccgcaggcccattcgacgtgctttccaaggcacagcggcatcctcgacaaaagccccaatcggcacagtcggcaggtatccatcatgccttcctcctcaaagccccttcgagcagttcgaacagtgccggagcaagctgtggaagcgtctcaatgacgcggctggcatgaggcagcaaggttgcaatgctcgaacacatgatgctgaggccgtagcattcgaatccctttttctgagcctgtctgagcacctcctgcgcggcggggatggaatcgggtttaccgtccgtgatgatcaggatgattttcctgttttcatgaagacagcacatctgctgcatgacccaccagagagattccgccatcggagtcatcccgtaggcgatttcggggaatctggcggtgagcttttcaccgtgccgaagaacaggggcgttgccccgcgtttcgccctgtttgcgccgggaaacgccgtaatgcccagatttacgcccgatatgccctgaagagcctttcccacggc

SEQ ID NO: 7578 - DNA, 500 bp, Unknown
  gut microbiota DNA sequence
gacgggcacgaccgttgccccgcgtttcgccgcatttgcgccgggaaacgccgtaatgcccagatttacgcccgatatgccctgaagagcctttcccacggcatagcacacggcattcgcgaacatgaggccggagtccgtcatggaaccgctgctgtccaagagaatgtgaaccgccgtatccggcgattcccggaaaccgttcttcacgaacactctgggattcccgaccgacatcctgtggcacagcgaagaggaaaaacgccctcgtactcccggcatgacgggcagccacttttgcgcctgcatgagtccctgaagcctgaaaccaagtccggcagtctggcgttcgatccggctgacttgtccgggaggaagctccgcaagccgtttctggcccgtgacggctaccctcagttgcttctgcctgtccttggggctgtccagttctatccgttccgccagagactcgccaaatcccctcggaagctcatcggaag

SEQ ID NO: 7579 - DNA, 968 bp, Unknown
  gut microbiota DNA sequence
cagcatgagcccggaatcattcatggaaccgctgctgtccaagagaatgtgcaccgccgtatccggcgattcccggaaaccgttcttcacgaacactctgggattcccgaccgacatcctgtggcacagcgaagaggaaaaacgccctcgtactcccggcatgacaggcagccacttttgcgcctgcatgagtccctgaagcctgaaaccgagtccggcagtctggcgttcgatccggctgcgttgttcgggaggaagctccgcaagccgtttctttcccgtgacggctaccctcagttgtttctgcctgtctctaggtctgttcagctcaattcgttccgccagagcctcaccgaatcccctcggaagttcatcggaagacaacgcacctaccgcctttgctaaagaatccagagaggcatttgaggaagccacagattcatcctgagccgctcctgaatcctctttctccggttccgtgatggatttttgttcaagactccaggcaagggtggcctgctccagttccagcgcataccggatgcattcttcggtatccttgcaggaatccctccccctatcgagaatcccgtccaatgcctttcgaagtcccggatagtggcgttccatcgtcttcgccacggattccctgcggggaataatggcgttcacagaccacgaacgcaccgtcagcaagatggtgttcaaaatggaaaaggccgggttcgtatccccggccttttgtgttccaaagagtttctgaatcagatgcctgaagttttcccggcatcccggataccgtgccgaaaggcgttcttcgatacgccaatcttccagtatgttgaacaaattatgctgaaaaggcgttaaattcgcctttctcagggtctcaaaatccgtttcccggatatgggcagattcatgatctgtgaatcctcttatcattattatcaattctggttcaaaat

SEQ ID NO: 7580 - DNA, 462 bp, Unknown
  gut microbiota DNA sequence
ttgttccagttccagcgcataccggatgcagtctccggtatccttgcaggaatctttcaccctatcgagaattccgtccaacgcctttcgaagtcctggatagtggcgttccatcgtcttcgccacggattccctgcggggaataatggcgtccacagaccacgaacgcaccgtcagcaagatggtgttcaaaatagaaaaggccgggtttgtatccccggccttttgtgttccaaagagtttctgaatcaggtgcctgaagtttccccggcatcccggataccgtgccgaaaggcgttcttcgacacgccaatcttccagtatgttgaacaaattatgctgaaaaggcgttaaattcgcctttctcagaatctcaaagtccgtttcccggatatgggcggattcgtgatccgtatatccttttatcatcgttatcaattccggttcagaatccaagggaag

SEQ ID NO: 7581 - DNA, 586 bp, Unknown
  gut microbiota DNA sequence
gagcatgccggatatttttgacttcttcttcggtgacggtcgtggacagcagcgtcagatacagacccagccgcgcgtaggtttcggctccggcgtgattatttccaaagacggctatatcgtaaccaacaaccacgtggttgagggtgctgatgaaattaccgtgaaactgaacgatgaccgcgagttgaaaggccgcatcatcggtactgaccccagcaccgaccttgcgctgattaagattgagggtgacgatttccccacagtaccggtaggcaactccgacgaactgaaagtaggtgagtgggtgttggcggtaggtaacccgtttaacctgaactctaccgtaacagccggtatcgtcagtgcaaaggctcgtgccatcggcgcaacggcttccaacggacaggctgcgaatatccagtctttcatccagacggatgctgccatcaatcagggcaacagtggcggtgcgctggttaatgcaagaggtgagctggtaggtatcaacgccatgctgtattcaccgacaggtgcatactccggctacggctttgcaatccccaccagcatcatgacgaaagtt

SEQ ID NO: 7582 - DNA, 523 bp, Unknown
  gut microbiota DNA sequence
gcctgttctccggtttcgtgctgcaagcagaaacaaaaacaaacaaaaagacaatatatagcagattcttcatggattatataagtaaatcagtttatatcaggagcacctgtcaccgtatgatttccgtacttttatatcttcacgactccaatacccggcaagtccggcagtgtaatctttccctttacaacttccattcccttgaaacggtcgttggctatcagcagactgccgtccaaatcggcaaaatcaactgccggagagaattgtgcggccgcagaaatagcacacgaagtttcggtcatgcaccccaccattactttcatgcccaaagcacgcgccagtgtcaccatcttccacgcttcacgcataccggtacatttcatcagcttgatattgatgccggtaaaagcatctttcagccctactatatcctttaagcgttggacggattcatctgcaaataccggcaacggactttgcccggttacccacgcaatatcatccaactgctctttag

SEQ ID NO: 7583 - DNA, 1722 bp, Unknown
  gut microbiota DNA sequence
acagcagcacataggccgccgcgatcagcttgcgcggtgtcagcagcagtcccagtaccgaggtgacgaggtacagcagcaccgccgttttcacgtttgcgcggcgcagcagcggtatcgctgaggccgcacctgctatcaggcaggccgccggtccgatctgcggcatcacgccgccgaaatacagccacgccgtggccgccgctgccagaagtccgccgcgggcgatctcgcgcgtgctcatatcagcagccgcctccgccgcagcacatgttcaggcagcagttgcagatgagcgtctgcacacagcagtcgcacatgcttgtctcctgcatcggccggtagccgccgtagccgccggacagatggagattctgcagcgcgtgctggtactccgcgttgttcgggtccatctgacacgcctgcgtgtacgcgcgggcggcctcatcgtaccagcccttgcggtagtataccgtgccggtcagatagaaccactccgcatcccgtcctgcggcacgctgcagcagcgcctccgccatgccgaggttgccctgattgatggcctgccgcacctgactgtacagcgcagcattcgcaccggtgtaggtgcgctgctgatagccgccgtactgctgaccgttgtatgcgccgccatagctctgctgctgtccgctgctgcctcccgccggattcctgcgttcgttcatgatcatgtcgtacgcttcgttgatctccttcatgcgggtttcggccaaatctgccagcggattgtttacatagttatccggatgatacttgcgcgccagttcacggtacgcacgcttgacgtcatcatcacttgtttgcggtgttacaccgagcactttatagggatccatgtttgccccttccttcgttcgtctggtaggtgccgttcagtacctgtcgggtaacggtcggcataccaagaaaaatgatattgcggatcaggtccgcatctctccggggactcagcaggtcaaatgccatgcagatatccgccagtgagcgttcgagcgtgcgctcgagcggttcccttaccgcagagatgtccggcgtttgcagctcgtaccgcagaacgaccggattgtagctgttctcttccatatccttttggatgtcctgcaccgcatcgacaaggtagatccacctgccgatctggtagaacatctggtgcagaatacgctcgcgggtgtctccggtgcgcggcacaacggcagccgtcatgcgcgaggacgtatccgccgcacgatccatggacgggcagcgttccgcctccagacagcgcagatcctcgagtgcctgccggatgtcctcgtccgcttcgggcatgcgtgcgcgcgccttctcgtagccgcggcggccaaggcggcacagcagcgccgcaagcgcgcgtttcgcgcccttttcgtccgccagatcatcctgaaacttgtgataggtcagcaggatgctcgcgtccgccgccagacgaagtgcatcgtctgtctcagcgcagcttttccgccgaaacggagaagcgtcgcatcgttttctgcacggcggagcagtctccgcctcctcacttcctgcaacaagtgcaaaaaacgtcatatcgtagcttaaaaacaaggtgtaaaatctgccgtattctgcgcggatcgtgtggcataagccgcagtaaacctgctgaaaacggtcagcctccttcacccgcagctcggc

SEQ ID NO: 7584 - DNA, 182 bp, Unknown
  gut microbiota DNA sequence
tatatatggcccattgtgattattacattggccattctgcttgggcaggttatttttggtacaggtggcgtgattttgtcgggacagccgttgaaagttgccatgcaatgtggcttcagtctgacccagattggtgaatttgcatttattatcgcttcgttgggggtaagtctgaaagtaac

SEQ ID NO: 7585 - DNA, 137 bp, Unknown
  gut microbiota DNA sequence
cgtaggagtctggaccgtgttccagttccagtgtggccggtcatcctctcagaccggctacccatcgttgccttggtgggctgttaccccgccaactagctaatgggacgcggactcatccttaagcgatagcttgc

SEQ ID NO: 7586 - DNA, 2250 bp, Unknown
  gut microbiota DNA sequence
agtaataacatgaaaacaactccgtttaccgaaacacacattgccttgggggcgaaaatgcacgaatttgcaggttataatatgcctattgaatattcgggaattattgatgaacatcttactgtatgtaatgccgtaggtgtttttgatgtatcccatatgggtgaattttgggtaaaaggttctaatgcgttggagtttttgcagcaagtgacttcaaacaatgtggcgactttgcccgtcggtaaagcgcaatatacttgtttccctaatgaggagggaggtattgttgatgacctgttggtatatcactatgaatccgaaaaatacttgttggtggtaaatgcggccaatattgagaaagactggaactggtgtgtcagccataacacagtgggtgcggaattggaaaacgcatccgaccgtatggcacagcttgctattcagggaccgaaggctatggaagttttgcaaaaactgactccggtcaacttgtctgaaattccttattatgcttttaccacaggtgagttcgccggtcagaaagatgtgattatttcgaataccggttataccggtgcaggtggtttcgagctttatttttatcccgaagccggtcaggctatctggaaagcaatttttgaagcaggtgctcctgaagggattaaacctatcgggctaggggctcgtgatacattacgtttggaaatgggcttttgcctgtatggtaatgatttgagtgataccacttctccgttggaagcaggattgggctggattaccaagtttgttgaaggaaagaatttcacttcacgtgctttacttgaaaagcagaaagccgaaggattgaaacgcaagctgattgcttttgaaatggtagaccgtggtattccccgtcatggttatgaactggtaaatgctgatggagagaaaataggtgaagtaactagtggaaccatgtctccaatgcgtaagattggtatcggtatgggatatgttcagaccgcttacacggcattaggtactgaaatatttattgatgtgcgcggacgcaagctgaaagctgtagtagtaaaggccccgttcagaaaataaatcgaaagccggaaaagagaacgctgataacaaagaaaacgcgaatattcaagaaatctggatattcgcgttttctttatatggctgatatacatttacggttagttccttttcataaaaacagcttttaatgcaaaattaataataggatgaagaatatgataaatagataattcttaattttgcaatcaaaaatttattagctatgtctgaattggctccattgataagtgatttggctttgattctgatctgcgccggtgtcatgacgctcgtctttaaacggttaaagcaacctcttgttctcggctatatcgtagccggctttttggcaagtccccatgttcctcttactccgtcggtcattgatgtggccaatatccatacatggtcggagattggtgtgatattcttgttgttcgctctagggttggaatttagtttcaagaaactggtgaaggtaggggggacggcggtcattgcggcgtgtaccattatattttgtatgatattggttgggatttttgtagggtggtctttcgggtggcaacgcatggactgtctgtatttgggaggtatgttggccatgtcctccacgactattatctataaggcttttgatgatttgggattgaggcagcaacggtttgccggcttggttcttagtattttgatattggaagatatattggctattgttttgatggttatgttgagtacaatggcagtgagtcagaatttcgagggcagtgaaatggtatatagtattgccaaattattattcttccttatattgtggtttgtggtaggtatttatatcattcctacatttttgaagcgttcccgcaagtggatggcaaatgaaacattgctgattgtttcgctggcattgtgcttcggtatggtagttgtggcggccaaggttggattttcggctgcgtttggagcttttataatggggtctattttggcagaaacggtagaggccgaaaatatagagaagcttgtggcccctgtaaaggatttgtttggagccattttctttgtatctgtgggaatgatggtagaccctgccatgattgtagaatatatatggcccattgtgattattacattggccattctgcttgggcaggttatttttggtacaggtgg

SEQ ID NO: 7587 - DNA, 137 bp, Unknown
  gut microbiota DNA sequence
ttccatttgccgggcagacgtttctctactatatgataagcaggtatcgccaaacgtatcatatacggggtcagaaatgtggtaatgaccgaaacagccaccacaataggatataagaaatcactggttactttcag

SEQ ID NO: 7588 - DNA, 182 bp, Unknown
  gut microbiota DNA sequence
gttactttcagacttacccccaacgaagcgataataaatgcaaattcaccaatctgggtcagactgaaaccacattgcatggcaactttcaacggctgtcccgacaaaatcacaccacctgtaccaaaaataacctgcccaagcagaatggccaatgtaataatcacaatgggccatatata

SEQ ID NO: 7589 - DNA, 137 bp, Unknown
  gut microbiota DNA sequence
gcaagctatcgcttaaggatgagtccgcgtcccattagctagttggcggggtaacggcccaccaaggcgacgatgggtagccggtctgagaggatgaccggccacactggaactggaacacggtccagactcctacg

SEQ ID NO: 7590 - DNA, 527 bp, Unknown
  gut microbiota DNA sequence
tcggttgcccagccgagctcctgttcgtctggaggcgcaaaccgtcgtcaacggctgttggtctgtggactttatgagcgatgcgctgatgcacggtcagcgttttcgcacgttcaacgtgcttgatgattgcagccgtgaagtattggtgtggaagtggacaccaacttgcctgcggcccgcatcattcgcgtactcgaccgcatagccgcctggagaggctatcccacaaaaatgcgtatggacaatggcccggagtttgtctcagtacagcttgccggatgggctgagcagcacgggattgaccttgagttcatccaacccggcaagcccacgcaaaactcgtatgtggagcggttcaaccgtaccttccgcgatgagatattgaacttctatgttttcagcaggctaagtgaggtccgcactatcgttgacgcatgggtacaagaatacaatgagcaaaggccacacgaatcattgggcaatctcaccccaggggagtttgccctccaacatgcagggggttc

SEQ ID NO: 7591 - DNA, 3940 bp, Unknown
  gut microbiota DNA sequence
gaaatttttgcgggtgggggtccgggggagggcgctttttataaaaagcgccctcccccggttttccctccctctagagggctggccttttggcggagtgtccggtagaagggacgtatacgcttcaacacgcaagaaaaattccggagcgaacgatgcctaaatcaataatgcgtctgctggctgcttttggattcatactgtgctcagccctgccgggcatggctgaaccgacgggtatgcccctcattgccggagcggacaccgcgggcgggtacgccggggatgtcctcgtcaaggtgctgcccgcatggcagcccccggcgggcgcttccggcatagtcaccatctccctgcgcatcggcagcgacgggcgcccgctgtactgcgaggcaagccgcaagtcgggcaatgccgcgctcgacgagtccgcctgccaggccgtcgtgcgcgcgggcacgcttcccacgccgccgtacggggccatcaccgaagtctatctgacgttcatgacggatccgggcgccctcaaggggacagcgcctcaggggcaggcttccgctcccaaggagcgcagctacgccgaggaaatcatgttccgggccaagccctacatccagatcccgcagggcgtccacggggaatacagcgtggaactgaccctccgcatcaacgaaaccggcgggatcgaacagatgtccgtctccaagtcttcggggaaggccgaagtggataacgccgtcctcaccggggtcatccgggaaggggtcatccccccgcgcccggcgggttccgaacctctgaccatgcgtctcctctttaccctcaaaaacaattgatctagactcgcgccgcgtaagcaaaaggtcttccgtggcaaaaacggaaggcctttttaccgaaaaagcggtaagccaaatcctgcgggaggacctcccgttcaccccaaacccctttaaaggcatcatgaaaccatttcgcctgttttcccaagtgctgcttctgctcggccttgtgatggtctgtgccgccggttcctcaaaagccgccatgcagatcgacatctacgggcccggtcagaacatcgtcaatctggccatggccgccccgctcagcaccggccagcctgcccaagggcttggcaaggagctcgacgccgccatccatgacaacttgagcttcctgcccttcatgcggctgacggatcccaaagctgtcctcggcggtacgactctccccggctaccagcccccgaacgtcgacttcaagcgcttccagcttgcgggcgcggacctgctcgtcaccgccggctggcctcagggcgacaagtccgggtccacagtggagctgcgcgtctatgaaaccttttccggacagttcgtgttcggcaacgcttacagcggcgtaaccaaagaagaagtgcaggatgtggccgaccgcttctgcgccgacctcatgaaggccctcaccggccacggcgacttcttcctcgccacgctcgccttcgtgaagaacagcggcaagaacaagcgcgacgtgtggatcaccaaacccaccggccgcaacctccgcaagatcaccgatatccccggcatcgccatgtccccgtcgtggtcgctcgacggccgcttcatcgtattcagccacatggacgacaagagccacgccctcggggtatgggaccgcctgaccaaccgggtccagcgtatccgcttccccggcaacaccgtcatcggccccaccttcacccccggcaacaaggtcgcggtgagcctctccaccggcaagaaccccgacatcttcatgctcaaccacgccttccagaaggaacgcacgcttgaagccaacggaaccatcaacgtgtcgccgaccttcgacgccgccggcaccaagatggccttcacgtccaaccgcatgggcgggccgcagatcttcatgaaggacctggcctccggctccgtctcccgcgtgaccaagcagggcaactacaacaccgaaccgagcatgagccccgacgggacgctgatcgccttctcgcgcctcacctcggaagggaaccgcatcttcgtgcaggatctgaccaccggcacggaacagcagatcagcttcggccccggcaatgacgtgcttccctccttcgcgccggacagctacttcatcgccttcacctccaaccggagcggcccgaaccagatttacctgacgacccgtcacggcggcgacgcgaagaaggtccccacgggcagcggagacgcctcgttcccccgctggggcgcgattccccgttagccgggcttgacggaaaagggagcgttttttagataggcggaaacgggcgggagcggccctccgcaaccgtgtttttccctcgtgaatcttcgcgggaaatcactgaaatagccccctaccagcttgacaatacaggtttgccggaataaccttcagcccttgcgtgtgcagggtagtatacgcaaggaagaaggaattttatcaaccgtttttctgtgcggggaaactcgctcaggaggaaaaagagatgaacactttcaaacgtttggctctcgttgtgactctcgttgtggctatgggtgctggctttggttgcgcgaaaaagcagactggcgctgacgtggctcccgccaccaccgccgacgacaacggcgctgctaacgccgctatcgaacgcgccgctcaggcgatcaccgacggcatcgtgtacttcgactttgacaagtccgacatcaaggccgaatcccgcgacatgctccgccagaaggctgagctcatgaaggcctatcccagcatccgcgtgcgcatcgaaggcaactgcgacgcccgtggcacccaggaatacaacctcgccctcggcgaacgtcgtgctcgcgccgcttacgaatacctcgtcatgctcggcgtgaaccccgaccagatggaaatgatctccttcggtaaggaacgtcccgccgttgaaggcaccggtcccgccgtgtgggcgaagaaccgccgcgacgacttccgcgttatcgcgaaataagtttgctttctgaaaactcacgccgccttccggggcggcgtgagccgtaacggagcgtggcgcagcttggtagcgcacctggtttgggaccagggggtcgctggttcgaatccagtcgctccgaccagaataacgcagaaggattccagcacagccggagtcctttttttctgcccgtcgttctccccttcgccgctttcggcctccttccgcgcatctctgcaagccccgtttcccgccgcgtcctatccctgcggccccattgccatcccccgcaccgccgcgcgcatctgcctctcttccctctcctgcaaggcacctcacgcctctcatcgaaacaatcattgtttcgccccgttgcgcctcctatgctcttgggaacgacacgtaaccggaggtttgggatatgcgtacttacctgaaagcgttcctttttctggctctgacggcttccattgcctgcgccggggcgaatttcgctcaggccgctgaaacggctcctgccgcctccgccgggaacggcatgatgccgcccgtcggcaccttcgacaacaacgcggcctaccaagctctgacgcctgaaaaacaggccaaatacaatgaaatcgtcaaatcggcggaagaagccatgttgccccttcgtgaaaagatgatggccaagcgccttcagcttgatacgatggcgagtatgcccaacatgaacgaggaagccattgccaaggccgccgccgaggtcgcttcgctgcacacgcagatgatcaaggttcacgacatgatggctgatcgcctcgctaacgagctcggcatttccatccagcgcgggacctgctcggacggttacacgccctgtcccatgcatcgcggcatgatgcgcggctaccatcatcagggcatgatgatgcccat

SEQ ID NO: 7592 - DNA, 172 bp, Unknown
  gut microbiota DNA sequence
tcttccagctgtttctttatgtaatccctaatcttctctttgttcttgcctaccgtatccacgtagtagccccggcaccggaattcacgattgcggtatttgaacttcagatcgccaaatcgttcatacagcatcaggctgcttttacccttcagataccccataaatcccg

SEQ ID NO: 7593 - DNA, 843 bp, Unknown
  gut microbiota DNA sequence
acggatgagggctacaccaacgaccggggcgagaaggtcgacaagacggaatggcacaaggtcgtcttctgggaccggcaggccgaaacctgttcgcagtaccttgccaaggggagcctcgtgttcgtcgagggcaggctctccacccgcaagtatcaggaccagcaggggcaggatcgctacgtcaccgagattcaggggcagcgcgtccagttcctcgaccgcaagggggacggcgacgggcagcagggccgacagggaggcggacgccagacacaggggcggcactccgccgactatgaagacctcggccccgccttcccttccgaagcctccggcctcgatgacgtgcctttttaggcaaaaccaataggataggaatatggcacagaccgcagaaattctggaagccctcccgcccgcgcagatgcaacccaccggactggcgcagttcgacctgaacgtcaccgcgacgccgttggtcatcacatgggacaaggacgccgtgtccacgctgttggataccgtcctagcccagtatgcggggctggaggtacaggaagccgacgtgcccgccatcaaaaacgaaatggcggggctgaacaggctcaaggaacggatggacaacgcccggaaggacatcaagcggcggattgccgggccgctggacgggttcgacgccgaggtcaaggcgctgatcgcccgcattgtggatgcccgcgctgcgctggacacgcaggtcaaggacttcgagcggcgcgaccgtgaaggccgacgcgcagccgtccagtgtgtcgtcgacaacatcaagagctgtgaaggcgtgccggaactggacatccc

SEQ ID NO: 7594 - DNA, 7303 bp, Unknown
  gut microbiota DNA sequence
tccccccccctaccccctattcaatccagttcgcggcgcggcctacggcgcgatgccagttgtggagcagctcggcgcggcgctcctcgtccatggcgggctcgaagcggcgatccagcttccacaggttggacacctcttcctcgctgtcccagaagccgacggcaagcccggcgagataggccgcgccgagagccgtggtttcggtgatcatggggcgctcgacaggcacgccgagcacgttggcctgacactgcataagcatgttgttccggctggccccaccgtccacccggagcgtggaaagcggcagccccgagtccttcttcatgcaatccatgatatccaaggtctggagcgcgatggcctcaatggcggcacgggcgatatgtccccgggtcacgccgcgcgtcaggcccacgatggccccgcgggcgtactgatcccagtagggcgcgccgagcccggcaaaggcgggcacgaaaaacacgccgccgttgtcccgcaccgtggaggcaaggggctcaatctcggcggcgtcgctgatgatctggagaccgtcgcgcagccactgcaccaccgccccggcgatgaacacgctgccctcaagggcgtagcgcagcccgtagccgcagttccagcccaccgtggtgagcaggttgttctcgctgcgccgggcttcagtcccggtattcatgagaaggaagcacccggtcccgtaggtgttcttcgccatgcccggaagcatacaggcattgccgtaggtcgcggcctgctgatccccggcgtcgcccgccagaggaaggctgtggccaaggaattccggatgcatgtgccccatgatcccggatgaggggaccaccttcggcaacatggaacgcggcacggaaagcagctcaagcagttcgtcgtcccagtccccggtgtggatattgaacatcagggtacggctggcgttggagggatcggtagcgtggaccgcgcccttggtgaaattccagatgagccacgaatccacggtcccgaacagcagatcgcccgcctcggcctgttcgcgcgcgccgggcacgttctcaagaacccagcggactttcgtgccggaaaaataggcgtcgagcacgagccccgtcttttccgcgaacaggccggccttcccctgttcgcgcaggctgtcacagaagcccgcagtacgccggtcctgccagacgatggcgttgtatacgggcgcgccggtcctgcggttccagacgacggtggtctcgcgctggttggcgatgcccaccgccgcgacttcagaacccgtaatccccgcctgccgaaggcacttggccgcaaccaccgcctggctgtcgaaaagttcgttggggttgtgctccacccagccgggctgaggatagtgctgcgtgaattcctgctgggccatctgaatgatgttgccggagcggtcgaacaggatggcgcgtgaactggtcgtaccctggtcgagggcaagaatataacggctcatagggactccttgcacgttcgatttcgaaagttgatacgtggaagatacaatcttccggcggcatgataaagagattttccaatagccggcgcgttcccgaagcagaaaacgcccctcaatacgccattgcaacagaacacgttcccttatgaaacggcaacgggacgctggaaatctcgacaactttctgctttcagggtattttgccttcagatttcccattctggcagaggccttttccgttttcactttcgaacttcgtgattccagaaccttttcaggtcgtttttcatgcagaaatacattgacttccatacctgcccccccgtcccgctggtcgtcgcccatcgcggcgcgcgcggacatgccccggaaaacacgcttacggcggccgccctcggctatgccgttcaggccgatctctgggaactcgacgccaactataccaaagacggcaaactggtggtgatgcacgacgacaccctcgtccgtaccaccgacgtggaaacggccttccccggccgcccctcctaccgcgtatgcgatttcacgctggacgagatcaagagcctcgacgccggatcatggtacgccgggcgcgatcagttcggccgcgtcgccgccggggagatcgacgccgacacgctgaaaagctttgacggcctgaccgtccccacccttgaggaggcccttgccttcaccaaggacaacggttggtacgtcaacgtcgagatcaagaaccattcgcacctcatcggtcacgaaaccgtaacaaaggacgtgttagacctcatccgccgcctcgatatggtggaacaagtcatcatttcctcgttccagcaccgttatctggaagaatgccgcgtcctgtgccccgaaatggccaccggcgcgctggtcgagcacatacgccccagagatccggcagccctgtgccgccggctccaggtcaacgcctaccacccggatcagcgtatcctcgcgcccggcgaccttgccgcgctgcgcgatgccggattcgccgtcaacgtgtggaccgtcaacgacatgagcgaagccaaacgcctcgttgccgaaggcgcgaccggcatcattaccgattttcccgccgcctgccgcaaggcgctcggagaatgacgcactgaaggagggaggagagactttctggagaaggtttttcctcccttttcagacttcccataccggggagtgatacccatcttgccgggcgcgccccggcggacgttccggggactggccccggagaggatacaaccggacgttttccgtccgccaacgcaggagagcatatgcgttccttccgtctgatggccctgctggccatgtgtctgatgctgttggccgcgcctgtccaggccaagaccaccattaccttctggcacggcatgggtggcgaactcggtgaaatcaccgacgagatgatcaaggaattcaacgcgtctcaggacaaatacgaagtcaagggcgtctacaagggcaactatgacgaagccatgaccgccgccatcgccgccttccgcgccaaacagcaccccaacctgatccagatttttgaagtgggcaccgccagcatgatggccgccaagggcgccatccgccccgtgtatgaaatcatggaagccgccggcaccccggtggacacctccaagctcctcggctccgtggccagctactactcctccacggacggcaagctcatcgccatgcccttcaacgcctccaccaccgtcctctactacaacaaggacgccgtgaagaaggccggcggcgacccggaccatttccccacgacgtggcccgaagtggccgaactcgccaagaagatcaaggaatccggcgcgtgtaagtacggcctcacctccggctggcagtcctgggtgcagcttgaaagcttctccgcgtggcacaacgtccccttcgccaccaacaacaacggctacgacggcctcgacacgaagctcctgttcaacagccccctgcacgtcaagcacatcgacttcctgtccaagctccagaaggacggcgtgatggtctacgtgggccgcaagtccgaagccatcaacgcgttcacctccggcgaagccggcatcctcatgaactcctccggctcctacgccgccgtgaaggccggtgccaagttccagtggggcgtggcgctgctcccctactggcccgacgtgaagggcgctccccagaacaccgtgatcggcggcgcagccatctgggccatggccggacactccaaggacgccgaaaagggcgccgccgcgttcctgaactacctcctcaagcctgaagtgcaggcccgcttccaccagctcaccggctacgtgcccgtcaccctggaaggctacgagctgaccaagcagcagggcttctacgacaagaaccccggcaccgacatcgccgtgaaggccctttccgacaagaagcccaccatcaactcgctgggcctgcgcctcggcaacttcgtccagatccgcaacatcatcgacgaagagctcgaagccgtctgggccggcaagaagaccgccaagcaggcgctcggcgccgctgtggaacgcggcaacgccgaactggcgcgtttcgccaaggccaacaagaagtaaacgctgatccgcagcacagagggagggggcccgccgggcctccccccgtttcctccggggcgtctttcgcggcctttccgccgcaagggacgcccccaacccgcacaaggagccgctatgcaggatggacgttacgcgttcaggggcaagaaacacctgcttcttcccctcctcttcctgctgccccagctcgccatcacggtggtgtttttcttctaccccgccggtgaagcgctcatggggtcgttctacatggaagactctttcggtctttccaaagaattcgtaggattggacaacttcatcacgctgttttccgatccgagctatctggaaacgctgcgcttgacgcttgtgttcagcctcgctaccatcgtcctcacgatggggaccgccctgctgttcgcggtcctcgccgatcaggtgaactggggcggcacgctgtacaaatccatgctcatcatcccctacgccgtcgcgccgccgctcgcgggcgtgctctggctgttcctgttcaacccttccgggggcgtgctcaccgagctgctccaccacttcgggtatacgtggaaccacaaaatcaacggcaatcaggcccttttcctgctgatcgtttcggcctcatggaaacagatctcgtataacttcctgttcttcctcgccgggctgcacgccatcccccgctcgctcatcgaggccgcggccatcgacggcgcgtccccgtggcggcggttccgcacgatcattttcccgcttctgtcgcccacaagcttcttcctgcttgtggtgaacacgatctatacgctgttcgaaaccttcggcatcgtccatgccgtcacacagggcggcccctcaaaggccacggaaaccctcatctacaaggttttcaacgacggcttcatcgggctcgacttcggcggctcctcggcccagtccgtggtgctgatgctcatcgtcatggtcctgaccttcctccagttccgttacgtggaacgcaaggtgacctactaggtcaaggaacgcagtatggtagaaaagaaaggactgggaaaagccatcgggcacgccttcctctggttcggcatcgccattgtgctctttcccctttatatagcgctggtcgccacgacccacacgttcgacgtgctcatcggctccacgccgttgtggttcggcggcgagttcctcaagaacttcaccaccgtcctcacgcagggcctcaaggcggcgggcggcatccccgtgtgggtgatgatggccaacagcctcgtcatggccctcggcatcgccatcgggaaaatcgccatttccatcacggcggcctacgccatcgtctatttccgtttccccggccgcgagctgtgcttcgtgctcatcttcatcacgctgatgatgccggttgaagtccgcatcgtgcccaccttccaagtggcggcgaacctcaatttcatcgacagctacctcggccttgtcctgccgctcatcgcctcggcgacggcgaccttcctgtaccgccagatgttcatgaccatcccggcggaactgcttgaggccgcgcgcatcgacggggccgggccgtggcgtttcttcgtggacgtggtgctgcccctttcccgcacgaacaccgccgcgctgttcgtggtgctgttcatctacggctggaaccagtacctctggcccctgctcgtcaccaaccaggaaagcatgtacaccatcgtcatgggcatccagcgcatggtgaacatccccgacgccgtgccggagtggaacctcatcatggccgttgcgcttctgggtatgctgccccccctgctggtggtgctcggtatgcagaagcttttcgtccgtggcctcgtggaaaccgaaaaataagcccgccaaaaggataccagcatggcacgcgtccagctcaagaacgtagaaaagactttcaataaaaataaggtactgaagggcatcaacgtcgaagtcccggacggctccttcatggtcatggtcgggccttccggctgcggcaagtccacggccctgcgctgcatcgccgggcttgaggaagtcaccggcggcagcatcttcatcggcgacgaggacgtcaccagcaaggaacccaaggatcgcaacattgcgatggtgttccagaactacgccctctacccgcacatgaacgtgttcgacaacatcacctacgggctcaaggtgcgcggcatcccggcggacgagcgcaagcgccgcgccgaggacgccgccaagctcctcgggctcgacggactgctcgaccgtatgcccaaacagctttccggcggccagcgccagcgtgtggccatgggccgggccatcgtgcgcgagcccagcgtgttcctcttcgacgaaccgctttccaacctcgacgccaacctccgcaaccagatgcgcatcgagctgcgccgtctgcaccagcgtctggcgaccaccagcatctacgtgacgcacgatcaggtggaggccatgaccctcgccgagaaaatcctcgtgctccgcgccgggaacatcgaacagtacggcacgccggacgacatctacctgcatccggcctccgtattcgttgcccagttcatgggctccccgtccatgaacatgatccccgcgaccacggacggcgagaagctgatcctgcccgacggcacgccgctttccggcgtcgccgcctccgacatccggcttgccgcagcgccctccaaggacgtgctcgtcggcctgcgctgcgaagacctgctgctcgatcccgaaggttccgtgcaggtcaccgtggacatcatcgaagcgctcggcccggacacgctggcctactgccatcccatcgcagggaaggcgggcggcggcgtttccgatcagagcgccatcatcgtgcgtcttcccggcacgcgccgccccgcgcccggcgacgccatccgcctctccgtccgcgccggccacggccacgtcttcgatcccgccagcggtttgcgctgtttgtagaagagaaaagattggggaggggaagggggacctttctggagaaaggtcccccttcccctccccaaacccctcctctctccctcccaagactttcgactttatcgaatccctcatgccgtctttccctgtgcacggagaaggcggtatgttttttctttatttgcttgtcttg

SEQ ID NO: 7595 - DNA, 460 bp, Unknown
  gut microbiota DNA sequence
actacctaatcagacgcgggtccatctcataccaccggagtttttacccctgcaccatgcggtgctgtggtcttatgcggtattagcagtcatttctaactgttatccccctgtatgaggcaggttacccacgcgttactcacccgtccgccactcagtcactaaaatcttcattccgaagaaatcaaataaaagtgcttcgttcgacttgcatgtgttaagcacgccgccagcgttcatcctgagccaggatcaaactctcgttaaaagtgtttgtatccagttcagaatcaactaactagctaattcttccctttttactgttgttttggtttgtttaaaaaccgttcttaaaaatcttctcttaaagaaattttcaagggttgttgttgtctattgttcagttatcaaggttcttacttcgctttgttcattcgcgacagctcatttattttatcat

SEQ ID NO: 7596 - DNA, 370 bp, Unknown
  gut microbiota DNA sequence
caaataaaacaccttttgatggctccctgatgatcgactccacccatctcgaggctcaccgcacggcggcaattctgctcaaaaaggggattctccacgtctcatcggtcgcacaaaaggaggactgaattccaaacttcatgccgcttatgacggccacgggcggcccgtcctgcttttgctgactgaagggcaggtcagcgactacaaaggtgtagccattctccagcacctccttcccgatatctgtacgtttctggcagacggaggttatgacgcgagttggctgcgggaatctctgagagccaaggggatggcagtctggataccaccccgaagaactagaaatacagcattttcttttgataag

SEQ ID NO: 7597 - DNA, 137 bp, Unknown
  gut microbiota DNA sequence
cctgataagcgtgaggtcgaaagttcaagtctttccaggcccaccacttatcagggggtatagctcagttgggagagcatctgctttgcacgcagagggtcgacggttcgattccgcctacctccaccacaagcttg

SEQ ID NO: 7598 - DNA, 13837 bp, Unknown
  gut microbiota DNA sequence
aaaggcccgcgctccctaacggaacgcgggcctttccgtcaatcaatggcggcgtaaatcttcccggcttcggggtggcaatcaatatactccatcaaatcataataccgatccgccagactcggcacacgttccgccatatgggacaaagtgaacagcgtcacgacgattcccgccgcgtcggcggacatttcctcattaaaatagttgccctcgcagactatgcgaaccggcgtagccgtttccggggccatataaaaaccgccgttgctgagctcgtaaaactgccagaatacgccgtcataattcgggcaaagccgccgcatccagttatacacatgagattcaaacatcagaaacgctcggccgcaatgcttggggaaaaaatctacgcggtcttcttcggttaccatattcgcggtgatgatgttctgagtttcctttgcgccactcctgggagtttttccctttgaagttgaccacctttatggcggtgctccgtagggctttcacaagcaagtgaagctcccacgggtaaccgctccaaaacacggcaacgcgaaaacaagaaagcacagggggaaaggcccgtgccagaatgagcgggaatgaccgtccggcgcggaagcgagtacgggcggaacgcccggcgaagctgcacaagacggaagggaaagaaagctaacgatggcgcaggccttgcgcgttcacgcgcacccctgtcggtaaaagtggtccgctttccgacagggaatgcgggccactttcataagctacagttcaaaggtggcgatgaatgccataatggccttgtccaccgtaagtgcggccacaataagcgccttatgcttccgcgttgacggattcgacaggtcggggacgcggactttttcaagctccgcctctgtcatagcatacatcaagctgacaagttctttggctttttcttcaaattcccggatcgaccgctgttcggcagagttcataatttctctcccatgagtttcggcagtccgctggcttaccctcgatccggccggtaggcatactccgggttgactgtcagattgcagccgtcgctgaaagcgctgtaaatcttccgaacatcaaccagggttgtgcgtcgaagatgtacgtcctcagtttgccattgttccgtggttcgcgggcaacagcccggcccggccgggaaagagtccccgcgctcttcacaaacgagcgcccgatttatgaagaaattcctcttaatttattggctatttggcatttttaccaaatatactttctaaaaaaagtgaaacagagaactattccactgtcttcttgtcctgaattatgcaacataagtcaagccgggtaagacagcttttgccatatatacgatatagcatatctaattaatgcaactacattcttagaggtcatttcaaaacgtttctgagcaggatcatgacgcaagccagctgaatgaaaccaagatgcattatgcagagtcgctcgaatcgagttgccagacggcgaaagttgtccagccaggcaaagaaacgttccaccttccaacgattcgaagacaggtctctgtgaaaagccggaggccgtcatcgttttttcttcgccttcttcctttccgggatactgtgccggatgccacgcatggacagatactgccgaaaggctcgacagtcgtatcccttgtccgcagcaaggccacgtggacggtgtttcaagcaacctatctggatgctttccacagcggcaatggcacgggtactgtcgtggcatcgcccatcagacagcaccactgccagcggtaacccgttcccgtctacgacggcatgccgtttgctggttgagcctccacaggttctgccaacccgttggcccccctttttgcccgaacaaacgagccatccagtgcacactttttgagatcaagttttcctttgaattcaagctcagaaaggagcatgtgccatatacgggcaaaggtccatcctgtgtccatcgcctatgtcttcgccatgccgtgacataactgccgtattctcgtggaagatcagcccatcgacatcccgttgtcaaaacgaagagaatcgcttcgaggatctttttatcatcggcaggggggcggcctgtagcagctctgcccgagagatgtggctgaatttttgaccactgcttcttgtttaggcgaattcgagacataaccatcctccagtacagaggatttttaacacaatttacgacgttttgaaatcatctctatactcaatccctgttttccgtttgccgtacaagacaatggcgaaattgagcaatgatggttttcaatcttgacaagagaaattcaagtggctattttgctgaaaagccaaggatgggaacatggaccggtacaaaaagtatatttcggaacaagccaagatctttaaggcactcggccatccgagccgccttctcatggtagacgctctgcgtgacggtgaaaaatgtgtctgcgatctgcaagctctggtaggggatgatatgtccacagtttccagacatctctctgtgctgcgggaagccggtgtggtttccactgaaaaaagagggacaaacatctactacagccttgccctctgctgtctggatacctttttgtcctgcaccagcaaaatcgtggaaaagcgtgtcctttcgcaaatggacatgctgaacaaagggtaatttttttactcgtaatattggcaattttgccaataaagaaaattaaagaggtgagcaaaatgtcaaaatgctgtgcgggcgcaccagaagaaaaacagattttatttccctcagttcagtgcgcttgtcaaaagtccgaagtaccacaaactccttccgtcccatcacatgtgaataagctgcgatatttcggtattggcattgctgcgctgatgctgtggagcgcggtctattccgtcattgtgcctctttcgcaatggctgacctatgatcttttttccatcggcaaaggcactccgttaggggcttccgtagagttctttttttatgacacggcaaaaattctcttgctgctcgttctcatggtctacgtcatcggctggttacgagccacactgcacgttgaacgagtcagggattatctggcgggaaaaggtagagggattggctactttttgggtgcaggtttcggggctatcacgccgttttgttcctgttctagtattccgctgttcctggggttcaccacagcccacattcccttgggcatcaccatgtccttcctgatcacctcgcccttgattaatgaaatcgccgtggttctgctgtgggggcttctgggttggaagttcacggtcatttatgtggtagtgggtatgtttgcgggaattgtgggcgggatcatcatggacgcgctccgtgcggaacgctggctgcaaccctttttgctggacgccatgaagaacgcctctaccagagaagccgcggtggaagcgggcgaagttcccaagatgggcctcatggaacgtcatgccttcgcttactcggaaacgagcggtattttcaaaagggtctggctgtgggtcatcatcggcgtgggactcggagccgcactgcacggctatgtgcctcaggaatggtttacggaaaacttgggagccgggcaatggtggtccgttccggtagccgtggccatcgggattccgctgtataccaatgtcactggtattattccgattatggaaagcctgctgctcaaggggctacctctgggcacgacgttggccttctgcatgagcacggtggcggcgagtctgcccgaagtgctcatgctcaaacaggtcatgcgctggaagttgttggctgtcttcctgggcatgttgctggtcatattcacggtcctgggctggttgttcaatagccttcaaacatacatcttctaaccgaaagaggttcgccatgttgattaaggttctcggtcccggttgcgctaagtgcaaagaagcggaaaacatcgttaaggccgccgtgcaggatgcgggaagcagtgctgcggtggaaaaggtcacggacctgaaagaaatgatggcactcggcgtcatgtccacgcccgccgtggtcatcgataacaaaatcatgtgtaccggccgtgtgccttccaagtccgaagtcatgggctggatcgccacaccgggcacgccgacttccgccaattcggcttctgccggatgctgctgttgcggcggaaagtgctaatcgtgaagggggcggtgtatccgccccgtttttgccattggaggggagtatgagccaatctaccttacaaaaactgtcttttctggatcgctatctgacactgtggatatttcttgccatgttcataggtgtaatgctcggatggaccgcaccgggcgtcagaagtgtgatcaactttttccaggtcggtactacaaatattcctatcgctattgggcttattgtcatgatgtacccgcccttggcgaaggtaaaatatgaagaactcggtaaggttttcagaaataaaaaaattcttctgctgtctttgacgcaaaactggctcgtcggccccgtcctcatgtttctactggccgtgacgtttctttccggtcatcaggaatatatgataggacttatcctcatcggactggcccgttgcatagcaatggtgattatctggaacgaccttgcgggcggggaccgtgagtactgcgccggtttggtggcgttcaattccatttttcaggtgctattcttttctgtgtacgcttatgtattcattacagtgctgcccggatggttcggcatgtccggggctgtagtggatataagcatggggcagatagccgaaagcgtttttatttatctcggcattccgttcctgggcgggattctttcccggctttatggacttaaggtcaagggattggactggtacgaaaatgtttttatcccccgcgtcagcccgtgggcgttacgcgcgttgctgttcaccattctggtgatgttctccctcaaaggggattacattgtgcaactgccctttgacgtgctccgggtggccattccgttgctcgtgtatttcattttcatgtttctgttctccttttatctttcctggaaggccggagccaattacgaacagtcagcaacgctctcttttacagcggcttccaacaatttcgagcttgccattgccgtggctatcgcggtgttcggcttgaactccgggcaagcgtttgtggccgttatcgggccactggtggaagtgccggtgctgatcgggctggtcaatgtgtccttatggatcaaaagacgctggtatgcgtcatagggcggcaattacaatggatagtactcaaaaagaagaactgcgggcgaaagtccgccaaggttatgccggtatcgctttggggtccgtgcaatcatgttgtggaagtgggcaaggctgctgctcaagtgccaatgcgagaaccttggccgcaagtctgggatattcggaagacgacattaaagacttgccggaaggcgtcaatatgggcctttcctgcggcaatccgctggccctggcctctctgaaagaaggggacgtagttctggatctgggatcgggcggcggcttcgatgtgtttcaggcaggcccacgagtcgggaaatccggccgggtcatcggcgtggatatgacggcggaaatgcttcacaaggcgcggaacgcctgcgcatggtatcgggaacacttcggccttgataacgttgaatttcgtctgggtgaaatcgaacatttaccggtagccgacaaatccgtggatgtggtcttgtcaaactgtgtgatcaacctttccccggacaagccacaggtctggaaggaaatttttcgtgtgttgcggcccggcggcaggttttccgtatctgatattgtactgctggaagaactctcggaagaagccgtggattccgtcgcggctctggtcggttgcatatccggggctattctcttggaagaaacagaaaacattctcaaggaatgcggctttattcatatctctttggataaaaaatccggttatatcgaagccatggaatcggacggtgaccccctgtacgcgaaaatccgtcaatcgcttcccccggaaaaaacgctccatgatgttatggtcagcgccataatttccgcgcaaaagccatagactgtttgaagttacacgatgctcatctgtataatttttacccaaacgacacagagatggttaaaaatgatacagatgaaaaaatataaataaaatattttaagcatgttatatttggcatatatattgctatattgccaaataacaaataatagatcttatctacggagccatcatgaagacaattcttttcctctgcacgggcaattcctgccgcagtcaaatggcggaaggctggacgcggaagctgtggccacaattgttagtctactcggctgggtctgctccggcccgtgaagtggactacttggctgtgcaggctatggcggaaaaaggcgtaatcatttctacataccgccccaaaaacctccgagatttgccgcctatcacgtttgatctggtggttacgctctgcggagacgcggcggaagcctgtccacacttcccaggtagcgcaaaagtcgaacaccacggctttgatgatccgcctaagctggcactcaccgcacaaaacgaggaagaggctttggcacaatacaggcgcgtgcgggatgaattagctgatttcgtaatcaaaatccctttgtcgcatcctgagttatttacaaaataactttttcttgctgtccatacaatttttgcaatattttgaccattaggagtaactatgctcaagtattcactgattatttttatttttatgttgtctttttctacagcacaggccgcgccggagcaaatacctgttccaaacacagtgacgatgcttgatctaggagcaaaaagctgtgtaccttgtaaaatgatggctccgattattgaaaaactcggtgtgtactacgatggaaaggcagctatacgatttattgatgtatgggaaaatgaaagtattgctcgggaatacggtataaaaagcataccaacacaaattttttatgacaaatctggcaaggagcgcgaacgccataccggattcttggatgaagagagcatcaagaaaaaaatagacacgctcatggctgaataatgtttttacgagtggcacgggatgatggccttttccccgtgccgttccatcacgcttgacctgaggaaatgacatgtttgatcaatttttactgaccatcaatctgtggatgacggacacctttgccgtggcgattctcggctgttttctatggggaatggtcagcgttctgttcagcccgtgtcatctggcctctataccgctcatggtggggtatgtggcaggacaggagcatatggtacagggtagagaagcggcgggatatgctggagtgttcagcctgggactgtttctttccatcgccgcagtcggggtgatctgttcactgctcggccgcatgttgggtgatatttcccccctgtggagtctgccggtcggggcattgctgatctggctcggtttggaccttatgggcgttgcaaaatgccgcctaccgggtaaggcactgaatggtttcaccatgcgggggtatcgcggggcattcattttaggcggctcttatggtattttgtccggggcctgcacattcggcttcatagcgcccattctcgccattatcactgtgcaacagcgtatagcggaaggcatagtcctcgttctcttttttgccttggggcattgtctgcccattgtgttggcaggaagttccgtggcactcagtcagcggcttgtggaagccaagggaatgcgtcttgcgactcaatgggggcggaagctggccggactgctggtaatcggcatcggtctgtattttgccgtctctccgttcatagtatgataatcttattctatgcgggaacgcggcggatggtttcttaccatctgccacgttcccgcgctctttcttttccgagagaaaaaccgttttcctccatgacaatgcgtagcccccatttgctttgagcgtagcgttttgccgcttcccgcgccgtcgcgtcccctgcggaaaacagcaccgtcttacccgtatcgcgcacggtgcccccggtgggaatggtgaaaatcaccacgccttttccatctacccggcatgtgattccgtcgaacatgcagggggtgttttctccatgccgctggcgctcctccgctacaagccgttccatacgcagcgcggccaacaggcgcgtcttgcctttgccgctcacgcccggcgcttcttgcgcgttcctttccctgattgcaaactgcgcccgtagggaggcaacatccgggggccgctgttctctttccggctcggcccctcctgcgtgtgaacgcaacatggacagagccgtttcgttgccctgttccgtcttccattgtaaaaaagcggtccatgacgcatagggaatctcccgacgaacctcctgccggggctcctgaaacgacagccgggcgttcgccttttcctcggcttcgcgtttgcgggcaatggcgatcagattgcgccggttgcgcttggcgatgttcagccggtcaagctcattccgctttacttcccatttgcgacggatggcgtccagagtcgcatcctccttttctttcagcgtttgcagacaggctatgcggttttcaattccccgcttgtactcttggaacaattctccccggtgcggtccccggcagagtgttgcggcttcatagcggtcctgcccggtgaagcgttccggtgccaggggcggaacgaacggcccgaaccggctttgcaattttttcagggaaaaccccttggccacgtcgctggccttggccgctctgttagcgtttttgctgtgacggtcccgaacaatcaggccattggcgcggggccggatttccagtccgtaacgggcaaaagcggcatggacttcctcccatgttccggctccggcaagggccgcttgcaggtcctccgcatggctcttggcataggacacgaaagattgctggccgctgtgcgcttccatcgcggcggctttgtcattgatccggtcctttccgagttgctcccggccgttgtcaatatgcaggccgtattcacgttccagttcccggcatagcttgtcccgtatccagtaatcgcggaactctttgtgtacggtgtatgtgcccggatggatcatattgtaggcgacgtgcatatggatattggcggtatcccgatgtacgccgcaatgccgttggtgctcggcataccccaaggcggcggcaaaacgccgctctatgtcctgaaagacttcgggcgcaagtcgagtctcgtcttcgggccggaagctcacaagcaagtgataggtcttcgcgccctgggcgcgggtgttgcaatcttgaacatccgccacttccgcgacgccttccgcgtaatcttcaccgccaagacagcccgcgcaccacgccataagacatttttccccaccatgcccagcgtcggcaatgtacgcggcaagacggggatagcgatcatgcgtcgggtttatggggatgcgtcggctgatcatctttcaatcctggcgatagccgcttgcagttcccgctgccgggcgtcaagttcatgtaaaagccggtgaaccgtgctcctgtccgcgccgctggccaacgcctgtttaatcaggccgccaagccgcgccagatcacctttcaagcgccggagttccagccgggcttcctggtgttccagacttggcacggaaaagccaagacatacccgtttgctgaacgtcgaaagagacaatccggccttgcgggcgctggccagaacaacgtcgtattcctccggcgtcagataggttttgagcgccagttttttgctcggcatgaaaacgctccttgcccgtgggtgaaccaggttccgaccgggacgcataataacggtacacgcgccacgcatagcgcctgccgcgttcggcgtccggtgaatggtatttgcccacggcccgccaattgtagccgtggcgggcaatctcctgggtcagtatccaggttccccacttcttgtttatgtccgggttcaacaatgacgcgggagaaataccgtagcggcgtatccaccaacggttgatctgcatcagccccacgtcataggaagcgcccgcccgttctgccgccgttatgatgtgctctgcctcctcccgactgaccggataaaaatcacgtcccgccacgttcacagcccacggattcaggcttgattcctgacgggccacggattccaccagacgggcggggatatgggtgccctcatccgggggcaaagccgcatccgcgccgctggccggagaaaccgccagaagcaaacggagaatcccggcgcaaagcgccatgccttttttcattgaagttctgccttgttttgtgttgagccgaaggcgaataagcacagctccgcagggcaggacgggaagagaaccgccgcaaggtgggcctacttcccttgtcctgccctccaaagcggatacagcatagcacaaggaaagatgccgtgagatatggaacggcgcaatttcccttcttttattatgcgatatgacagtttcattcggcatattagagagtgatgataactatagtaagagttcaaatgatgtactttacatcatcatggaatattattctgtgaaaacagaaaaagcggccgggaaatgaaatcacccgtcttcatggtcggcgctgtcagtcctcggcggctggaccattcccatgcggcgcaaaatatccccggtagctgtcggcccttgttgtctgttgtttattgtgccgtcttcataggcttggggcatgggatcaaaatccggtttccgttgcagaatactttccagataaccgcccggattctgcggctgtctgtcctccaggtggcttacaatatgccgcgccctgtctgaccccggcatgatcccatgccgacgaaacacgcccgccacttggtaggacagactcgctcccggcggtgtatttttgtctttttttcttctgttatctgtctctgtctgtgctccaaagtgactcccgaccagctcaggagtcactttggagttttggcgcactctccttgtccattcatcttgtaattgcaaaaggatagatgcttttaccagtagccggaaccgcacattttctgtctgaataattgtgtgctgttgtagaatttcgatcagtttttgaaatttctgacttgaaacaccgcatacatatttccattcctgcaaggaaaggcataattccggctccccgttgccgtcccacgcttccgctatgcgttccagcaaaagccacgccgcgccgtaccctgccggaccgagtatgtccctcagttccagcatggcggcgtggcgcgaaaaagtgcttggatgtttaatccaacgcacggcggggcctatctatcctcggcggcgtattcgggatcgctcaacttcttcaccagagcggcaatgtcctcggccttccatgcggttgtgcgggggccaagttttacgggttttggaaagcggccagtcttgcagccttcccaccatgcgcttttactgatgggaaccacttcaagcacctgccagagccgcataaatccagtatgagggattactgtagacataaaaacacctccgtaaaatagcgtttacggaggtgtagcacggtctttttgcgaaacgtgaggaaattacttcctgttttcagcaaaaaaagcattttttttatagtctatatgacgatttttatctgttactgtcctgtgccccagtgttttcccgcaattcatccagataatccgcccattcctgcatcattttcacacgctcttcccaatacagtgcgcgattatacgcgcggcgaacgctgtttccatccacatgggccaattgggcttctataacatcaggagcccacccgcgttcattgagaagcgtcgaggccatagcccgaaaaccgtgtccgcacatttcgccctgagcatagcccaaacggcggagagcggcgttgaccgtgttgtccgacatgggacgggccgcgcttctcatgctcggaaagaggaagcggccgcgtccagtgagaggaaacaaggcttcaagaatgctcatactctggctggcaaggggaacacgatgttcccgccgcattttcattttttcgggggggattatccaaatcttcccggcaaggtcaaactccgtccattccgcttgcctgagttctccgggccgcacaaatacgagaggggcaagacgaagggcggctttgacgacttcggaacccgtatagccttccagagagcggaggagccccccgacttcggagggtgtgacgatggcgggcatgtttttcgatatggccggggccaacgcgcctttgaggtcggccgtggcgtctcgctcggcccgtccggtggccacggcgtaccggcatacgcaaccgcactcctgaagaacgcgatgcgccgtttcaatcgcgccgcgctcctcaattttgcggagcggcaacaggatttgaggcgcggtcagaatgccgatatgaattttaccgatatatgggaacatattctgctcaaggcgtaacagcactcgttccccgtgcttgggcgtccacttgcttttattgcgctcgaaccattcacgggcaatggcctcgaaagaatccccgccgcctgtctgggctgccgccacggctttcttcatctggccggggtcaatcccttgctcaagggatgctttcgccttctgcgctttctcccgcgcctctttcaagccaatctgggggtaacgtcctatggtcagtgtttgttctttacccccaaagcggtacttgagcctccatgttttcccgccagcaggggagacggcaagatacaatccgccgccgtcaaaaagtttcagatttttatctgttgggggtaaagcccggattttggcgtctgacaagggcataatggcctccgaagttgggggtaaaactttctcgcgctttcaatttacccccatttttacccccattcgtgtttgatgacaacggatgttcacggacttccaaggacaccaaaaaggccgtaaatcctttgtgttatcaggatttacggccttctttggactgacttggacagtaaaaaaagtttataatggtggaggcggggggaatcgaacccccgtccgagaaagattcacgcgaagcatctacaggcttaggttgggtatcatatctcgcctcaggcttggcccccaatcagggcgtccgtcggccagttcaccgtaaagtctcgcgcgtcgcccggcaaacacaacgccacgccagcccgatagttttacaccttgccagcttatcgggcgtgagccggttcggtgtgccgcttaattaagcagcgtaagcgtattcgtaatcgttgccaattactatggtgccgcttttaacgaggccagcggcgcctcggcctgctacttcggcttcaacatccccgtcgaaaccaatgcgcccccaaagggataggcagacgtggaactccgtacaacgaagtccccattcgcgtaggatgaagtatagtcattcctgcggaaaaggcaaggctggtccggtgctctcttattgagccggaaggcgctcttttttaccggcacttgatcctttttccgtgggacgagtctctctctctctctctctctctctctctctctctctctct

SEQ ID NO: 7599 - DNA, 15869 bp, Unknown
  gut microbiota DNA sequence
gccccccctcttggttatccgtttacgtgcgttttatttacttcttggcgccgtcgggcgtatcgctcagagccagcgagcggaagaaggtctgcccctgacgctggagctggagcatgacgaccccgcgcttcttggcgtcttcacggatgatcttgctgaactcttccacggacttgatgggcttcaggttggcgctcaggatgatgtcgccttcccggagttccgcttcggcggccagcttgccgggctcgacgcccacgatgaggaggccggtgccgggcttgacgttggcggtacgggcttcttccttggtcagaggccggacggacaggccgatggacggggcatcctgttcaacggcgctgccggacttgccggaagaggccttgaggttccgttcgccgagctggacggtgatgttcttgcgttcgccgtcacgccacacaaccatgttgaccttggaaccgggcgcttccgtagcgatggcgcggagcagggcgctggagtcgtcgatcttctggccattgacttcgaggaccacgtcgccgtccttcataccgcccttggcggcgggttcgtcgggcatcacggagccgatgagagcgccggtggcttcgggcaggccgagggccttggcggtgttttcatccacgtcctgaatggtgacgccgatccagccgcggctgaccttcttgtcctgcttgagctggttgacgatacgttcggccatgctgctcgggatggcgaagccgatgccctgaccgctggcgatgatagccgtgttgatgccgataaccttgccttccatgttgatcagggggccgccgctgttgccggggttgatggaggcgtccgtctggaggaagttgtcaaacggcccggactggatgttgcggcccttggcgctcaggatgcccgcggtaaccgtgtgccccaggccgaaggggttgccgatggcgaggacccattcgcccacttccatcttgtcggagttgccgaagttcaggaacggcaggggcgcgtcggcctttaccttgagcagggcgatgtcggtttcttcgtcagtcccgatgacctgagccttgagggaatgctccttgccggtgctgccctgaaggttgacgagaacggtatccgcgccagcaaccacatggttgttggtcacgatgtagccgtcggaggaaatgaggaagccggtaccgagggagcgctgcgtacggggcttggcattgcggctgttgccttcgaactgttcaaaaaaacgctcaaattccgggggaagcccgcggaacatttcggaaggcataccgccccgctgcatgactttcttttcggtgctgatattgacgacggccttaccggcggactggaccagcgggacgaagtcgggaaccacaggcgcggcctgtgccgaaaagaccaatgacatgacgagcatgacagcaacgagtggcagcatcttgtatttgtgcaacatgtgaaaaactcctttataccatatgtggggacagtctcggtcaaactgtttccttcataatagccataggcaaaaggttgtaaataccttgatttggtacaaacttctttactttttggcttattggagccgtttcggcctctctcattgccgaaccgtgcaaaatgaagaacttattgaagatgaaaaatttgtactgctttagagtgggagtgataagtttattgagatacggggaggagaggcggttttgaagaaaggtttattcccagccctcttgcctccgaaggtttccggtgcgcggggaagcggtatgggggaagcgtgttccgatggctattttttagggtaatctattgtatatatgtaagttgttgaaggtagacgacgcgttggaacgtttgaaccgtacgcgcaggtaacagttgtttccgggggatggaatagctcttatgatgataaagagaatggagaacaatagcctgtagggatggttagagaggttttctctctgccatcaatgagttgagatgatatttcaatatgttttcgataaatgcctgtggcgttcggccaaagaaaaaggcgggggatacccgcctttcggatttatggcgtcatcatgctcagtgcttgcggcagagggtactctcgttgccggcctgaatggcgacggcgacgagcaccggccccgcgaagacgcctaccggcccaaacgcggcgaggccgcagaggatggagaggatcagcgtaacgaccgacgcgtcgatccccgtcttcaggaagaaggggcgaagcaggttgtccaccccggctacgaccagcgcacaccagatggcaaggccgatgcaggccaccgtggaccccgtgagccacagccaaatgcataccggcagccagacgagagccgtgccgacaaaagggatgggagccacgaacgcggcaatgaggccccagaacgcgggttgggggacttccgcgatggcgaagcccacaccgcaaaggaacccctgaatgagcgcgacaaacacgactcccaccaagacgccgaagatggccttacggatggttgaaacgaaacggtcgatgacctcggcaggccactgggtcaggcggcaggcgaattcgtggataagatccgcacgggttacgcacatcattgtgatcatgacaaaaaggaacagcaccagcacggcctggaacgcgccgcccgcaatgcccacgccgcccgcaagcacggtccgggccgccgtcccggcaaggcccgccgcggtactggcaagctgatccagcccgccctcaagcccggggaggtttttgagccatgcgtccacggaagcgaaccacgcctgggcttcctggctgtgtatccagccggagtcgcgcaggccgtcgagaattttgagccctgcgacggcttgcggcgtcaccagcgacaccacggtggcgatcggcaagatcgtgatggccgcgaggcccacggtgtatgttgtcatggcccacgagggagacattttccggtgcagcttgcggtatgccggataggtgacgcaggccatgcacgtggccataaacgtcgtgatcggaaaaggccagagcaggaaaacccaagctccgatggccaaacaggcaagcactcgtgtcatggaaaactcctcgccgtatgacggcgggtcggtttgctgcataaagggggccggctgcggaacaaagcgtcgcgcgggaacggctctccggcctcggcgggatggcgcagcgccgtccgtaaggcttcggagtagatatcaaacagattggaatcggtgggtccttatatgcggggcgcttcggaaaaggaggaacgcctttcagcgttgacgccccacgtcggagcgggccgccatacgtcaggtgcgcatgaggtgggatggtactgttacagattccctgactcttcattgtactcgcgcacggctttttccatccgtttgcggatacgctccgcatcttgccgggcagtggcgagatacgcctccacgcactggcgataggcttccatgtcggagcggtacatcctccagtccatcgggctgtcgccgggcagaggccgcagcggggagcggcagtcgggggcgggatagtcgccgcccggaagcagggacgcggcttgcgccgtaaagggcagaaggagcaggggcagcatcagcagagtacgcatatcgtttcctttccgggaggaattccgggatacacggggagtttctatcagaaaaggccggaagagtatagaaatccttctcaagagggcgcggtggggcgttccgggcggggggcgagcagggcgtatcctccccagaccgcgcagaggcacaacaccatgttaagggctatgttcagcgcggccaaggatgcatcgccggagcgatagagcagaaacgtgtcgagcgagaaggtcgaaaacgtggtaaagccccccaaaaagcccgtcccgagcaggcaataacccgtggcgaacgtgttgcccgtgcgccgcatccagccttgaagcaggcccatcaggaacccgccgagcacgttgacgcacaatacgcccagcggaaatccggatggcagcttctccatcacggcgaagcccgtcatgacgcggcagaccgcgcccgcaccgcccccgagcatgacggcaagggcatttctggggaggatcatggcgtgattccggttacgggacaatgagaaaataggccgcagccgtggcggtgaggcataacgttgtattcagcccgatgttgagcattgccttggcgggatgcccggcatggaaagcggcgagggtatccattgagaaggtggagaaggtggtcagcgcgccgaggaatccagcccctgcgaacagcgcgaaagcggaaggcgttccccatcgctgccagcatccggccagcaggcccatgagcagcgaaccggagacgttgacgagcagcgtcccgcaggggaaggctttgccgaagcggtcggcgcaccagagcgaagcaccgtggcggcacagcgcgccaagcgccccgccagccgccacgcagagcatttccgcgggcatcatcagcgtttccccgccatgtggaagttccgccagcggcaactgcgcgtttcgagcacattgcacaattcgtagagggccacccccagcaggctcatggcgaggatgcccgtaaacatctcaagctgatccccccgtccccacgcatccatgatcaaaaagccaaggccgcgccgcgtggcgaaggactccgccatgaacagcaccgccacagccgtgccgctggcgaccttgagcgcggtcatggcgtcgggcaaggcggcggggatgagcacatgccgcagcatctgcagcggcgtcccgccgagggagcggaaggaatcgagatattttttgtcgagcccctgcgcgctggcccgcgtgacgacgaggatctggtagcccgtggtcagggcaatgagcaggacgcggggcagatccccgagcccgaacaaggtcaggaacagggggagcagcacgatcttgggcagaggataggtcaaaaagaccatcggggacaacgtattgtccacggaacggacatggcctaggatgagcccgagcgggaaagccaccagccatgcgaggctcatggcggagagcacccgccaggcgctggccccggcatgttgccagaatgcgcctgtggtgagcgcttccccgaaataggccagcacgtccagaggacgcggcagcagaaattcgccgagcgccagcgatccgatctgccagatcgccaacaaggccgccagcgccagcaggtaacggaagagggcacgcatgattttttcctatcagtagataactgttgcaagaggcttcggagccctgtgatgggagagaacacgtttccgtatgccctcatccaagcgcctggaaaacggacgccccggcacgctttcatgtatgtacttgaaagggattccctgtgttttcctgcattggaatcctcgcgggaaggctccggacatttcagaagaggcccttcaaaacgtcccttccgtttccgtttttcccgcttcagctcaggaatttgtgcaaaatccgggcggcgaggggaaccgtaaggatgatggtgtaaagccggaccatttgataggcgagcacgatgggagcgttggggcccatgtcggcggcaaggccgaccaccacgttcaggccgccggggctggtggcgagataggcgctggtgacgtcgaggttgccgaatttgacgacgaaaatggcgatgagcatcccagcgacgagcaccagcaaggtgctgatcaccagtacgggccacgtgtcccggaccgccagcagcatttccggccggtacatgttgccgaccagcacgccaaggccagcataaatacagaattggaagggccggggaaaggccgcctgaggaagcgaggaaaagctcttgagaagaatgacggctatgatggctccggtcatggccccaccgggaaggccgaaccattcgaagatgaaaccgcccgcagcgccgcacagcaagaggatgatcagtgtggacatgaaaaatccttcgtttccgacaaggcggcgtacacctttttcgtcagtgagaaataccgctcctcgccgcgggggtccgcgtcgccgaaacagggattttccagccacatgacgttacgggcgggatggccgttcatcaccatgacgtgcttgccaagaaacacggcttcaggaacattgtgcgtcacaaggacgcaggtaggacggcggcgttgccacagcgacagcacggtcgtctggaggtgttcgcgggtcagggcgtcgagggaagaaaaaggctcgtccataagcaggatgtccggatccgtaatcagggcccggcctatggcgacgcgctgccgctggcctcccgagagctgcgcgggatagcgcatccccaagccgcccagccccagttcttccagcatgtccgctacggctttccggcgcgtggacggtgcgactccctggagttcgagcggcagggacaagttctcctgcaccgtcttccacggaaagagcccataatcctgcaggatgaacgaaatccttcccttgtcgcgcctgctgacttccccggtacttaccgtgccccggtccggcttgtccagccccgcgaggaggtagagcagggtgcttttgccgcatcccgaagggccgatgacggaaagggtttccccggagggcagatcaaaggaaaggccgtccagaaccgggccttcgccgtagcccttgctcagattacggacggcgatgcccgcatcggacgcacggctcactgaaagaccacatccccataggcggggtctttcttgaggatacggttggccttcatccagtccgcgaaggtcttgatgtccgcctcggaaggcaggccggtcggcgtgtgcgtcatgtcgaaacgcaccatcgtatagttggcggaagctcccttgggcaacaggcccttggcctccatgatcgggcggtaggcatcgggggtttcgttgatgcgcttcgccgcttccctgagggcctcgcggaatttcgccacggtctgtgcgccgtcgggggcgtcgagcacgtcgcgcttcagggcgatgaccgccagcggggtattcagcttgcagtcgttcaggatggtgcgcgctccttttgcctccacaagggacaccagcggctcggggagcagggcggattcgatctgcccgctcaggagcatctggaggcgtaccgggatctggcggatatcctgccggttcaggaaatcgggagcggccccttcctgctggaggagctgcgcgagcagaaaatcaatgatggtggcgctggaaaccgcaatgtccttccctttgaggtcggccagagtttgcgctttggacttgggggagacgacgagcccgaaacagcggttgtccggcgaggagtgcgaggtcgtcgccacaatagcttgcggcgagccgctttcattctgcatgaggacgttgatgatgtccccgaaatgcccgctcagcgcccccgcccgcatggcggcaccgagctccagcgcgctctggaaggggacaagctccacttccagcccctgtttggcgaacaggccttcgtctgccgcgacgtgcaggacgatggtgtcggcggcggggaggacgccaagcttgagcggggcgctgtgcgcgggctggacggcggcaaggacgagcagggaaaggaggactagcaggcggcgcatcatgtgaagttccgttgggttaaaagtgatggttccggcgtattctcaatggaaaaaagatggttgtgcagatttgccggaaccgatccttacaccggattgcggaaaatatccagtgtgccccgttccgcgagaatgccgccgcatcaaggaagatggaagggagagggcaaaaagggttggacaaaacgcgctccgtatgatctgcctgtggataggcagagcttttgtgggagaactgctgaaatgactccggttccggccggacatggtcgaacggccttttcccggcggcgcggatctgctagggaagagaacggcaatacggaataacatgatcccgcgccatccgcagggatacaggagcaacacgatgcaggaaaagctgtttaaccgtctgatggacgtcatcgaatacgacgtcgccccgttgacccgcaagcgcgtcgccatcggctgcaaggtcttcggcgcggcggtgctgcggaaggacgatctgtctctcgtcctcgccgaaaccaatatggaggcgttttccccgctctggcacggcgaagtctacgccatcaagcaattctgggagttgcagggccatcccgaccccaaggactgcatcttcatcgccacgcatcagccttgctgcatgtgcgcgtcggccatcgcgtggagcggcttccccgaactgttttatctgttcggctacgagaatacgagcaaggactttcatatcccccacgatcagaagatgatccgggaactgttccattgcaccagcccggcggaggattccagctattacacaagccgccccatcatgggcctgtgcgatacgccggaagcggcggcccgtttcgagcgcatcaagaacttgtatgcggaactctccgccgtatatcaggctggagaaaagaagatggtgctttcatagtagcctgtgagacgcacccataaaaaacgccttgccgatggtttttcggcaaggcgttttttgtgagcggtctagtgggaagatggttttttcgcggattggaacagtcgagcggagaaacgggaatacgttcagcgcctcacgggtggaaccgcgaatagcctgtacgggggcttctccgctgtcagacggtaccgccatgcgagaggccggttaatcttcatccttgaaccatgtatcgggatcgtagctggccgtatccttgcccgtcagataggcgtccacggcatggacgaccagtttgtagtccgccatgcgtcgtttttccagcgcctgatcgcgggggatgatcagcttgtccggattgacgaactgcccttgcttccggatacggaaatcgagatgggggccggtcgccgtgccggtcgcacccacgtagccgatggtttgcccctgccggacgcgtttgccgttcttcatgcttttggcaaaacgggacatatgcccgtagagcgactccagtccgttgtcgtggcggataatgacttgtttgccgtagcctccggctcgcccgatattggtaatgaccccgtcgcccacggccataatgggggttccggtaggggcgccgtaatcgatgccctgatggggccgggtgttgccgaagaccggatgccggcgcgccatgctgtagcgcgaggtcacgcgcaggaacgagagcggagccttgagcagttcccggtggaggttgtcgccttccgcattgtagtatgtttcacggccgcgttcgttgtggaacagataggccgtatgctgcttgttttgattggtgaacttcgcaccgagcacgcgtccatacccctcaaacgcatcatggcggaaacgcttttccaccagcacctcgaaggcgtcgccttcccgtagatcgctgatgaaattgatttcggaagcgaagacgttcgcaagggcaatggccagcgccacgttttcgccttgttcggttacggctccggaaagcgtgctcttgatctctcctttgatgaccgccagcgaggtctggtagtcgatttcttcaagccgggcgacgaaacggtcgtccttcttctcgacgatgaggtatttttcctgattgatttcgtacttgaaacaccggaacgccttggtctgcggatcccggacaacggcgaagggctggccgaaacggaccttggtcaaggcatataccggcttggccgccgcgagcagctcggcaaggtcgtttgcatccatccagtccccaaggatttttcccgccgtgtcgcctttctggatctcgctgcggaggacttctccctgttcggggtcctgttcgatggtatagcgcggattggcctcatagacgtcggcttccttggcgtcttcctcttcgccatcctctttttgcgcctcttcctcttcatcctgtttgaattcgtccacggcatgttcgggagacaaggacaacagcccttccacgtgggaaaccacgttttcgagcggagcgggaagggggtcggcatcatcacggaaccggagaagcagcgcgaggctgagaaggataaggcacagggagatgatgcaccataaaatccgtcgcatgggcagacacctgaatcattgcaaacgagttgaagttcgccggtcgccgcgcggagccgttcccggatgacggaaagcggcggaggggacattccccggcgcggcacgaaacatgcctcatatcctattcgaacagaacaacctaccgtttttttggtaaaaatatttttacaaagtggttgccgccagatccgttccacaacagcggaagtacgttgaagcttgttcgggccgtatggaaagccgatacggagaacggcgcagtgaggggaggtgcggaacgacagaagctattcaccatgctggttctgatgaaaacgcggaataacgcggtgttagcatggtcatatttctcggagaaaaaatttttgtccgaaagcgaaaaaagagcttgccaaggaaggggcttttcgctagaaatttcttcgcgccgaagtggtggaattggtagacacgctaggttcagggtctagtgaaggttccttcatgggagttcgagtctccccttcggcaccataagaaagtaaacgggctggcagagcaatctgccggtccgttttgttttttcgtcatcgtcttttgaggccctgtacgctggcaaaagctcatggaggaaccgatgccggacaatagacgtactgtcggtgatctgcgggcgttcagaagagtggccatgttttttatgtgcgttcgaatcgttctcgctattgtcggccccaaacttgaggcctttttaggtatgcgatgagtgaatgagattgggctgtttccagcctttgcacgcgagatttttcaacgcgccggaattcttgatgagagaagttcggcgctttttttcgcccttttttcagcaggatcctttgtactttcaccatgtgttgaatgtcttgttttgaagctcctgggacgtttgcggaactcgcctgtcctgtgcgtttcgaaactgaggcgggttccggaaggctcaggcgtcgtttttccttggcaggctacactgagagaataaggcaagaataaaagaggatcgtatctgttcttcggcatagtgaccggatatgtttcttacagaaaaaattgtcggcaaaggagtccgtcatatggaaaaagatatgctttccaccgccgtgagcgaaccggtcatcctgcgcaacggttcgcagccttccatcaaggggccggatgcatggtttaccggcacggtccgcatcgatcccctgtttccggcccatacgccggcacgtgcctcaagcgcttacgtcactttcgagccgggagcccgtacggcatggcatacccatcctctggggcaggctctgatcatcacggctggggtcggcagggttcaggtgcagggtgggccgattcaggaggtccgccctggcgatacggtctggttccctccatacgtcaaacactggcacggagccgctcccggcgttgccatgacccatatttccgtggctgaagaagagggtgggaacaacgtcgagtggctggaaaaagtaacggaagagcaatacacgggaaattagagccgttgttccgaaaggccggattgtgcggggcaatgccttatgtgtaccgtgcgttgggaacacggagaacatatgcagtgtgtatatgtttcccgtcatcctgctgcagggtgtcataagagttctttgaaagaagaatgaataaaaaggttgcaagcatcattgcggagaggcaatcaaggagttcataatatggctgaacagttttcccgccggagttttctgaagggcggagcgctcactgtaggggccttcgcttttgggggcttccccaggatcgatactgctatggccgcgccgcaggaaaaggccaaggtctttttcacgaaggatatcagcctcgaagggttgatgaaggtctatgcccgcgtcaatcatggcatgagcggcaagatcgccattaagctgcatacgggcgaaccgcatggtccgaatattttgccccgcgaaatggtcaggggattccaagcgaatattccggacagcagcattgtggaatgcaatgttttgtatcccagtccgaggcagaccacggaagggcatcgtgaaaccctgaggaccaacggctggaccttctgccccgtcgacatcatggatgaggacggggacgtaagccttcccattcccggcgggaaatggcttacggaactgtccgtcggcaaacatatcctgaattatgacgccatgctggtgctgacccacttcaaaggccatactgtgggcggtttcggcggttcgctcaaaaacatttccatcggctgcgcctcagggaaactgggcaagcagcagatccatcagctgccgggcgacgggacctggccgggaggcccgctgttcatggaacggatggtggaaggcggcaaagccattaccaatcattttgggcaacatattacctatatcaacgtgctccggaacatgtccgtggattgcgactgcgccgggctcggcgcggcggcacccaccacgccggatttggggatcattgcctcgacggatattctggccgtcgatcaggcttcggtggacatggtttatgcattgcccgaagcgcagcggcgcgaccttgtggaacgcattgagtcccgcagtggcctgcgccaactcgagtacatgaagcttcaaggcatggggaacaatcaatacgatctgatcaccgtgtaaggtattcgggatctccgccgatgcgcgcgaagggcatcggcgggggacggtagggcggttccgaggaatagtcggggccgccttgccgtatcccgcccgtgtctgaaaaagagagaatgtctggagattccatgagaaggggtatgcgcgtggcgttcggtctggtccttttactctgtattcttatcgggggagggtatgctttcatgtcgcaggcttcattcggcaagttgcctgaaggtgaccgccttgacgcgatatcgcagtcgcctcactatgagggcggtgcctttcgcaatacggagccgctgccgcccataaaggggaatggcggcattgtgggcgcgttgatgaaatacgttttttcgtcaacggaaggccagaagccgactcgtcccatgccttcagcgaaaaccgacctgcgggggctcgacaggaatacggataccgtcgtctggctcggccattctacctacttcgtgcagctcggcggcagacgccttttgatagatcccgtgttcagtacctatgcttcgccggtctttttcgccaacagggcgttcgaggggacgaacctttacaccgccgaggacatgccggacatcgattatctgctcatttctcacgaccactgggatcatctggattatgccacggcaacggcgcttcggtccaaggtggggcaggtcgtctgccccctcggcgtcggggcccattttgaggcttggggctacggcaaggaaacggttttcgagggagactggtattccgtccttgaggggaaagacggcttcgccatccacatcctgcccgcccgccatttctcgggccgctcactgacccggaacaagaccctttgggcgggctttgcccttgttacccctgaacgcaggatttttttcagcggagacagcggatacggcaagcatttcgcggaaatcggcgcacgcttcggcgggtttgatctcgctatgctcgactgcgggcaatacgacgagaactggcggtacgtccatatgatgccggaagacacggcgcaggccgcggaagatttgcgtgcccgcgcgctgctcccgggccacgtggggaagttcgccattgcctaccatacgtgggatgatccgtttaaacggattgtggcggcgagccgaggcaagccgtatcggcttctcctgcccctgatcggtgagcccgtcgccctgcccatcgcttcggacggtgagatcctccgctggtgggaggcaggacggtgacacggcttcattgatgggcgaaaaagccccggcatttcccttgactgagcagggaatgcggggcctttcttctttatggaagggagggctcacttttcttcagaaacgttttccgttttccttcccttccacaatttcttcacacggcttgagagctcatccacatgagcgggcgtattttttagcctgttcgctgatcagatccatatcctcaaaatagttgattttcatggcccgtcttacgtcatccagcgtccgggcggcggcttcgcgggcccgcatactgccttccttgaggatgtcatagatggcgggaatatccttttcgagttcccggcggcgattgcggataggttccagttcgtcctgcaggacgttgttcaggaactttttgaccttcatgtcgccgaggcctccacgggtatagtgggccttcatttcttcgatgttctgatagtccgggaagtggcgctcgaaatgttcggggcggctgaaagcgtccagatagatgaatacggggttatcctcgacctgaccggggtcttccacgcggaggtggttcgggtcggtgaacatggacatgaccttctttttgacctcgtccgcgtcttcgcccagatagatgcagttgccgagcgacttgctcatcttggccttgccgtcgatgccgggcaggcgcaggcaggccttgttgtccgggagcagcatctcgggctcgaccagcgtgtccccgtaaaccgcattgaatttgcggacgatttccttggtctgctccagcatcggggcctgatcttcgcccacgggcacggccgttgccttgaaggccgtgatgtcggacgcctggctgatcgggtaggtgaagaaaccgaccgggatgctggcttcaaagttgcgcatctggatttcggatttcactgtggggttgcgctggagccgggccacggtcacaaggttcatatagtagaaagagagttcgcagagttcggggatctgcgactggatgaacatcgtggattttaccggatcaaggccgcaggcgaggtagtcgagggcgacttcgatgatgttctggcgcaccttttcgggatgctcggcgttgtctgtcagcgcctgcgcatccgcgatcatgatgaaaatcttgtcgtacttgccggagttctggagctccacccggcgcttcagcgaaccgacgtagtggccgacatgcaatcttccggtgggccgatctccagtcaatataatctgttccattacagctttcctttcgcctgtttcgtttttttcggttgacgcttgaggcgtgcgcggttggcgtcgtagcgcgtctctccatatccgggctccgcttcgtaacggtttctgttcatacatgatagggcgatgaagttcaaacgcccggtgttacccttggatggaggagggggcggggcctcgcagcagcctccccacaccttttttgcgctgcgccagcgggcctcgccgccccggagcccgcattccgcctcgcttatgtcgatatagggaagacggcctctttcttaatggtgaatgcatatttgaataaacttttcttattccaaaacggaatattgcttatgaaaaaaagaaatagtttatagtattataaaaaaatcc

SEQ ID NO: 7600 - DNA, 331 bp, Unknown
  gut microbiota DNA sequence
gctgaatgtatggtgaagcggctggccgcgcacgttccgggttgctgcgggaggcggagaacggctccatgcggccttcgtgcctgtaacgtatcaggtgtgtcgctccggggagggaagcgtccccgggcgctcggaggctagtagttgcagttggaaccgtaaccgccgccgtgtccgccatggccaccatgaccaccaccgtgacggccgccgttgtggtagcccatgccgttgcccatcatgccgcggccgggctggacaccgagttccttttccatcttgtcgccgagggtcatgcgttcggcgcggagctgggagcggagttccg

SEQ ID NO: 7601 - DNA, 165 bp, Unknown
  gut microbiota DNA sequence
agggctgcgtggccgacgtctcgtgctgcgagcccatgccggggatgttgccttcatccgtagtcaccacgctcgagccgcccgaaggggcgtcgttgaacagcggggccgccacggtgttcaccgtcaccgactgttccgccgtgtcgccgtcgccgtccgtca

SEQ ID NO: 7602 - DNA, 137 bp, Unknown
  gut microbiota DNA sequence
cattccaataaaaagcaggaacaggattgggaaaatgaagctgaatatagcgtcaaaccatccaaaaagcattttactcctccaaaatttcttccagcaggtcttttacatcgttcagaaaagattcttctccgagg

SEQ ID NO: 7603 - DNA, 741 bp, Unknown
  gut microbiota DNA sequence
tccgtccacttcaaattccatccggtcgccgctctccacctgaaaagtcacatagtacgatgtaaatgtgctagtgtcgtatccgtgcgcaccggacatatctccggcattggcactgctggaatgcgaaacatcggtgcgctttgctaccactgttgccggaacggtaagccgcggcgagtggttgtttttgttccatgtgcggagatttgaaattagagcaaagaaaaacattccaataaaaagcaggaacaggattgggaaaatgaagctgaatatagcgtcaaaccatccaaaaaacattttactcctccaaaatttcttccagcaggtcttttacatcgttcagaaaagattcttctccgagggtgttcaccttgaagaacaccgcttgactgcctcctgcggtgatggcagacagccgaaccggactgtccgcattctggaacatggtcagagtcagactcaggcggttgccgcccatcatgctgtaccgttcaaacacccggacactgcaccgagcatcgccctctttgaaatcactgcctgcctccaaatctgcagaccaactgctgtctggaatttcattttccagcttccgaagcaacttgtcaaagtttttgtttcggatggtcttttcaaagattgccataatggttcctccgttctgacaataaaattcagtcccttaatcttgatacgagcagagccacgggaaaattgcggagaaatcgcttgaag

SEQ ID NO: 7604 - DNA, 1070 bp, Unknown
  gut microbiota DNA sequence
ggaacaatccagagcgccttgtccaggtctatttccgaccatcgccccccgcgcaattctgcgctgcgcaaggccagatagggcaatatcttgagtgcgtaaaacacaatagtgccgccctggtattcgtcgatactccgcaacagatgccctacggcggcggggtcagtcatggtggcgtagtgcttggtctggatgggcttcagaacttctttgaggccgtcagccggattgaagacaatatagccgcaagtgcgggcgaagcggcagacctgcccggcggtttcggccattttatgtgcggtgacggaatgcccggcagcttccacagggcggatcgcgccgataatgtccgccggaacaagcgtggtgatgggtttgttgccaatgcgctcgttcagcaagctgataatccactgctttttcttgatgttggaggcggcatacgcatcttttttggtttcaaaccattcctgggcaaccaccgcaaaggtcagcgcctgttccttggctatggcctcagcttccgctttgaccgctttcttgtgcgctccggggtcaatgtctttggccagaagttctttggcgttgtcgcgtttaccacgcgcgtctttcagagaaacagcagggtacgcgccgaagctcagagtttttcgctttccggcaaaacggtagtccatacgccagagcttgccgcccgtgggcgagaggaacaggtacaagccttcggtatcggcaagtttggagggagtaccgtcaggtttcaaattgcggagcatggtgtcggtcaggggcatggcaaaatcctttggtggcaagggttttacggatgacggtattttgaaaacgtgaaagtgtcctcggcggggtgtaccgtttagaataccgtctttttagtgcgttgtccgtagacttcgtgacaccttacgagacttgccatacgccaaaaacacaagtcccgcaaggctttatagaccttgcgggacttgtttggatttcctgatggtgccgaaggggagactcgaactcccatgaaggaaccttcactagaccctgaacctagcgtgtct

SEQ ID NO: 7605 - DNA, 247 bp, Unknown
  gut microbiota DNA sequence
cgttcacgggcgggagcgacggctcgtcgttccagctgaacggcaccgcgttcacgtacacgcgcccggcctcgaacaccacggacggccggaacgacacgatcatactcaaggtgacggtgacggacggcgacggggacattgcgcagcagtcggtgacggtgaacaccgtggccggtccgctgttcgaaggcgccccctcgggcggctcgagcgtggtgaccacggacgagggcaacatccccgg

SEQ ID NO: 7606 - DNA, 326 bp, Unknown
  gut microbiota DNA sequence
ttacagttggatggtatcaactaccgggcagaagtatgggtgaatggtaacttgttgagcacaatgaatggtatgtttattcaggactatattgatgttacggattttgtgaaaatcggaggaaaaaacggactggctataaaggtctatccggtagatgttcctggaagtgcgaagccgaaatcctggggagcagccggggaattccataacggtggaaacggtaacattggtttgaatactaccatgttgatgacagtaggttgggactttacctttatggacggtatccgtgaccgtaatacaggtatatggaaaaatatttc

SEQ ID NO: 7607 - DNA, 335 bp, Unknown
  gut microbiota DNA sequence
ccggaaaacaccaccacggagaggctttcgatgaagaaggacacggcgatggcactgatgagcgccgaaatgcgcggggcgtcgcgcaggggccggtaggcgatgcggtccaccaggatgccgacggcgctggccgcgaggatggccaccaccacggccaccccccagggcaggaagaatgtcgtggtgccgtaaaagacgaaataggcccccaacatgagaatgtcgccgtgggcgaagttgatcagccgcaatatcccgtacaccatcgtgtacccgatggcgatgaggccatacagggaacccagtgtcagggcattgaagaagtgctggaa

SEQ ID NO: 7608 - DNA, 191 bp, Unknown
  gut microbiota DNA sequence
agggtgcccgtgagcgcggcctcgccgtcggcaaccgtcgtctgcgtggtgtccagcgtgctcagcaccggcgcgtcgtcaagcgcgtccacggtgatttggccggtcgccgtgccgcccgtagtcgtgatgctcacgtcgaacgcgtccgcgtgcacggcctccccgcgccccgcgtcgccttcgccggg

SEQ ID NO: 7609 - DNA, 195 bp, Unknown
  gut microbiota DNA sequence
tcggcgctcatcagtgccatcgccgtgtccttcttcatcgaaagcctctccgtggtggtgttttccggccttccgcgccccgtgtaccagccggaatggctcatgacgcccatcaatttcgggcagctgaagctgctgccgatcacgctggtcgtgcccgtggtcagcttcgtgctcgtgctcgggctcctgtgg

SEQ ID NO: 7610 - DNA, 165 bp, Unknown
  gut microbiota DNA sequence
acgggcgacaaggccgtggaagtgaacttcgacacggaatacaagctgtacaagaacctctccctgttcgtggaactcggctacatccgcctcgatctggataaggatctgtggaagggcgtgggctacgaagcgaaggaaaacaacttcaagggcaccttcagc

SEQ ID NO: 7611 - DNA, 191 bp, Unknown
  gut microbiota DNA sequence
gaagtatgggattatctggatggaaatggtttccatctgatgagtactatgtatacagacttggtgaataactacggaaaatcatcatcgattgatgagtttgcacagaaagggcaattgttgggagctattaattcgaagagtatctgggaagtatggaactacaataagctggattatggtgatcgttt

SEQ ID NO: 7612 - DNA, 195 bp, Unknown
  gut microbiota DNA sequence
tcggcgctcatcagtgccatcgccgtgtccttcttcatcgaaagcctctccgtggtggtgttttccggtcttccgcgccccgtgtaccagccggaatggctcatgacgcccatcaatttcgggcagttgaagctgctgccgatcacgctggtcgtgcccgtggtcagcttcgtgctcgtgctcgggctcctgtgg

SEQ ID NO: 7613 - DNA, 326 bp, Unknown
  gut microbiota DNA sequence
ttacagttggatggtatcaactaccgggcagaagtatgggtgaatggtaacttgttgagcacaatgaacggtatgtttattcaggactatattgatgttacggattttgtgaaaattggaggaaaaaacggattggctataaaggtctatccggtagatgttcccggaagtgcgaagccgaaatcctggggagcagccggcgaattccataacggtggaaacggtaacattggtttgaatactaccatgttgatgacggtaggttgggactttacctttatggacggtatccgtgaccgtaatacaggtatatggaaaaatatttc

SEQ ID NO: 7614 - DNA, 2528 bp, Unknown
  gut microbiota DNA sequence
tcctttcttaaatgtttaggtttggtagcttaaagcataacacagaaaaggtatttccgctttttaattattcagttgtaacacatgtattgtaatcctacacacaagttaataacatgcctgaatcccgtggttgaagtatcttttgagatatgataaactaaattggtatgtccggaagatgttccgggaaaaataaaagaacgaacagatgcattttataagcattaggagaaaagaaacatatgtcagagataacgaatgaaataaaaaagagaagaacatttgccatcatttctcatcccgatgcgggaaagacaacgctgacggaaaaatttctattatatggaggggtgatcaatcaggcaggttctgtcaagggaaaagcgacatccaaacatgcagtttcagactggatggaaatagaaaaagaaagaggtatttcggttacttcttctgtattgcagtttaattacgatggatactgtattaatatccttgatacgccggggcatcaggatttctcggaagatacttacagaacactgatggcggcagattcggcggttatggtgattgatgcgtcgaagggtgtggaggctcagacgcgaaaactgtttaaagtatgtgcgatgcgtcatattccgatttttacctttatcaataagatggatcgtgacgcaaaagatacgttcgatcttttggatgatatcgaaaaggagctcggcattccgacttgtccggtaaactggccgatcggctcgggaaaagcatttaaaggcgtgtatgacagacagaaaaaggaagtagagcttttctcggatacgaggaaaggaacagcgacaggtgaagtgaaagttgtagctatgaacaatccggagattgactggctgatcggagatgaagcaaagacaactctgatggaagaaatcgaacttttggacggcgcttcggcagaatttgacagagagcttgtcgataaaggcgagctctctccggtgttcttcggttctgcacttactaacttcggagtggaaacgtttttaagacattttctttccatgacgacgtcccctttgccgaggatgtcagatcatggtgcgatcgatccgatgaaagaaaaagaattttcggcctttgtttttaaaattcaggcaaatatgaataaagctcatagggacagaattgcgtttatgcgtatttgttcgggtgagtttgatgccgggatgaacgtatatcatgttcaggggaaaaaagacgtaaggctttcccagccgcagcaaatgattgccagtgaaaggaaaattatagacaaagcatatgggggagatattatcggtgtatttgatccgggaattttttcgataggcgatacactgacaacgtcaaaagaaaaatttgcttatgaaggaattccgacatttgcgcctgagcattttgcaagagtgcgtcaggttgacacgatgaaaaggaaacagtttgtaaaaggaatcaatcaaattgcacaggaaggagcaattcagatctttcaggaatataacacaggaatggaagaaatcattgtcggcgttgtcggcgttttgcagtttgatgtattgaaataccgtttgaaaaatgaatataatgtagagatcctcctcgaaaaccttccgtacgaatatatccgatggatcgagagtgcggatacggatcttgaccgtataagcggaacgtcggatatgaagaaaataaaagatttgaaagaccggccgttacttttgttcatccatgagtggagcattagaatgacgttggaaagaaatgacggacttgttctttcggagtttggaagatcttaaaaatcggattcaaatacagagttctcttggcggtgaactttttctttgcaaacggatggagatttgttataataagaaaagagatgatacaaaacgggaggttttgaatatggctaaggacgaaagaaatgcttatacaatacaaaatgatgcgagtctcggcgaagttaagatcgcggatgaagttgtagcgatcattgcggctctggctgctacggaagtggatggcgttgcttccatggccggaaatattacgaatgaagtgattggaaagcttggaatcaagaacctgtcaaaaggcgtaaaggtagatgtattagagggtgtcgttacagtatctctggcattaaacctgaaatatgattacagtattatggaagttacgaaaaaagttcaggaaaaggtgaaaaatgcggttgagaatatgacggggcttgaggttgcggatgtcaatattaaggttgccggagtagagatggagaaacagaactgatctgctttcgtattgcaatatgtgacaaggcgatccgcccctgacattgatactaagggatgtcgcaagacatcctttttcaatattgcgcggcaataagatacaagcgggtacgagcaggacaggaagatggcaaaaggccgtgtgcgccgacagaagatgattatgacaatagagagcttcctgtataataaaaa

SEQ ID NO: 7615 - DNA, 23022 bp, Unknown
  gut microbiota DNA sequence
agttcttaaaaatttttctctttaaagaaattttcaagggttgttgtctattgttcagttatcaaggttctttctctgttctgtctcaagcgacagcttttacattttatcaaaagctttatcatttgtcaagaacttttttaacttttttcattttcttttttgtgaagctttctctcaacgagtcagctcatatataatatcatttgtgtcagtttttgtcaagaacttttttgacttttttcaaaaacttttctgatattattttgatacgctattttcctgcttcccgaactacggtttgcaattctcaccgaatattcgacaagatttttcgcgcatcaagcggagaaggagggatttgaaccctcgcgccgctactaacgacctactccctttccaggggagccccttcagccaacttgggtacttctccaaaaacggagagggtgggattcgaacccacgcgccctttcggacaaacggttttcaagaccgcctcgttatgaccacttcgatacctctccatatttacaacagtgaaaatcggcttattgaacttcccctgtgcaacgtacgttatgatatcacatgtacatttcctatgtcaagaccttattttatattttacagatttttttgcttttttccataattgcagagcgtatttttctgctaaactgttttttctactttatatgatataaaataccggctgtttctcggaaaaatccgcaatacagccggtgtctggcgcaaaatttgtctatgactctctgtttctatttttgaagagtatacttatttgccgacaaacgcttctgccacctttaaatcttcgggagttgtgatttttatattctcataagatccctcatacaatttgaccgattcacccaacatcgtttccacaaccatagcatcatccgttacagcgctttctccttctttttccaacagccggtatgcacgttttatcaactccgtatcaaacacctggggcgtctgaacaatccacacatattttctttccggggtctgggatacaatattattgtcgtctacgattttaactgtatcttttacaggcatccctgccgcgcaggcatgttcccgcaccacacattcatatcccctgcgaataatattttcattcacaaacgggcgggcgccgtcatggatgtatacatatcccgcctttgtctcttttaaaccgttccaaaccgaatgatatctctgttcgcctccgcatatgattttctgtactttaaaaaagccatatttctccacaatctctgtgcggcaaaactcttcttccccttttccgacaacaagaatgatctcatctataaggtcggattgttggaatgcctgcagggaatacgcaagtaccggcttttcacacaactgcaaatattgcttatgaacttttgttcccattctctttccgctgcctgccgcaagcacgattgctgtacaatatactttcgtcatagttccacccccttccgcttccacaatctcacctttatcttctctgtctatgacattcttcggctttaacactctttgcctctaacatcctatctttttgatattctctgttttaaaactctccgcgtctttaacattctatctttttggcattctctgtttttaaactctctgcgtctttaacatctcatctctttggtattctctatctttgatattttctgatttttctatcgttcaccgagttttaaattcggcaccgcattcagatcccatccatgacgcgtacctgcaagatattcatagaatcctgctgcgcctatcattgccgcattatctgtgcaataaatcggagacggatgatagaattgaatgccccgctttgcacacgccgcttccatagccgttcttaacgccgtgttagatgcaacgccgcctgcgatcgcaaatttgcgcatactgtaatcttccgccgcctgcatagacttctctaccaatacttccacaaccgctttctgaaaagatgcggcaatatccgcaggatcaaaactttcacctttcatcttgcagccgtttatataattgagaaccgccgacttcaaaccgctgaaactaaaatcatattttgcaccgtctacatttgctttcggaaattttattgcatcagggtttccctctcttgcaattctgtcgatcttcggtcctcccggatatcccaatccgatcgcacgcgctactttatcataagcttctcctgccgcatcatcccttgttcttccaagtatttcatactttccgtaatctttcacacatacaagatgagtgtgccccccggatgcaacaaggcacaaaaagggcggttctaattcgggatgctcgatataatttgccgaaatatgcccttctatatgatgcacgccgacaagcggaagccccgccgcataagcaatcgcctttgcttctgccactccgacaagcagcgcccctacaagtcccgggccgtacgtaaccgcgaccgcatcaatatctttcaatgttacctccgcctctttcagcgcttcttcaatcacctgattgattttttcaatatgtttccgcgatgcaatttccggaacaactccgccatataatttgtgcagatcgatctgcgatgaaataatgtttgaaagaacttttcttccattgtggacaactgcagccgcagtctcatcacacgaactttcaatcgccaaaatattaatgtttcttatctctttcatttcacgcctctcaatcttcaaacatcaactccgcagtcatgccgtcttttcccgcttttgccctcggaaaaatacggcgcacctcatccatataatactgcggttttgtcagcgacggactgtaatgcgtcagccacatctcctctacttcggcttccttggcaagtgccgccgcctcatagaacgtcatatgcttgtattctactgcttttgccgctttttcttgttctccgtacattccttcacaaataaacagatcagaaccggccgcattttctttgatcgagtccgtaggccgggtgtctgtcgtgtacgtcagttttatcccttttcgcggagggccaagcacaagatcaggggtatagactttatcctctgtctcaatcgtctcgccattttgaagccggctccaatacggaagcggaattccctgttcttttgccctctgagcatcgaattttccggcgcggtcaatttccatcgtatatccgtaacaaagtacgttatgatttacacggaaagctttcagtctgtatccgtttatctcgaatgtctgttcagcgccttctatctccttaaaaacgatcggaaacggaagctcgggcgcaatcactctaaggcagctcaccacccgctcaagtccttttggtccgatcaatgtaagcggctctgtacggtctgcatttcccatcgtaaggagcagtcccggaagaccgcttatatgatctccgtgataatgtgtaaaacaaatcacatcaatcggtttaaaactccatcctttttctttaatcgcaacctgcgttccttctccgcagtctataagcatactacttccattaaaccgcgtcataagcgccgtcagataacgataaggaagcggcatcatcccgccgcatcccaacaaacatacatctaacatttatttttctgtccattctttttgttttaatttttcactctgcgtcaacgggtattttaaaagaactcacaagatcatcataacaagattcgcacagatcaaaatgatgcctttctccgtccttctccgaaaaatacccccattcgcagtctgcactaaatacgccttcccggggttccccgtttctgacaacaatttcttttccgcaccgattgcagataatcgcctcggtttcttttatcatttctctttctttcaaataatatcggcgcatatcttatcctcctgtaaatagaaatttacgtttccgctatgcccaaagtatatctgaatttttttcaaatttctatcggaaaccgattccgtttttgtcggtttttggcattattaattttatttaactgttttgctcatcaaaaccgcatcttcatcagggtcagaataaaaatgctttctgatcccgtcttccgtaaatccttcgcttgtatataatttgtgtgccgcttcgtttcctgaccgcacatccaacaatattttttcaattcccgactgtttccctatcttttcaagcgcgcctaaaagttcccgggcaaccccttgcctccgcatctctttcacaacgcctatacgcgcaatttccatttcttccgcagccgtatatgccaaaagatatcctgccgtgcggtctgctttttctgcgatcagacaaatcgcatttggctgtttcagcgtttcaagaattgatttttcactccatgcatcacggaacaaactatactccagttccgcgattgccgctccgtcttccatgaccatacggcggatttccggagccgcatttttttcttttgccgctctttcccgctccgcctgagaaacgcgcagataatccggtttatgttctgccgccgtttcataacgtcccatcttaaaatagcggataccaagcgctcctaccactgccgcacgctgtctgtttaaatatgacggcgcaaaaaaatacggaactttcagacccttttccagcatcttgcgatatacaggtactccatcgcccaagaatacgactctgcgtccatagatattcagccttcgtatcaaatcttccactgaaaccgccatctgtacacgtattacctgaaatgcatatttcatctgtccgtgttcggaatcttcactctcctttttcggaacaaaagagtagattcctgtataaacctgatttcttcttgcatccatgatcggacatataatatcctcgcatccgtagatactgtatgccatcgcttctgctgtcggtatatggatcaagggcttgcctaacgcaagccccaaaccttttgctgttgcagatccgatccgaagtcctgtaaacgatcccggtcctcccgcaactgcgatcgcatcaatcgtgttcaaatccgcttctaccattttcaccatttcatcaatcatcggcagaagtgtctgtgaatgtgtctttttataatttattgtaaattccgcaatcgtcgtgtcgtcctctactattgcaaccgtagctgtcagacccgaactatctattgccaaaactctcatgctttacatcctgctttccttttcgctttcttccggcattcgtccgccattcttcattcataaccgcagttcactgccgccaaactttataccgtcttatccggtcttatccgatcgaacctcacttcatctcattgattatgatcttccgatagtcaaaccctttttccaagtctttttctatgataacttccgtccggttttccggaagaatctcttcgatcagattcgcccattcgatcagcgaaacaccgtcgcccataacatattcttcaaatcccacttcatccatctcttcgatatccccgatccggtacacatcaaaatgatacagcggcagtcttccttcgtcatacacctgcacgatcgtaaaggtcggactgtttaccggttcttcgatgccaagtcctttggcaagtccctgtgtaaaaacagtttttccgactccgagatctcctgtcaaagtaatcacctgccccggaaatgctttttctccaagctgtcgccctgccgaaaacgtttcctgaggactattcgtttctaaaatcatgttacagcgcctcttcttaatgatggaataagcgaattccggtaaatgccattgccattccgtatttattacatgtagcgatcacattatcgtctcttacagaaccgcccggctgcgcaatatatttcacgccgctcttatgcgcgcgttcaatgttgtcaccaaacgggaaaaaggcatccgatccaagagcaacatctgtcattttatcaagccattctctcttttcttctcttgtaaacacttcaggttttactgcaaatgtattttcccacacgccgtccgcaagcagatccatatactcatcgccgatatacagatcgatcgcgttatcacggtccgcgcgtccgataccgtccttaaactgaagtccgagcactttcgggctttgacgcagccaccagttgtctgccttctgtccggcaagacgtgtacaatgtattcttgactgctgccccgctccgataccgatcgcctgtccgtcttttacataacatacagaatttgactgtgtatatttcaaagtgatcatggaaatagcaagatctatcttcgcctgttccggtatctctttgttttctgtaacaacatcagagaagaagtccttatcaatattcagttcatttcttccctgttcaaatgtgatgccgaatacttccttatgctcaagcgctgccggaacataatcaggatcgatctcgataatattataatttccttttttcttttgttttaatatttcaagagcctccggttcatatcccggtgcgatcacgccgtcggaaacttctctcttgatcaattttgcggtatccacatcacacacatcagacaacgaaataaaatctccgaacgaagacattctgtctgcgcctctcgcccttgcatatgcgcaggccagcggagacaactccccgagatcatctacccagtaaattttcgcaagcgtatcagaaagcggaagtccgactgccgcccctgccggagatacgtgtttaaacgatgttgccgccggaagtcctgttgcttttttcaactcggacacaagctgccatccattaaatgcatcaagaaaattaatataccccggacgtccgcaaagcactttgatcggcagttcacgtccgtcactcatataaattctggacggtttctgatttgggttgcatccatattttaattctaattctttcatcttcttatccgctccttataatctttatttgcgatctttattcgtaatccttatttcgtaatctttatttatgatttttatttacgattttcgtctcatactttcctgtctctatatcgatataacgcacgaaaagagatactttattatcttcattcaggctgtgccataacgtctcggtgaactcgtccatatcgttcgggattccgatcaatttcggttctccttcaaaactcggcaaaggattcccgtcacacatataagtatggataaaatgtccctctcccgcaaccggattctcatatgcaaatgtatatctgcagcagctttccggattcccgttattacttttcaaaatagacattgcatagttgtacgttccgttttctatatgcattactccggagatacgcggcgtataattcggaccgtcaggttcaaactcgcgggagcgaagtgactgctcgaatgtcatctgcttatccatcccttcatagatagtatctgtctgatctccgtttgtaacaatcgttttattaccgaggacacgcaccggcgcataaataataaggctcggatcttccagttttgccggatcaaacgcctgtgtacggattccttctccttcttccacaaacacacggtttctgctgttctcacttcttcccatgataaagtaagccgtcacagccttcgttccgtcctgtgttttcccgataacgatccctctccccggataagaattgttcttcagctcttcttcaatagacagcatcttcattacactgtatctcctttcatctctctgttcaaattttcgtcttcttgtaaaccttcccatcgtctgactcagacaggtttttatttcaagtctttcatccgcagacggacttgcgtgatacggttgtctttcacttcttcgattttaaatatcagaccatccgtttctatgatatcccgatcttcttttgcgggaatatgccccagtttttcaataagatatcccgacagtgtatcataattttccgtttcaagcttcagtccgagttcatcgttcaaatcatcaatgagaactcctccgtcaatcttgtattcatcttctctgacacactctatctcaggaactacttcctcatactcttcgttaatatcacccatgatctcttcaacgagattttcgatcgttacaattcccgaaaagccaccgtactcatcgaccaaaagcgccatatgatgccgtgtctcctgcataatccgaaacagttcatccgcttcctttgtttccggaataaagaacggttgacgaagcatctgcctgacatctcctttcttcaacggatgttttcgcatctcgatcatcatatcttttacatgaagcacaccgataatattatcaatgttttcttcatataccggaatccgattatgtcttgtctcaaggatctcatcgatcatctcctcaaacggatcgtcaatatcaaatgctatcacttctcgcctcggaaccatgatctctcttgcagtccttctgtcaaacttaaacaccgaatcgatcatctctttttcgtcatcgtcaaatgtaccgctttcatttcccatttttaaaagcgctttcacttcctcttccgtcaccgcttcttcctcatcttccgttttcatcccaagaagctttaacacaaacttcgtagacatggaaagaagtttgataaacggagacagtatgatcgatatatagtgtaccggcattaccgtaaacatacaaaacgcttccgctttctgcagcgcgatcctcttcggaacaagctcgccgaacacaaggttaaaaaacatcagcacaagcgtcaccccattgtaagcaatctgcgaactgtacggaacgcctgcagcctcaagtgactgcgccagaacaggcgaaatccccgacgctgccgatgccgacgaataaaatcccgcaaatgtgatcgcaacctgaatcgtcgaaagaaacttcgtcgaatcctcaaataaaccttcgatcacttttgcctttttatttccttcatccgccatacttcgaatccggttcttattcaccgatacgaccgccatctccgccccggcaaaaaaagcgttcagcaaagtgaaaaataacaacaacagcaagttaaacaaaatagaattccccgcagggtctgcgtccataaaaaatactcctcctgaaataaattattttcaggagaagtatatcatgcgcctatcattttagcaagttgacgcccggtatttttgcattcgcctttttacacacacgctttaacttcatattcgttgtccagagaaagccgcagtttatggaagcatatgacctgccgccatatagatcgcataccattcttcccgtgtaagagtgatctcgcatgccttacagatctccctaagcctctgcagattcattgtgccggaaagaacctgcatgtgcgcgggatgtcttaaaatccacgcggtggcgatcgttgtatcgctgaccccgtactttcctgcaatctcgcggattttttcgtttagaaccgcaaacttgtcgctgtttaaaaacactccttcgatcattccgtactgaaatggcgaccatgcctgaatcgtaatgtcatgcagccggcaataatctaatacgcttccatcccggtcaacgcttccaggcgtcgtcatatttacttccactccgctcgcgatcatggacgcatgagcagcgccaaactggagctgatccgccataagcggctcactcacatatctgcttagaagctccatctgcatcgtattctgattcgatacgccgaaatatctcactttccccgacgtatgcagctcctcaaaagccgccgctacctcttctggttccatgagcgcatccggtctgtgaagaagaagagaatccagataatctgttccgagtctttgcagagaatcttctgctgattttatgatgtgctctttagaaaaatcgtacatcacccccggcacaattccgcatttgctttgaatccacatatcttcacggcttattttcgcttcttccgccgcctctttaaaacgctcttcgcagactccccctccgtaaatatccgcatgatcaaaaaaatcgaccccctctgccattgccgcatcaaccagcttcgccgcttcttttacggtcagttctttcatgcgcatacatcccatgacaatagccggaacctgttttcccgtacttccgaaattcacttttttcatctgcatttccacctctttcttccttgctgttacttatattgtaaacgctgtaaacgatagtcgtttcccatgttggatatcataaccgatatccaagttcatatgctccacgcacagcttccagcgcctgcgccacttcttttgcatctccgatcacatatgtttcataagtgtctttgatttcttcatacaacggattccatgcctttgagccaaccgcgcatatcacatgtgtaaatcccggatatttcatctcacctttttttgtatctgcgataattgttcccgcatcaatcttttttactcttgcgcctgtaatcatctgtacattttcctgtctgagacgagccatagtcggcacaagattattcggaaccattccctgacctatgctgtctgtcatctcgataagagctgctcttgccgctcctctggaatgatgaagcacatattccgccgtttctattccaaccattcctcctccgataatcgctgcatttccgccgagaatcggaacttttccgctcaatacgtcatttgcctgaatcatagtttccttgccttctaccggaagtacgataggttctgctcctgttgcaagaattacgacatccggattctccgctttgatcacatctgcatttgcttctgtctcatagcgaatctccgcaccatatctgtcacattcctgcaaaagatatacgatccattttgaaatttcttgtttaaacggagcgcggcatgccagattcaactgaccgcctgcttttttctctttctcaaatacgactacatgatgtccgcgttttgcaagaatccttgctgctgcaagtcctccgattcctgctccgacgactaaaatattcttttcttctgctgtcggtttttcttcaaactccagttctcttcctgccagtggattgatcacgcaagatgccggacgtcttttcgtctgctcacctacacatccaactccgcagcctgcacaaggagcaatctcatcataacgtttttcttctgctttctccacaaaatccggatctgccaaaagagctcggccaagtacaactccatccacttcatttgcttcaagcacatcttccgctaactgtgcatccaggatttttccgaccgtgatcaccggttttgttgttatttctttaattgcccgagcttcttttaagttcgtaaattcttcttctccatgacacggaataatcttattacaacgctcatattgtgttccgccgctgatttcaaaacaatcaacgccatgtttttccaagtaagggatcaaacgtttcatatcttctaacgtatttccctgcggatctctttcacttccggacattcttaaaacgatcgggaaatcttctccgcaggtttctttgatcgcatccaatacttcaaacaacaaacgggcgcgattcagcaaacttccgccgtattcatctgtacgtttgttgcgtaaaggtgacaagaacgatccgagcagcatatatgcatgggcacaatgcagttcgattccgtcaaatccagcctctttcgcatttttagacgctttggcataaagagcgacaatacccggaagttcttcttttgccagctctcttgtcatctgccccatagagttcggatatgaactgctggctactggcgctactccgaaaaatgcactgatactttccggacccggatgcgtaatctgcggaatgatcttacagccataagaatgaactttgtctgtaaagcttttgtattttttgatactttcttcatcccgaaaacaaagtgtatttccaagatacggaacattcggatcaacacttgtagcgtctacgatgatacatcccacaccgccttgcgcacgcctgagccagtaagcttccattttctcattcacagtaccatcctgactttcatatcccagcgacatcggagccataaaagttctgtttttcacttccattcccgcaatcttaagcggggtaaacattgttctcatacgctttatcctcctatatttctacagtgttcttgccgcttcaaatccttccgcgatcgcatccagagcacgtcttgcggattttgcgtctccgatcacgcggcacggaatctgccttttttcacattcttccacaagtaaatgtgaatcatttgaagcaaatccaacagcaaataccgcgcaattacacggcacaagagtttcatcttccagcacaattccttcttccgtaaatttacacactttgctgtttggaagcattttcacctgcatctgctgcaatttcatcataacggcaatcttacgaaggctgcccagatcgcttccgatctcatctttcatttccaaaacagttacatcacatccgtctgtcgcaagagtatccgctgtttccagtcctaccagaccgcctccgataacagcgacttttcctttcggacacacttcatgcctgagaacttccggtgctgatgcatgctgcaacttatccataccttctaacttaatcgtaatcggagaagaaccgattgccaaaataacagcgtccacatctgcatccttcaacatttgtgcatctacttttgtattcttatatacctttacaagtttttctacctgttcggccatctcaaacgccgccgccttcatctcagccttgcccggcgcttctccggcaagaagaaattctcctcctaatgtgtcagaagcttcaaacagcgaaacttcatgtcctctttcgtgcaggatcttcgcagcctccattccggcaacacctccgccgacaacccatactttcttcggagtttccgttttacttaaatcgtactctgattcatgaccgatcatcggatttctcatacaagtaatatgaggacggtttgcaacatcggtaaagccatcatagcagccctgattacatcctacgcaatgtacaatatcgccgattctgccttcgtgcgccttattcgcgaattccggatctgcaagctgcgcccttcccataacaaccatatctactttgtcctgagatatgatctcttctgccagcgccgccgtattgatccttcctactccgacagtcaacatccctgtctcttttcggattctcgccgcattgtcaatattaaatccatttggcacatcaataggcggaacttcatacatagacgccgccgtaatgatatttcctctggatacatctagaacatcaacgccatgctcttttgcaatcttacaaaatcgaatcacatcttcaatcgtaagaccgttttccaacatgtcgtcctgagcgtcaattctgataaacaacggcatcccttccggcatatttttgcgaatttcatcaattacttccaacgggaatcgacatctgttctcaaaacttcctccatattcatcttccctgtgattgaagcccgcactcagaaatgaatgaggaaggtaattgtgcgccagatgaaattccaagcagtcatatccggcttctaccgctctggcagccgcttttccatagcatgcgattacttcctgaatctgttcttttgtaatggctttgatcatataagcgccaaaattcatatccgaaacaaccagcatctgcgccttcggatccatgcatgcggcaatagatccctgccaaagctgaattcctgctttcccgccgttttcatggattgcatctgtcagttttttatgtccttcaatcaagtaatcttcactgatagatacaaaatgcgccggcgcacttggcgtatgtacggcggctacttctacaatattcagtgcgcatccgccttttgctcttgcagcgtggtaagcaatcaatttatctgtcactgccccgttttccgccgccattctcgttcccatagccggcaaaataattctgtttttcagctccatatcacgaatcttaattggagcaaataaatgttcaaacatctttctgtcacctccggtattttgatttcattataaggcgaagtacagaaaatagatattcagatattttaaaattattatcaattatttacttttcatactacatctgaattgacttggcgtttgattcatatatttaaaaaaactgcgctgaaaagatgaaatacttccaaatccaacgtcactgctgatctgtgtaacagtccggtctgtagcaacaagataactgcaggaaatctgaattcttacttcctccaacaattccaaaacacttcgtccaaacacctcccgcgctcttctttcaagcaaatgcgcattctttttcaacactttctccatttctttcatctgaaacggatcatgaaaattaagtataagataaaccaaaatctgcagtgcctcttcctccgaatgcatttgcataccgtttcctacattttgtttctggtattctctgacgctcacgttcatataacgtttaaatactctgtaaaaatcttcgatattagtaaatccgagataatcactgatgtattggatattcaaatccggaaaatgcagaagggcacaggcattaaatatctttcccattttctgaagctgaaaaaaagtataaccacaccgccgcacaattttacgattcaatgttaccgttgtcatccctgccgctttggcatactcttccattggtactgttttgcttgtatccaacagcaccctttgaataacatcccatacacagtctttttcggaatcctcttttttctttctctccatagcgtatctgcagtacaatgcatgtaactgcatggcaaggtagatattcatattatacagcagaaatttttcttcctgctcttcagccaacaagtcgtctaaaacacgaagaaccctctgtttttcttgcgcattcaaaacaaataaagggggaacgccatacatcagcacctcattttcattttctttgtgctgttcaaaacacaaaaacataaacagaccgatatgaaaagaaacctttacgcagcgcaaaggttttctgatctgttcgattctataaaaatgatgcatgtaaaggcagcagaaaacgccctctttcatttgatatttatctccgttgatccaaatatcggcgtcaccgctcttaacataatatatctctgtcctttcatgaaatttttgttcgagcggctttttaatctcgatctcttctgcatgaatctgtttttcttttaaattatagtaatcacttcctgtaaaccaatccttctgataccacattttgatttcctcaccgtttcttttttcagatctggttttcttcgatcactcctgatcgcattttatattataatcctttagcgtcagatgatcccaaacggcaattacttcctcagcgcttccatcatgctttcctgatatgccgatcttcgtttcttatacatcgcttcccttatttcctgcagttcttgaacagacacctgctccagctttttcatccgcctgtcgcttagttctacttccgataaatatgtttcatacaaatccgcctcatacttccaaagtttcagccgctctccatatcggacctttaatttctgtgcgatcaaaagcccctccggatcaaaatcccccgcataccaaaaaacagtgtcgcacgaaaatttatccataagaataagtaccgccagacgtaattgcccattcccgcagatcacagtccgctgcggatactcccttatcaatacagaaaatactgccggattttccacaacgtatacctgactactctgtccacagaccttctctaatcttccaatcgtctgtaacgtcaattttacaggctctctattctcaagaaaaccttcaatgccttcatgtaaaccgccgtccggtttccatccgtgaatcccatatgccagcgcatcattcgatacttcatctttcaaaatccctgcctcataatagattctgtttttatactctgctctggaaagtccttcttgttttaaatcgaaattcctttctccaagataattaaagagtagtttttcccctgtcttcccttcatcaaaataatggggatttcctgtgacatttgccgaaaacacagctaacaattctttctgctttttatcttgaaacactttcaattttgcaatccctgtcgttacatacgttagaatgctcctcaattcctccgggctttctttgtataactgcgtaataagcaaatatccctctttcttttcctccaatatgctgcgcagccattctcgtccgctttcatccgaaatactttccagtatctccgcaaaataatcttctcgccttttcgactctgccagttcgatttccttttttacctgcagcggctctccaaaataagtttccagaatcaattcccaggttaatcccgcaaatttactggattccaaacattttttcattaaatccgcagaaattgttattgtcttattacttgtataatccctttgaaaaaatcctcctaattgacttttctcttctctgctcagcgacgtaagcatcgccgttcccccaaagtggccaagaccgacatatttatcccgcattttcagaaatagttttttatataccggacgcgccttgaaatacagcatgcattcttctaacagatcgtttgtttctgttttatccatgactcaagtccttttctgttaccatactttttatatttccattccagacataccgaataaccgtaacatatttcgcattctccgggcggacaagctgatagattgccaaagccggaaccgtatcataatctccccagagaatctgtgagttgatcataaaattaaagtcaaacttcaccatcagccggaacatgtcccgaatattcatttcatctactcccgcgaatgcctcgtccaaggaaatcaaatacggagcatcctgtcttgcccctgcatattttgctactactgccgaaaatagcggcacgtacatcgacatcgccttttctccgccgctaaaagtaaagaatacgcggtctgtcagttcccttttcttctctcctgttttttgacattccaattgaaactcaaaccattgacgataatccagcacatttctcataatcgcatgaaaagactgcacatttcccagatcatttgcagattttcttgcctcttcgatcttagatcgaaaatgtccggataactgctgcgcctcttccggacgcataatttcggcatctttttgcagaagttctacaagttccctcgtatccagctgttcttctttctccgcccgcttatttttccaacgcagactcagcgtaagtccgctggaagtcttcatagactccatcaatgtgttcattttctcaacccatcgcttactggcctgaatttttccgcgaattttcttactgatcgtattggcaagaatatcttcaaataactctctgtccttatcactcaaaagccgacgctgtacctctgcatcttctttcattctggcaatcagttctttaaacttgatcgtgattcctctatacttagcagaaatatcgattcgtctcatacttgtgtcgaaaactccgctctcctcatccagttcttcaaataatgactgcagcgtaacctgatattccaacagatatcccctattcatatgatatacattttgcagattctccaaaatctcactgtgccttttatttccgaatctccccataaacatcctgcatatcttctccgcccgttcttccgcatcgtcgcttaccgcaaacggacactctacatatccaagctgatattccatttcaaaagcagtgcaaaatctgtctttctgctgtctgtactttccaactgaaacttctatatctcccagtttttctataaattgtttttcttttgtttccaaatgagagctttgtgtaacactcgcctcaatctctgacggcagtttctccaatcgctctatgcaatgttccaatcgctccctgatttcctcataatccgtcaaagcaagctgttccatcactgaattcagacttccccgcttttcccgttcatttcgtatcatatgattcaaatcgtagcggatatcatccaaatcggcgtcaattccttccaaatattccttctgcacctttgcagaactaattccattcctataatttccataggaaatctgtactttcatcaactcttctttatactcggtcaaggattcttctgcttccgtaaacacatccagacgcgggggcagataacacttctgacatacttcctgcacccgcagccgaactgcatccagactttttcgttctttttctacaatacctttctggatctgtactttacactctatttcttccagaatattcgttttcttttctaattcttttgctgccactttcagatcctgttctttcggaaatgatttccactctgtttccagacagcttttcctttgctttaattgtgtaatttcgtcttccgctatttgaatggtatcttccagcctccgacactctgcttctagttcctgtatcttctttatgcgatactgctctcttgcataagctcctataaaacatggcgtataatttttcgtaaccgttccttctatgattccgattccataatttcctcttttatcgatccatgtcctgtttttttctatagactcacttatcgtctcttcgtcctgttccttccagccgattgctgttaatatacgggaaacattctggtacagaagaatatctccctcttcgttgtctacatccagaaaatccataatgttatttcttacatatgcggcatcactgaaaatataacggtcacatacccccgcatccaacgccagcgcctgttctctatattcttcaggcacaatcagcgcatccagtatgcccatatgcaatagcgcttcttccagatatgcccgctgtgtttcatccaattttccgtcaaaatcaattactttatataactgcaaatatggaattcctttttctttcaaaagccgtcgattcttttccactgcttcactgcgttccggctccggctccttttgattcttccactgttccagttcttcgcaaattccgtctttctccaatcgtctgtcggacaattctctgctctgctgtaatacttttcccgaaagttcctgacttttccgctcaaattcaccatttgccaatccgcggatattccaataatcggtttccgttgtatacttctcaatttcccttgccatttcctgcaatagatctgactgcagatgcagctccgcattctccttttcccaacgatataccgattctattgtctcctgttttacttcatgaaactgattttcatattgaaggacttctcgttccgctttgttcttttcttcctgataggaatccaattcctgcaaaaatctactgtatctttcctgacaacccttttcttcttccagcgtcgtttttccaagacggacctttgtcatataatcctttaataattctgaatgagcctgaaaagaatactgctctcctttctgctctgtcagctctttcttcataaatgcaaattcatcgaaaggaacccccgccatctcttcttccatatactccagactgttttcaatttcttcccaaagcatttcatttttctgaaattgaagttgtattttctgctctgtttcctgatatttttcttttttctcctcttcctgcctctgttttcctgtaatattcttttttaatccttctagttgacttttaatttcaacttccctctgctttaatttgaccgtatcgctgtcagacaatgattccttttccgcctgatcttccggcgtcgtatatcccataatatcctgtgtgaaatttttcataaaatatctggagacacctgtattttcatagagtacttcactcgtatcatccctcgcaaaattctcttcacttccatcattcaaattcaggattccacagttcacacaatacttgatcaccttgatcaaatgtcttcgatactgatatactgtccagtcaatctgctcctccctgtactgcccctgtatatattctgtcagctctgaaagtacaaattgctcttcggcttctttttcttccagaaacattaaaatcatacagaaaaaaacatattctattttccgggtaaattcttgaattcccatccagttctccggtgtcgccggcatcttttccacttttacaagataaggattcacgattacctgataccccagcttttccatcaagaatttcttaaccgttcctaattcatcctttatctgataatataattctttttcccgactcttcaaaatccaacgccgttccagcagaatttccaatgctctcatgacttctttttaaattcccttcactcatttttctcgaatacaatcacatatgccggcatttgcagattaccgtccgatgatttcaaaatgcagatttcctctgtatccgacttttccacacgataaacctgcccatcctctgttttcccctgaagacttttattctccaatgctttggaaagccatgtcagaaatacatctcttacatgcggctctatctcgggaagctttgcaaactccagacgattatcctgaatataacttttcaagagcctgcgttcttcctctaatcgctgaatcgtagcaagccacatttcttctttttctttcgagcgatcaacaatcccgcttcgttttgctttttctttatatgtacgaatcctcggcgtcacagtcacgatatacggttcttcctcgaacacgccgcttttgatactctcggtctgacgccacggaagcccttttaaatgcagcggcttttcaatgccaaatacaacagcggccaatctgtgcgcctcaaaaatattcttacattttgaaaacatcaccgcaaccttatgatactcttcccgccgattcgcccccgcattgctcatttcactgattcttgccgcataccttgtaatctttcgtatgatctcattcgttgtgtcaaatacctttgccgcctcagaatcctttccgtctgttccggtaaaccattcctccagactctgccaacggccatatactttatctgcaatcaaatcttccttcacttccacatcgattctcggaatcaacaattcatactgtataattttttccagcaaacacctcaaaacctgcctgtccgtattcttcagacattgttctataaatgcggcattgacctgcagactcctcacgaaacttctcaaatactcgatcaaacggtctttgaacacaagaaactctgtcgttttcatcatttcttccgcttttacactgttcaactcccgcatataatcctgataattctgattcaatcgtataaaatcattattcaaatcattccaccatgcatagatatgctcctgatctgcttctgtaatctcagaaatcttgcgcagattgatgcgaagtctctccaataatgtaggttccaacgaagaactttcaataaacagattctctacccggataaccattcgctcaatttctaccgtagcttcagacaactgataccggaactttttattcttaaactcctcgatagtcgcaacctttctcgtatcctgaattgttaccagattcccccatgcagtcaaagccgccaagtcctgctgacactgctcaggcgtatattctctaaagtatgcatcttcctttaattcttcatatacctcttcctgatacagccaatacttcagcttttcatatttcaaataaaaaagccggatgatcggacgatacctgtctgtattatccacattcagatattttgcttccgtcatcggcttcctcaccgtctcctgtattctcataacttgtcgtgctcctttgaaatatgatgattcactgcgccttagttatcagcgtgctaccatatatgtattatatcaaagacgagaataaaatcgaagattttatttataattttccttaataataactcatttttaaaaactccccagaaccggagtcctgaggagttgtaaattcttttgaaattgtacgttccaaaaacgtatgattaacgtttaggtaactgggaacacttgattttactgggttcttggaatgtggtgtttcaaacacgttacaaacgcagggcttctcattactcctcagagcacctcatagacttcaattaagaaatctgacagcaagttcctgaatagcaagtattggaccttgtgcatatgtttcttggagatacattctttccagacgttctgtttctttcgtcaaaaaagaaagcatttctacatctcctcgaaatccaattactaagcacaacatagatttgaaatattcattccaaatattagagtattctttcataagccaattgcaacagttttcttcacagtacaagaaaaaataaagcgtattttctctaaagatatcctgcccgtttttcatagttttttcttttatccatggcatcagcactatttcgtattccagtaattttcctcttaatctgcttcagttccctcctgataaaggctttcgctgaaatcgcattggcatattcaacagcttcagactcaagatatgaactatattcaaattcagctgccgagaaaggtatatctgggtgtttatctaaaaatttatgtacttcttttttactaatggttgccataatgtttcacaacctcctccagcaatggcaaatcacaacatctttcctttattctcttgtcattgccattcaattcttcatctcgtattataaagtagtagtatttatagaccctctcc

SEQ ID NO: 7616 - DNA, 59839 bp, Unknown
  gut microbiota DNA sequence
ggatgagtatttaggacgggaagatacatgggaaaaggaatatacggactggcttgaaaacggagaagtcgatcttgaaagaggagaggaatacgcttccaatattttcaacgcagtgttcggcgatcacacaccttacttctttaacggaaacctgaaaaaccatggttatattacaaatgtgaaacaaggcgtatgtgtggaagttccgacagtcgcaacagaagcgggaatcgttccgatcaaacagatcacgcttccggatcatctggcagtgcttgtaaataattcggcgctgatcgaagaccttgccgtgaaagctgccattgaaggcgatccgaaccttgtattccaggctgttttgtatgatccgcttacaagcgcggtctgcagcatggatgaaatcctgaacatggttcaggagatgcttgataaaaatgcagagtatttgagttactttaagtcgttaaagataaatatggaggtgcttcatgaaaaagagaatcgttagtttaatattatgtgggctcatggtattttcagcggcaggatgttcaggcggcggagaaaataaagcaggaaaagacgacgttacactgacaatgtggacacatatcaatgagccgtggaatgcggcatataaagatgcgatcaaagagtttgaatcggaaaatgaaggcgttcggattaaacttgagacgttcccatatgatgagtttgaatcaaaagtacagaccgctttgatcgatggtgaaggcggagcggatatttatgaattgtggggaggctgggcattagattttactccttacggaacattgatggaactgccggaggaaatggcagaaaaagtgagagaagaaaattacgagccgacatacggagcacttgagtatgaggataaaatgtatggtatcccgctggaatataatatcgagtacggcggaatgcttgtgaacgatacattgctcaaggcgaaggggcttactgttccgaaaacatgggaagaacttcgtaaaacggcaatcgaaggaacagagcacgacggcaatattttccagtgcaaaggttttgattttgtgaactgggattctgtgccatattatttccttgcctttatccttcagcaggatgcggattacatgacggcggacggaaaattcgacgtgacgacagatgcggctaagacagcgtttaatgaacttgcgacaatggtaacagaagataaagttacagatcttgaaggactgacaggcggagcggatatggaaggttatcagcagttatatgccggacgcaacatgatcgtaccgcgcggaccgtggacgatctccgaaggagaacagtcattcggattaaaactcggcacagattttgattatgcagctatgccgcagtatggaaacaatcagaaatttgcttcggaaaacggatggtcgctggcggtaagttccagttgtaaagaacaggaaatcgctttgaaattccttgaatatctgtatcaggatgatgttatgttagagcataacatacgctgcacacagattccggcaaagaaaagtctggctcagagcgaagagtacaaaaaagaagttccgtacgcggacgttcttgtaggaattctcgatcagggacagtttatcggaaactttaacacggatcgtctgaaagaaacaatcaacaatacgtttgtttcctattgttccggggaatacggatcgttggacgaggcgatggaagatatgaatacgaaactgaatggaatactggaataaaataaaaagactgccgtaaaacggcagtctgactcacaagggggtgcgtcatgaaaaataaaaaatttgtagggacggtcatggtaccggctatgctgcatatgtttgtatttatcgttatcccgatcgtgataggtcttgtgatttctttctttaactataatccactcagttcagacaataaatttataggactggaaaactttgtaaggcttgttcaagacgcggattttcgtaaggcgcttttaaatacgctgttattcgtgctcatcacggttactttgaatatcggcatcgcgctcgttgtggcgcagatgatctcatggtttaaatcaaataaggtgagaagttttttccgtatggtatttttcctgccgtgtattgcgcctatggttgcaacatccgttgtatttgcccgttctatcttcccgacgacaacaggatttctgaacgtggctctgaacaagatcgggatcgactcgatcaactggctcggagatccgaaagtagtgatgatctcacttattatttatacgatctgggtagacgtcggttataacgtgatcctgttttcggcaggtattgacggaattccttcttatgtgtatgaggcggcagatctggacggagcgagcgaatgggtaaaattccgcaagattacatggcctttgctcggaagaagctttcagtttgtcattgtacagacgttgatctcacattttcagatgtttgcgcagtttgcagtgctcattttgaaagacggccctcagaattcaggacttgttctttcaagatatatatacaagatggcgtttgagtataaagacatgggatatgcatcggctgtgtcgcttgttctctttgtcattattatgacactgtcattgatcgagcagaagaagagcgcggtagactgggagtattaggaggcatattatgaaaatgttaaaagacaaaaagaacagaaaactaaggattatttcattcgtgattttgtttttggcagcgatcgtgtttcttgcgccgtatttttggatgctttccaattcctttaaatctacgaaagagattttgctggagcctacgaatatgctgccgaagcagtttacgcttgacggatatgtgaaagtgattacagattcgccgtttttcagatggatgggaaattcgctttttgtaacggttattgatacgcttgtcgttttgtttacgagctctttgatcggatttgtgctgtcgaaatataaattcaaactgaacaaatttttgttttatgtaatattgatcacaatgatgatgccgacggcggcaatgatgatcccgaactttttgcttatatcaaaactgggatggtatgataagatcatttctcttgttgtgcctacgtttgtaaatgcatttggaattttcctgtgcaaacagtttatcgacgatatgccgaaggaacttttcgagtgtgcgatgcttgataatgcggggccgtttacgatctatcgaaagatcgtgcttccgggaatccgcccggcgctcggaagtctgacgatctttacctttttaggattgtggaatgattaccagacgccgttgatctatttgaacagctcggaaaatatgactctgcctcttgcaatgtcgtatttttcaactcagcatttatcggatctttcggcgacgatggctgccgcttcccttattatgattcctgcgtcgatcgtatttattatattccagaagcagttcatcaaaggaattacgatgaccggaatgaaataacgaaaaatgtggaaaagaaaaagttaaaaaagcaagaagtataaagataaaatgtaaatgctaagaacataaaaagaggaaaacataaaaaagagaatcagaaggggtgattctgtatggaattggaaaaatttgatcctgtctgcgccgcagtgctgaaaaaaacagaaattgaaaaaccggcatatccggtgatagatttccatatgcatatgggaaaaatgctgttgggcgaatcgtatgaaacaaagtatgacacgaaggaatatgtccgggaactgcaagatgccggcgttgtatgcgctgtgaatatggatggatatttcggaaaagatctggaaaagatgcaaaagaaacaagaaggattcgaggaaatgttttttaattttatgcagcttgatttttctgcgtatgatgatcctgatttttgcgataaaacgaaaaaggtaatagaagattcctgtatgcgcggatgccgggggatcaaattatggaaagatctttcgctgtgggagcgggataaatacggcaggccgatccgtacagatgatcctcgttttgatatcatctatgatacggcggcgaaactgcacattccggtgctgatgcatgtagctgatccggcggcgttttttactccgaaaagtgaaaaaaatgaacgatgggaagagcttgatgtctgtccggaatgggatttttcagatcatgaaaagtatatgagttttgaagaacttatggaaatgcaagagaatacggtacgcagtcatccggaaacgacgtttgtgatcgctcatgtcggaagttacgcggagaatctggaatgggtaagcgggcagctggaaaaatatccgaatatgtatatagatgttgcggcccggctggcggagctgggaagagttccgtacagtgcgaagaagttttttgtgaagcatcaggatcggatcttgttcggtacggattgtacgccgcttggtatgggatatcataagatttattatcgtttcttcgagacaaaagacgagtattttccgtatcagcccgaaggagaacttccgggacagggaagatgggcaatctacggaatcggactggaagatgagatcttgaaaaagatatattataaaaatgcatgtaaagttctttctcttgatgaaaaccgctttgtaggaggtgtgagatgagacggtatttaagcgttgattgtggcggaacaaagacggcgtttcttttgtgccgtgaaacgggagagctggaagctgcgtgtacgttaggccccggcaactatatggtgaacggaatcgatcatgtgctgtcagtattaaaagacggtattttgcagatctgctgtcaggcggcaatcgcgcaaagtgagatcactcacagttttatagctatcgcagggtttaaagatataccggcggatgtgccggtgcttacccgccttgtacgggaaacgtttccgaggatgtcgatcactctcgggaacgatacggaaaatgcactggcaggatctcttctcggaaaacagggaatccatgtgatcgccggaacgggatcgatcgggcttggatttgacaaggacagttactatgtgcgaagcggcggatggcatcatcttttcggaggggatgaaggaagcggttattggatcggatgtcagttgatccggcattttacaatgcaggcggacggaagagaagaaaaaacgatgatgtttgattatattttggaaaaatacggtcttgcgtgtcctgaagagatattaaggctcgttattaatgagtggaagggagaacgggataagatcgcatctatgtcaaaagatgcatatgaacttgcggaacagggcgattctgcggcggcaggcatttttaaaagcgcggcgcgcgaacttgcgaagatcgtaaaaggcgtgtacagaaacgggaattttgatataccggtttatgtgtcttattccggaggtgtgttcaaagcgatgaagtatataaaagaaacgctggaagaagagctgcgggacgtatcgtgcgttttcacagagccgtgtctgctcccgtcggcaggcgggattatactggcgtgcagagctgcgggaaacgaagtgagtgaacagatgatagaaaatctgcgtacggcacagcatatgcgggtataaaattgatatgaaaaaatgaaagaaaagtataaaaaatatattggaaataaagccttttatatgatggtcatggcgatcgccgttccgatcatgatccagaacggacttacaaattttgtgaaccttttggacaatattatggttggaagactgggaacagaagagatgtcgggtgtttcgatcgtcaatcagatcatatttgtgtataatttatgtattttcggcggaacagcaggtgtgggaatctttaccgcccaatatttcggacaaaaaaatgatgaagggatacgcagtacattccgatataagatttggttggcgctgataattactgtcggcgccgcttttcttcttctgtttttcggaaagcagctgattcttttgtatctgatgggagaaaacggaggaaatgaaaagctggcgctggaatatgggatgacgtatcttcggattatcttattggatcttccggcgtttatgatcctgcaggtttatgccagtacgatgcgtgagtgcggggaaacagtagtgccgatgaaggcgggagctgcggctgtggcggtcaatcttattttcaattatctgctgatatacggaaagttcggattcccccggctgggggtggcgggagcggctgtggcaacggtgctttcgcgttatacggaaacggcgatcgtcgtaatatgggcgcatacccatgagaaagaaaatacatatatgacaggactttataaaacgttgtccgtgccccgggatcatgtaaaaaaatattttataaagggaacgccgcttttgctgaacgaagcgttatggtctttcggtatggcggttttggcacaaaactattctgtgcgcgggctgacggtgatcgcggcgatgaacatagcgaatacgatcaataacttattcagcgttgtgtttgcggcgatgggagaatccgtggcgatcatagtcgggcaggcgcttggcttcggagatatgaaaagagcgagagagatcgacaataagatgattgtatcctgcgttcttatcagtttcgcagtatcggtttttatgtttcttttcgcgccgtttttcccccggatttataatacgacggaagctgtgcgaaaggcggctatgggacttgttttggcacaggcggtgtttattccccagaatgcatttctcaacgccgcttattttacccttcgggcaggcgggaaaacaggtgtcacttttttctttgactgtgtattcttatggtgcgtcaacattccgatcgtttttgttttatgccgatataccggacttgccccgtgggcggtctacagtgcgatgcagatcggggaatggctgaagtgtattgcgggcgcggtaatggtgaaaaagggagtgtggcttgagaacctgaccggtaaaggggaagatgaaaaatatcttctgcgggaaaatgaagaaaagcattgacatttccgagtgtacattgtaaagtcttgtttgtaacaaaacagtttaataaaaatactttctcttattcagagcagtggagatacaaaggatctgagaagctgcggcaacccctgaacaggaaggtgccaacctgagcgagtcatcgaacaataagaggattgttgtgatagagagacagtccgcttttacgggctgtttttatttgcggcggcgagtcaaagtccgggtcatccggggatcttgacgactgcttatgatccgaagcagtctgccgcaggcagatatctttcttgatcgtaaagaaatagagaaagtgaacgaaaggagaatggttatggagagagaaaagattttatttacttccgagtcggttacggaaggacatccggacaagatgtgcgatcagatttcggacgctattttggatgaacttatgaagcaggatccgatgagccgtgtcgcatgtgagacatgctgtacgacaggcgtcgttatggtgatgggagagatcacgacgaaagcttatgtagatattccgaagatcgtacgtgacacggttcgtgaaatcggctatacaagaggaaaatacggatttgacgccgatacatgcggcgtgatcacaacgattgacgaacagtcgtccgatattgcgatgggagtggataaagcgctcgaagcaaaagaaaataaaatgtcagaagacgatattgaagccatcggagcaggagatcagggaatgatgttcggttatgcgtctgatgaaacagaagaatatatgccgtatccggcggcgatggcgcataagcttgcgcgccgtctgacagaagtaagaaagaacggaacactgccgtatcttcgcccggacgggaaaacacaggtaactgtggaatatgatgaaaacggcgttccaaagcgtttggatgcggttgtgctttctacacagcacgatcctgaagtgacgcaggagcggattcatgaagatattaagaaatatgtattcgatgaagtgattccggcaaatatgacagatgatgaaacaaagtttttcattaatccgacaggacgttttgtgatcggaggacctcatggagacagcggtttgacaggacgtaaaatcattgttgatacttacggaggaatggcgcgtcacggcggcggagctttctcgggaaaagattgtacaaaagtggatcgttccgcggcatatgcggcgcgttatgcggcgaaaaatattgttgcggcaggtcttgcgagacgatgcgagatccagctttcttatgccatcggcgtagcgcagccgacgtcggtatccgtagatacgttcggcacagggaaggtttcggatacaaagcttgtggagatcatccgtgagaactttgatttccgtccggcgggaattattaaaatgctggatctgcgcagaccgatctataagcagaccgctgcgtacggacattttggaagacttgacgttgaactgccgtgggaaaaactggacaaagcagacgatctgaaaaaatatcttgaatcataaaacagatttaccggcgggaaagaccggtatagaaaaaggatagaaaactaagatgacgattcggccgtcttttcgatacagggtaacggatatccatatcgaagaggcggctgatttgtttataaaaagtttcgttgaagaaggggaggggtaacggtataatatataatatcatgcaaaagtgagaatctgttttaggaggagcgcctatgaagcttaggacaaaattgatcgtggcatttatgtctgttatgattttgccgatgatctttttgaatgtagtgatgcatacgttcgcgtcgcgggaagtaggagaacttcagcagctttatatgattgtcgtattcatcacaacgacgctgctgatttattggatctaccgttcggtttctgttccgctggcgaaactgcagaaggcggcaagaaatatcaaggaagggaatcttgattttgagatcaggcaggagtcggatgatgagatcggacaactctgtcaggattttgaggagatgaggcttaggctgaaggcgaacgcggaagagaaggttgcattcgaccgggagaacaaggagctgatcagtaatatttcccacgatctgaaaacaccgatcacggcgatcaaaggatatgtggaaggaatcatggacggggttgcggatacccccgaaaggatggacagatacattaagacaatatataataaagcaaatgagatggatcttttaatcaacgaactgacgctttattccaagatcgacacgaatcgtattccgtataattttacgacgatatcggcgaaagggtattttggagactgcggggaagatctgcatatggagcttgagtcgaaaggaatcgaatttacttattgcaatacgatggaagaagactgcaaggtgatcgttgatcccgagcagcttagaagggtgatcaataatatcgtatcgaattcgttgaaatatatggacaagccgaacggaaaagtcacgatggaagtaaaagatgtcggcgattttatacaggttgaattaggcgacaacggcaaagggatcgccgcaaaagacctgccgtacattttcgatcgcttttacaggacggatgcttcccgcaattcatcgaaaggcggaagcggaatcggtttgtcgatcgtgaagaagatcgtggaagaacatggaggaaatatatgggcgaccagtgaagagggcgccggaacaacaatgtattttgtaatcagaaaatatcaggaggtatctattgatgagtaagcgtattttgatcgtagaggatgaagagagtattgcggatcttgagaaagattatcttgaactgagcaactttgaggtggaagtggcgaatgacggagatacaggtctgcaaaaaggactgggcggagattttgacctgattattcttgatctgatgctcccgggagttgacggttttgaaatatgccgtcagatcagagatcagaagaatacgccgattattatggtttctgccaaaaaagacgatattgataaaatcagaggtctgggccttggagcggatgattatatgacgaagccgtttagcccgagtgagcttgtggcccgcgtgaaagcgcatcttgccagatatgaacggctgatcaacagcaatgcggaggaaaatgaagtgatcgagatccgcggattgaagatcgatacgacggcgagacgcgtatgggtcggaggagaagagcggtcatttacgacgaaagagttcgatcttcttacatttttggcgagtcatccgaatcatgtgtatacgaaagaagagctgtttcgcgagatctgggatatggagtcgataggagatatcgcgactgtgacagtgcatattaagaagattcgggagaaaatcgaatatgacacgtctcatccacagtatatcgagacgatatggggagtgggatatcgctttaaagtgtaatggcatgacgaaaacacagtttgattttatatttgtcatgagagaaaaggggtttcgtttttcggaactccttttctattgtaaatgagaataaatgcgtgtatcatatagaagtcaaaagggaagcggcataatatggaatatatatgccgtgtatggggaaaacagattaagatcatagggtggtttttagaaatggaaaagaaaaaaaagagtccgaggagactgaagttcaatacggtgcagacggttgttatcggatttttcggggtgatactcgggggcggaatacttttgagccttccgatctgtaatcagaagccgatcgagtttatagacgcgctttttacgtctgtcagcagcgtatgcgttaccggccttgtgacgattgttccggcggaacagtttacattgctagggaaaattattttactgcttttgatacaggtcggcggacttggagtgatcgcctgcatgtctgcgtttttccttttattgggaaaaaagatcaatatgaaaggaagaatcacgatccaacaggcatatggactggatacgctttcaggtcttgtaaagttcgtgatccgtattttaaaaggaacgtttttggtagaggggatcggcgcggtacttttttcgctccggtttattcctgagtttgggtttataaaaggcgtcggttacgcaatctttcattctgtttcggcattttgcaacgcgggtatcgatatacttggaagtacgagctttatacagtattcagggtcgtggcttattaattttacgacaatgtttctgatcgttatgggcggacttggttttccggtatggcatgacattgcgatcaatataaaaaagatgacggaaatcaagaaaagacctttaaaatggctgtttacaagactttgtctgcaaagtaagatcgttcttacgatgacgggacttctaatcctgtgcggcgccgtcggatttttcctgctggagtttaacaaccccgaaacaatgggagatatgaatcttcttgagaagatgacggcatctttatttcagtcggtgacgacaagaacggcgggatttgcgacagttccgcaaggagacttaagagaaagttcgaagcttttgggctgtatgcttatgttcatcggaggatctccggcgggtacggcaggcggcgttaagacaacgacgatcgcgatgcttttgctgacggttctctgtgtactgaaaaacaaaagagatacagagtgttttgcaagaaagattgataataatatcgtcagatcgggaattacgatcacaatgatcactttgatcttcctgatgtcgggaattaccgcactgacaatctttgaacccggaattgatttccttgatcttacttatgaagcggcgtccgcaatgggaacggtcggactgacggcagaccttactccgatcctgagcaggggaagtcatgtgatccttatgatccttatgtatgtcggaaggataggaccgcttactatggcgcttgcattatcgggaagaagcgataagatttctaagttcagagaacttccggaagaaaatgtgatgctcggctaagtgggagagacaacgtaatgcttggataattgggaaagaaaatgcaatgcagagcatgaagatgagaatatggacagagaaataaaaaagtagaaatacaaaaccggaaatgtaaagacagaagcatttaaaaggagggaacatattatggataaacaatttgcggtgttgggacttggaagtttcgggtcaagcgttgcgcttacattggaaaatatgggatgcgatgtgctcgtcgtagacgagtcttacgagaaagtacaggaaatatccgacaaagtttcttacgcggtcaaagcggacgtgtcagagcctgacgcgctgcaggctctcggaggacgtaatcttgacggagtggtagttgccatttcggaaagtttagaggcaagtattatggcgacgatgctttgcaaagaaatgggaattcctctcgtcgttgcaaaggcgaaagacaaacttcagggcgcgatcctgcaaagagtcggagcggatcgtatcgtgtatcctgagatcgagatgggaagccgcgtggcaaaaagcctcgtgtcgaaagaatttgtggactggatctctctttcaaatgattacagtatggtagagatcgtcgtgccgcaaaactgggtaggaaagagtcttgtcgatctcggagtcagagagcgtctgggaatcaatgtcgtcggtattatcaagaacggaaagatcgaagtcgcgatcaatccgcaggagccgcttcgggaaaaagaaatattgatcgtgatcggttctaacgatattcttgagaaatttgacatgaaaaacagatagaaaatgcaggtgagaaaatgattacaagtacatcgaatatacaagtaaaagaattgcttcgtttgcagaaaaaaagccgtgagcgggagaaagagggcgtatttatcgtagaaggaccgcgcatggcggaagagatcccacgggagcgcattgtaaaactgtatgtgtcggaaagttttcaggcgaaatgcgtcaaagaaaaaaacgatcggtttattcaagaggcggaagtgatgtcggatacggtatttgcgcatgtgtcggacacgaagactccgcagggaatccttgccgtcgtacgccggatggagtatacggcggaagatattttaggggagactccgcatgtgctcgttcttgaaaatattcaggatccgggcaatctcggaacgattttcaggactgcagaggcggcgggggctacaggcattgttttgagcaaagactgtgtagatctgtataatccgaaagtgatccgttctacgatgggagcgatttttcggattccgtttatttatacggatgatctgaaaggaacgatcgacgaactgaaacgggaaggaatcacggtttatgcggcgcatcttaaaggggaaaactcctatgatatggaagattacaagacggcatgcgcatttcttatcggaaatgaaggaaacggtctgacagaagaaactgcggcatgtgcggatcggaaaatactgatcccgatggaaggcggcgcagagtcgctgaatgcagcggtggcttcggcagtacttatgtttgaagcgggcagacaaaggcggaacaagagaaaataaggcggcgcgagtctgtaaatgatgatcaaagtaaatgaaaacaaatgtgaataattgaaagtaaataaatacagataaaaaataaatgaaaagagaggataagacaatggatttaaaaggaagacattttttgacactgaaagattttacaccggaagagatcatttatcttttggaccttgccgcagaattaaaagaaaagaagaaaaaagggatacttgtcgatcatcacagagggaaaaatgtggcgctgatctttgaaaaagacagtacgcgtacacgcagttcttttgagatagcggcacatgatctcggaatggggacgacttatatcggaacgatgggatctcagttcgggaagaaagagagcatcaaagatacggcaagagtacttggaagaatgtatgaaggaatcgagtacagaggattcggacaggagattgtcgaagagctggctcagtatgcgggagtacctgtatggaacggattgacaaacgagtatcatccgacacagatgctggcagatatgctgacgatccgtgaacatttcgggaaactgaaaggtctgaaacttgtatatatgggagatgcccgttataatatgggcaattcgctcatgatcgcctgtgcaaaactcggacttgattttgtggcgtgtacgacagaagactatttcccgaatgaggagcttgtagaggagtgccgcgtatatgcaaaagaatcaggttctgaaattacattgacaagcgatgtgaaagaaggaacaaaaggcgctgacgtcatctatacagacgtatgggtatctatgggagaacctgacgaagtgtgggagaaacggatcagagagctgactccgtacaaagtaacaaaagaagtgatggaaaatgcaaaaccggaagcaatctttcttcactgccttccggcgtttcatgatcttggaacgaaagtcggaagagagatcggcgagcgtttcggaatcacagatatggaagtgacggacgaggtatttgagtctgaacagtcgaaagtgttcgatgaggcggaaaaccggatgcatacgattaaagcggttatggatgctacattgaagtaaaaaataagtagaaaagaagataaaaacagagaagatacaaaggcaaaaagcaagaaagataaagacaacgaaaagctgagaacgtaaaaaagataaaaagtcgagagaataaaaagacgaaaacttgagaaggcaaaaagccaagaaagtaaaatcagagaaggcgaaaagcagataaaattatgaaagcagagattttgaaaatgctgcgggaagcagacgggtacatttcggggcaggaaatctgtgagaagttcaatgtgtcgcgcactgcggtctggaaggtgatccgccggcttcaggaagacggctacgaggtggaagctgtgcgaaacaaagggtatcgcatggtggaaagtcccgacattttgacaaaagaagaagtggaaagctgtatgcatacggaatgggtgggaagaaatgtcgtatgttataaagtgacggattcaacgaatctgcgcatcaagcagatgggagatgaaggcgctttagccggaacgctggctgtggcggaagagcagacggcgggaagagggcgcagaggacgttcgtgggaatcacctgccggagcggggatctttatgtcggttcttttaagaccgaagatcacgccggataaagcgtctatgctgacgatcgtgacggcgtgcagtacggcgaaaggaataaaaaaatattttgaaaatgagggagcttcctgtccggatattcagattaagtggccgaacgatctcgttgtcaacgggaaaaaactggcaggtattctcacggagatgagtacgcagatcgattatatcaattatgtgaccgtcgggatcggaattaatgcaaacacaaaaaagttcccggaagaattaaaagatcatgcaacatcgctgtatcttgaatgcggacatatggtgaaacgagcgtctgtcattgcgtcgatcatgaaatgttttgaggaagattaccgcctgtttcttgagacggaagatttatccggactgatggaaacgtatatgtcgatgcttgtcaaccgggatcgggatgttcttgtgcttgatccaagcggaacatataaggcaaaggcgctggggatcgataaaaacggagagttgatcgtgagaagggaagacggaacttcggaacatgtctatgccggagaagtctcggtcagaggtgtgtacggttatgtataaatgcatgtgcgggataagaaatgcatgcataggataagctgagagatatggatgagtatagacgaactaaatgcagattttaagttcggaaaaaaacaggaaaaagagaggtaatgtatggaagaagaggttgtgctttgtgcggcaagcgcatatgaacagaaattttatttgaatcctcagtttgagtcgctgccggaagcagtgcgtcaggaactgcagatcatgtgcgtattgtatacggaagatgtgggaggcattctccttgtcgtatatgatgaagaaggaaatctcgagttaaaagtagagcacgaagaaaatgattttgcttttgatgagataggaagtgtgctgaagatcaaacagcttcagcagacgaaaagagaattgtttgaatcgcttgaaacattttacagggtgttttatctcggagaggagtagggtgtggaatttttacaaaaggtcatccaactgtatgctgagagaaaagaatggtttctggatttgtttgcggcacatgtggggctggctttaacggcggctgtgagcgcggggatcataggacttcttttagggatttttatttcggaacataaaaaagcggcaggtcccgttctgacgatcgcaaatatcggttatacgattccggcgatctcacttctgggaatgctgatcccggttttggggatcggagataagacggcgataaccgctcttacgatttacggcatcatgccgatggtgcgaaatacgtatgcgggaattaccggcgtcggggaagaagtagtcgcggcggcggaaggaatggggagcacgcgcttccagatcatgacaaaaatcaaacttccactggcagcgggagtcatcatagcaggcgtaagaaatatggtcgttatgacaatctctgtgtcggcgatcgcgtcgtttataggagcgggaggtcttggagtagcgatttacagaggtattacgatctatgattcggcaatgacgttttgcggtagttttctgatcgcgcttctggcgatcgtaagcgatcttttgctcggattgctggaacggaaagtgaaaaagaaaacaggcataaaaaacagataaaacaggaaaacataaataaaaaaacataaatagaaaaatataaatagaaaaatataaacagaaaatcataaaaggacactatgaataaggaggcaaaagatgagattaaagaagatcacggcgctttttctgaccggcgcgcttatactttcgatggccggatgcgcgggaaacggaagcaaagataagaaagaaggaagtgcgggaaacgaagctcaagaaccggttaagatcgccacaaagccgatgacagagcagtttatcctcggagaaatgttgaaaaagcttatcgaggagaaggcaggttatgaagtagaacttacaaaaggtatcggcggaggaacgagcaatatccagccggcaatggaaaagggagagtttgatctctatccggaatatacatccagcggatggattcttgtgctcggacataaggcaggtgaagtaagcgatgataagatgcttgcaaaacttcaggaagaatacgaagaaaaattcgatatgacgtgggtagggctgtatggtcagaacaatacgtatgccgttgtcgtaagagaagatacggcaaagaaatacaatcttgagacatgctcggatctggcggcggtttcggatcagcttgttttcggaggaaacccggattatatcgagagagcggacggtcttccggggatgtctgcggcgtatggatttcagtttaaagagatcaaagatattgatatcggtttgaaatatcaggcgcttagaaacggtgatattgatgtgacgaacgggtatacgacagacgctcagatcagtcaggatgatgtgagagcgttaaaagacgataagtcttatcaggtaaattatttttgttcaacggttgtccgcaaagatgcgcttgaaaaatatccgaagctcaaagagacgttagagctgatggacggaattcttacagatcaaaaaatggcggaactgaattatcaggttgaggaagaaggacgtgacgaagcggaagtggcggaagaatttttaaaaacgtccgggttactgtaaaatattttccgaaaaccgtgagaacagaaccgtttgaagaaactttcgagaagaaacaaaaaagtacaggggaatgaatgcgtatggaaatgatacgtctggaacatgtgacgaaaagctttggcagatataaagcattggatgatgtgagcattgttgtggaagaaggcgaatttttgacggtgatcggcagatcgggatgtggaaagacgacgatgcttcggatgataaacggattgcaaaagccggattcgggaaaagtatatgcggcaggggaagacgtaggagaggcagatttgatccggcttcgaagaaagatcggctacgtgatacaaaataaagggctttttcctcatatgactgttgaaaaaaacattatttacgttcctgttataagcggacagaaggataaacggcaaaaccggaaactggcggaagaattgatcggtctggtcggtttggagcgtgagatgcttgaccgttatcccgaagaactctccggaggtcagcagcaaagagtcgggatcgcaagggcgcttgcgtcccgcccgaaacttcttctgatggacgagccattcggggcgctggatgaaattacaaagcgggctatgcaaaatgaacttctggcattacagaaaaaattaggaatgacagtcgtgtttattacgcatgatatcagggaagcgatgaaattgggagaccgggttcttgtgatggagcagggaaagatcgcgcagtgcgatacgccggaaaatgtaaagaaaaatccggcggatgaatttgtgaaagaactgatcggatgaaaaaactatgaaaaaacgtaatctgacaaaaggaaatgtgacggctgtaatgctgctgtttgccgtgccgatgatccttggaaacatcatgcagcaatgttacaatctggcagatacatggattgtcgggaggtttgtcggcgcggaagcgctggcggctgtcggaagcgcatatacgcttatgacgtttttaaattcgatcctgatcggcatgtgtatggggagcggagcgcttttttcaatctgttatggccgaagagcgttaagaaaactaaaagaatatattgtttcatcgtttgtgcttattttttcagtgacagtgattttgacgattgtttcatatgtgtgccttgatccgattctcacgctgatgcagattccggcggatatttacggactgatgcgctcttatatggggctgatcctcgccggattgatctttgtttttctctataattattttgcgtttctgctccgttcatcgggaaattcggtgattcctctgatttttctcggcgtcggaactgcgcttaatatcggactggattttttctttgtcgcaaaactcgggcgcggagtgaaaggggcggctgaggcaacggttcttgctcaggcagcggcaggacttggaatcgcattatacgctcttgtgaaagaaccggaacttaacatgaagaaaatgaaagaagaggggatcggtataagggcagatcttttgaaagagatcttttcttattctgcatcgacgggaatccagcagtctgtgatgaatttcgggatacttatggttcagggacttgtgaacagtttcggaacatcggttatggcggcgttcgctgcaggggtaaagattgatacattggcatatatgccggcacaggaattcgggaatgcatattcgatatttatctcgcagaattatggggcggataaaaaagaacggatcagaaaaggaacaaaaagcgctgccgtgactgtcataatgttttgcgcggcggcatctgcggcagtctttttcggagcagagtttttgatggggatttttattgatccgcagaaaacacagatcattcagatcggaacagggtatttgaaaacagagggagcgtgttattgcgggatcggaatcctgtttttgctctacggatatttccgggcagtggaaagaccgaaagtttctcttcttcttacgatcctctcacttggaacacgggttgtccttgcctatgcatgtgcgccgttgttcggcgttggagcgatctggacggcgataccgatcggctgggcgatggcggatgcggcaggaatcatcctgttaagacgcggcgagcgtactaacaggatgaatgaaattatgtaattgtcgtctgtcaacgtataaactgttttctgtaagcggtaggagtcatgccgcatatttttcggaaacattgggaaaaatagcttgaagaagagaagccgcactgttttgcaatcgctgcctggttcagatccgttgaagtaagaagttcctgacttgtgaagatccgtttctgagcaagatagttcataggcgcgatcccgtaaatttcggtaaatgtatgggcaaaataatatttattcagatgggtcagctccgcaagtgtgtcaagagtgatgttttctctgaagttagaatcgatgaagcgctttgcgtaactgcattcgcgggtaatcttttttgaggaaggaagcatttctacgggcgatccggtatgtcgtgaaagttgaatgatgagagcttcgagaagattttgacagatcgtctcgtagctttctttttgttcgtccatctcccggaggatcgtatgaaagtagaagtcgagattttcggagaaatcttcgcactgtatatttaaatattctttgtcgttataaataagaaagtttagtccctccacgccgaggacaatgtattccaagggagaatttttgtctgaaacttccgtgtggcggatgctcgggttgatgatgatcagattctgttttcggatcggaaatgattcttcttctacaatgaagcttccgcatccgttcagtacgtaaaaaagctcggaaaaataatgggtgtgcgggtagctttcccagtcttgttcgtactttgaataactggagtagagcaggcggtacggcatttgcgaaaatgttgtttcctgattagaagtgttgaatgaatgtcgtatatttcccataaatacagcctccgttgtttatctggaatagtttagaaattttgtttttaactaaaaaagtaaaaaattaatgtgtttattatagtgaattcttaaaaaaaaatcaagggaaaatggatgtattgtagaagcggcgaaaaaagaaattatatataatgcacaaaaaaataaatataaaaaagtttttgtcggaaaaacgcaaaaaaagtcgggggaaatacaaaaaagcaatatttataaaaaaaaggacaagaatgggtattgaaaaattatcggatttcgtttattctaagaccaagagaaacaaatcgttaaataaaggaggaccaacgattatgaaaaagaaaaaactgatcagtctgttacttgttgcttctatggcattcagccttgcagcttgtggttcatcaggcggagacgacaaagacgctgacaaaggtggagacgaaaaaacactgaaggttgcagcggtagaaacagcttacggcgcagacatgtggaaagaagtttgctcagcattcgagaaatctcacgaaggcgttaaggttgaacttacaatcgacaaaaagctcgaagatgtaatcaacccgcagatgaaatccggcgagtatccggacgtgatcttaagagctgtaggagctgaatcgggaatcacagagacattcgtaaaagacaacaaccttgttgatctgacagatgttcttgatatgacagtaccgggcgaagaagtaactgtaggagacaagatccttccgggattcgttgagaatacaattacaaatccgtacggagacggaaaaacatatctgatgccgatgttctacggcccatgcggactgttctacaatgcaggactgtttgaggaaaaaggctgggatgttccgactacatgggatgagatgtgggcacttggcgacaaagcgaaagaagaaggaatcgcattgtttacatatccgacaacaggttactttgacgcattcttctatgctttgatgcatgagacaatgggagacgatttctctaaagcgctgacatatgaagatggtatctgggatacagaaggcgctaaacaggcatttgacattgttgcaaaacttgctacatatacagaaaaaacaacaccggctaatgcaaacgacaacgatttccgtaagaaccaacagcttgtacttgacaacaaagcgctgttcatgccgaacggaaactgggtaatcggcgagatggaagatgctccgaaagcagacggattcgagtggggattcacagctcttccggctgttaaagaaggcggagagagagcttcttacacattcttcgagcagatctggatgccggcagaagcaaaagagcaggatctcggaaaagaatttatcgcttacctgtactctgatgaagcagctaagatcttcttcgataaaggcggagcagttcagccgatcgaaggaatgtctgatatgatcacagatgataatacaaaactgtattactcaatctacgacacaggcgcagttgcagttatggatgcattcgcagcaacagagccgatcgaaggtcttacaacacgttctacattctttgatccggttaactctcttgtaactggagacaagacagagcaggattggatcgatcagatcaaagctgacagtgctaaattccatgaagcgctgaaataaataaaaaataaatcaccggaaatttaccggttctgatgaccggaagaatatcacaggtgtaggcgggcggtgaatctgttttcaccgcccgttttatcctgacaggagatgaattaatgaaagcaagaaaaggaaaagggctgtttgtattttgctgtcttgccccggcagcgatattgtttatcgtatttatgatcctgcctacgatcgatattttccgtatgtctatgtttaaatggggtggatatacagataataagacatttgtaggattggacaactttaaaatacttttcaagagtgacaaattttatcaggcgttccagaactcgattttgctgatcgttcttgttacacttgtaacatttacatttgcgcttgtatttgcttatattttgtcacgggaaaaaattaaaggaaaaacatttttcagtgttattttctacattccgaacattttgtcggtagtagttatcagtgctattttctcggcaatctatgatccgaaccttggacttttgaactcttttttgaatctgttcaaaggagcggaaaacccgacgctttggcttggagatcagaagatagttatttacagtattgtgattgcacttgtatggcaggcaatcggttactatatggttatgtatatggcaagtatggcaaacgtgccggaaagcctttatgagtcggcggctttggaaggcgcgggaaagatcagacagttctttacgatcacaattccgctgatctggacaaacatcagaacaacacttacattcttcgttatcagtacgatcaatatgagtttcctgcttgtaaaagcaatgacaaacggcggaccggacggagcgtcaaatgtattcttaagttatatgtatcaggaagcgtacacgaactcttcctatggatatggtatggcgatcggtgttatggtattcctcttctcgtttgcacttgcgggaattctgaatgtggcaacaaaacgtcaggaaatcgaattttaagggaaggagatcaagatgggaaaaacaaaagtaaaagagtcaaaaaaaccattgacactttcaaaagtggtagtatatatcttattaattctccttgcgatcacaattatcattccggtcggctgggtatttgttgcatctgttaagcagaattcagagttttacggaagtccgtgggtacttccggagaagatttatttccagaactttatcgatgcgtgggagaaggcgagcatgggaacttacatgctcaactcagtgatcgtaacagcgcttgcattgcttttgctgatcgtgatctctcttccggcggcatatgtattgtccagattcaagtttaaaacgtcaaaattctggaacgtactttttatggcaggcctgttcattaacgtaagttacattgttgtaccgatcttccttatgctcaataactgggataaaacgcttcgtcagctcacaggaggtacgttctttttgaacaacctgtttgtgctggctcttgtgtatgcgtctacggcgcttccgtttacgatctatcttttgtccggatatttcagatctttggcaaaagattttgaagaagccgcttatgtagacggagcaagttactttacaacgatggtaaagattattttcccgatggcaaaaccgagtattgttacggtaatcttgttcagtttcctgtcattctggaatgaatacattatttcaatgacacttctgacaaaaccggaactgaaaactctgccggtaggacttatgaacttgatggcggcgcagaaatctgcagttcaatacggtcagatgtatgcaggtcttgttatcgttatgctgccgacgttgattttgtatatctgtgtacagaagaaactgacacagggtatgacactcggcggattgaaggggtaggaggttgatattatggatgaaagaacaaaacaggttttagtaggaatcattgttgctgttatttttatcgcgtctgtagcccttatcattatcggtcagaaaaatatcggaccgcaggggcttctgacaatgcttgcaggacttgcgggtctgatcggacttcttgctttttataatcataaatataaatagcaaaatataacagaaaacagaaaaagaaaacaggaaagaacaaagagggtataattcatggaaaattcaaaaggacttgtgaccatccctacagatctcgacgttgttcccgagactttggaactgatgaagcgctggggagcagatgcgatcagagactgtgacggtacagattttccggaggcgctcaaagacgcagacgcggaaatttattctacatattatacgacaagaaaagacaatgagtgggcgaaggcaaatccggaagagatacagcagatgtatcttatgacgccgttttatacggctgattccgagagtctgtcgattgagatcatgaaaggtctttatcctgacatgctcagtccgaatacacgggatgacattaagcgttggtgggaggttgtagaccgcacgacaggaaaagtcgttccgacagacgagtgggattataatgaagaggaaggaaaggttacgatcaaggcagttccgttccatgagtatactgtgagcttcctcgcctatatcatgtgggatccggtgcatatgtacaatgccgtaacaaatgactggaaagatgtagagcatcagatcacctttgatgtccgtcagccgaagacacatgagtatacattgaaacgtctgagaaaatttattgaggatcatccgtatgtaaacgtacttcgttttacaacatttttccatcagtttacacttgtatttgacgagcttgcccgtgagaaatatgtagactggtacggatattcggcgtcggtaagtccgtatatcttaaaacagtttgaagaagaagtgggatatccgttccgcgcggaatatattatcgatcagggatattacaataatcagtatcgtgttccgagcaaagaatttcaggattttcaggcgttccagagaagagaagttgccaagatcgtaaaagagatgacagagatcacgcacgaatgtggtaaaaaagcaatgatgttcctcggagatcactggatcggaacagagccgtttatggaagagtttaaaacacttggtattgacgctgttgtaggaagcgtaggaaacggttcgacgcttcgtctgatcagtgatatcgaaggagtgaaatatacagaaggacgtctgttgccgtacttcttcccggatgtgttcaacgagaacggagatccggtcaaagaagcaaaatataactgggtgacagcaagaagagcaatccttagaaaaccgatcgatcgtatcggatacggcggttatcttaaacttgcgcttcagttcccggaattccttgattatgtagagcaggtatgcaacgagttccgtacgctttatgcaaatgtaaaaggaacgacaccgtactgcgtgaagaaagtcgcagtgcttaactgctggggcaagatgagagcatggggatgccatatggtacatcatgcactgtatcagaaacagaactattcatatgcaggaatcatcgagtcgctgtcaggagcgccgtttgacgttgtatttatcaacttccaggatattctggataatccggcgatccttgacgatatcgatgtgatcatcaatgtcggggatgcagatacggcgcatacaggaggagaatggtgggaaaacccgaagatcatcgaagcgatccgcggattcgtttacaacggcggaggaattatcggtgtcggcgaaccttccggtcatcagtatcagggacatttcttccagcttgctaacgtattcggtgtagaggaagaaacgggcttcacactcggatacgacaaatacaactgggatgagcatgaacacttcattttggaagattctgaagaagtagatttcggagaaggcaagaagaatatttatgctcttccgagtgcaacgatccttgtgcagaaagaaaaagaagtacagatggcagtaaacgaattcggaaaaggacgcgctgtttatatcagcggacttccgtacagcttcgagaacagccgtgtactttaccgtgcagtgctttggagcacacacagcgaagatgaactgaacagatggttcagtacaaattataatgtagatgtacatgcttatccgaagaacaacaaatactgtgttgtaaataatacggatgagccgcagcagacaacgatctaccgcggagacggaagcagctttgagcttgctcttgagccgaaccagatcatctggtatgagatcgcgtaatgtctggatcgtatcgtgcaggcagtgttctgccgattcatttgcggtcgttttgttggggaacagacgacggcagaaaagtttgtgaaaaagaaaatagaatgaatgaaaaaatattacggttcatatgtatatatgagccgtaatatgatattggaggaaagcaatggcgaaacgtgagaaaaatccggcatcggataaaacgggaaacgacacaagcatctcgttgcttgtgctcggtattgtgagcgttattttcgcactttggattccgatcgtcgggatcgttctggggactgtatcgcttgtaagagtgcggaaaagaaatgatctgtcaggaacagccatggcaaaggcaggaaaagtcttaagtatcgcgggaatatgtatagccgttgtaaactggattctggcaatcgtccttacatttatgacgttagcataagcatgataagaatagcataggaaagaggagcagacaggagaaatgttagcatacacatatgaagaaaacggaaagtttgttttgaaagagaaagaaaaaccaacgctgcaaagtgaggacgacgcgatcgtacgtgtgactttggcaagtatttgttccagcgatctccatatcaaacacggcgccgttccgagagcagttccggggataacggtcggtcatgagatggtcgggatcgtggaagagacaggaaggcgtgtgacaaaggtaaaacccggagatcgtgtcactgtaaacgtcgaaacattttgcggggaatgttttttctgtaaaaatgggtttgtgaataattgtacggatcaaaacggcggctgggcgctcggatgccggatcgacggcgggcaggcggaatatgtccgtgttccttatgccgagcaggggttaaataagattccggattcggtgacggatgaagccgctctttttgtaggagacgtcctcgcaaccgggttttgggcggcgcggatttcagagatcggagaagaggatacggtcgtcattatcggaggaggacctacgggaatttgtacgcttttgtgcgtgatgcttaagaatcccgaaaagattattttatgcgaagtagatccgaagaggatcgcatttgtaaaggaacattatccggacgtacttgtcgtgaatccgaaagagacggatgcagaacgattcgtgaaagaaaacagcaggcataacggggcggatcgagttttggaagtggcgggaagctcggatacatttgaacttgcatggaaggtcgcgcgcccgaatgcgattgtcacagtcgtggcgctctatgaagaaaaccagacgcttccgcttccgcaaatgtacgggaaaaatcttattttcaaaacaggaggcgtagacggatgtgactgcgatgagatattgaaactgatcgagcagggacgtatcgacacaacgccgcttatcacacatacatttccgctggaagaaatagaacaggcatatgatatttttgaaaatagaaaagataatgtgatcaagatcgcagtcagtcacatttaattgtgatcatcgtaatgtaatcacttcggtctttgatagacatttcatttagtccttcttcgtatgcataccctgtaagcgtcagattgtgtttgcgggcataataaaggatcgagcggtagatttcgggaagttttccccagtcaccgatgcaaaaagcgcgcagatatgttccggcaggcaggatttcatcatatacgtcagaagtttgcgggcagtatgcaaagaaggagtgatagctgttaaaactgtttttttggatatcttctatggaaatacagcttccgaaattgtcataaagatgaaataattttttcaggcggagagagaactccgcggcgatggaaaaatcgtcttcgtcgtattctcccgaaataggggatgagaagatgatctttctctcgggcagcgtacagcgttcgatcgttccgtgctgcgaatacattcctatttttaatctctctgctttttgttctaaaaaagcctgtgcagataaaagctgttcgatggactcgtcgatcagctttttcttttttgtcatcatctctgtaaaagattcgtcggaagggcgggatgagtaatctttgatctcgtctatggacagaccgatcttgcgcaatgtaaggatcagttctaactctgtaaattgaaagcatgtatagtagtggtatccgttctctccgataatttcggggcggaacagcccgatttcattgtaatagtgcagcgtgcgtttgttgactccggtcagttttgcaaattccccggaagaatataaataattttttcgattcataaaaaactccttgactgtacagttactgtacattatatgatacatgatgaaaagaagaaaatcaatgataaagcgcagaaaggagatcgggatggagtttatatgtgccgaggagaaacagtggaaagagataaaaacaatttatatggaagcatttccgaagcgggagagaaaaccatattttgcactgcggcattccgtaaaaacgaaaaaagcggttgttatggcagcaaccgaaggtgaacaggtgttgggatttatcgtccttattccatataaagatatggtaatggcagattatctggcagtgtcatctaaagttcgcagcagaggaaccggaagttatattatgcagaatgtgtgcaggcagtacaaagataaaaaaattgttcttctgatcgagcgccttgatgataaggcagagaacaaagaacagaggattgcccgcagaaaattttatttgaaaaacggatttacgtcgtctgatatttttataacgggagcaagcggggaaatggagattatgaatttcggagaaaaggtttcggaagaagcgtatatagatctgcagaaatatgcgcttggaacggtgatgttcagattgtccaagatcaaagtggcagagaaaacgccgcataagaaaagagaggaggctgaccagggatgaaaacaatattttcaaaagtaaagttaaggtcgggtcagatcgttcagttgtttttgcttgtattgctgtcggcagtagggcagatgcttttaccgtcgtttttggcacagatgatcagccatggcgtggcggaaggagaaaaccgtattgtctggatgtatgccgtgatcatggcgggagtaacattgttttcctgcgtgatcagttttctctctgttaagattgcatcttatatttctacagattttgcggcacagcttagaactcaggtcttttctaaagtgcaggagttctcggcggcagagatggatcggttcggaacagcgagtcttgtcacaagaagcacttcggatattacgaatgtacagaactttttgacattgctgcttagagtcggattgcttgcgcctatgatggctgcggcaggactagtgttttccgcagctacgggaggagaagtcagttcggttcttcttgtcgcgataccggttcttctgactgtattgacgatcatcatggtactggcatcgaagtattcgatccgtctgagaaaaaagctcgatcagatcaacagattgtttttggaatcgttggaaggagtacgcgtgatccgcgcgtttaataagcagaagacagaaaatgcacgttttgaagaggcaaatgaagattatgcgatgacggcaatggcagcagggcggatcacaagccttctgatgcccgctatcagtgtgatcttcggagtgacgacggcggctgtattgggcatgggcgcatattatgtaagtacaggcgctatggaagtaggttctttagtggcaaacagccagtatatcagtatggtacttacatctgtgatgatgctgtctcttgtcattatgatgtttcctacaagttatgcatgtgcgaaacgaatcgcggaagttttgcagacagacagctcgatacggggtggaaagtttcagatggaaaatcgtccggtgcgcggaacggttgagtttcgtcatgtgacattcgcttatccgggagcggatgagccgatcctgaaagatattagttttgaatcccgttcgggagaagttacggcgatcatcggaggaacgggacggggaaaatcaagtatattaaaactgatccccagactttatgatccgatgttcggagaagtgctgatcgacggagtgaacgcgaaagaataccgcacggaagatcttcgttctttgatcggatacgtaccgcagaaaaatgttcttttctcgggagatattgcagataatcttaatttcggaaatgaaaacggaacggaagaagactggaaacaggcggcaaagactgcctgtgcggatgagtttatctgtaagaagaaagaaggatatcacgattcggtcgcccagggcggcacgaacttatccggcgggcagcgtcagcgtatggcgatagcgagagcgatgatgaaaaaaccggaaatttatgtgtttgacgatagtttttctgctttagatatgaagactgaccgtcagctccgtcagaatctgaaggaaagcatcgaagatgcaacggtcatcatggtagcgcaaaggatcagcacagttcttgacgcagaccggatattagtagttgacgacgggcagatcgtaggaaacggaacgcacagggaattgttggatacttgtccgctttatcgggaaattgcagagattcagttaggaaaggaggcgctttgatatgaaaaatacgacaatatttaagaggctgctgggctatttaaaagcgtacagacttcggttattttttgtactgctttcagcagttatcagcactgcctttatggttcttgctccgtttcttgtaggaaaggtgacgacgacgttgtttgcaagtattgccgataaagttttttactgggaaacgatcatctggcttttggcggcgttggtagcgttatattttgtatcacagttgttttcctttttgcagggattcggtatggcaaagatcactgcaaatgtgatgcagacgatccgcagggaaatcgatgagaaaatgcatcggctgaaactgaattattatgacgttcatacacacggagatattctcagtgtaattacaaacgatgtagatacgatcaacaatacgatcagtcagaacttaacttcgatcgtaacacaggttacgactgccatcggcgtacttattatgatgctgatgatcagcccgaagctgtctttgatcccgattgttatggtgcctctttctctattgagcgccgcaggagtgatgaaagcgagcgaaaagtattatggagaacagcaggagcttctcggtaagctgaacggatatgtagaagagatgtataacggacagtccgttgtgcagacgtttaattatcaggaacgtgcgaaaaagaaattttctcagttgaatgacgcgcttaaaaacagttcaagaaaagcggagacaacagcaggggcgatcagtccgattacaactcttgtgaatgatcttgggtatgttctttgcgccgctttaggatgtctctgggcgatcgccggaaagatcgcagtcggaaacgtacaggctatgttggagtatacatggcgttttgcagagccgttttccgcaatcgccggaatggtaggaagtttcggagcggcagcggcagcaggaaaccgtattttcggactgcttgacgcagaagaggaaattccggattcagaccagtgcatcgtacctgatgaccgcagcggtcgcgttacatttgaaaatgtgacgttcggatatacgccggatcatcttttgatgaacgggatcgatttgacggtagaaccggggcagaaagttgcggtagtaggacctaccggagcgggaaaaacaacgctgatcaatcttttgatgcgcttttatgaggtaaataacggatcgatcaaagtggacggaactaagatcacggatatgccaagggaagaactgcgcgacagattcggtatggttcttcaggatacatggctgtttgaaggaacgatcggagagaatatcggatatgccgaggataatatgaagaaagagaaaatagtagaagccgcgaaatcggcatgcgcccacagtttcatcaaaacactcccgggcggatacgatatgacgcttagtaaaggagcggagaacatttcgcagggagaacgccagcttctgacgatcgcaagagcgatcgcttccgatcctgagatcatgatcttagacgaggcgacaagtaacgtagatacccatacggaagttcttattcaaaaagcgatggcagaactgatgaaaggacgcacaagttttgtgatcgcccacagactttctacgatccgtgacgcagatatgatcctttatatggaagacggagatatcaaagaagtcggaaatcatgaagaactgatgaaaaagaacgggaaatatgcggctctttatatgagtcagtttgcgtaaccggattatagaaattttacagcggggcaaaggaactgaaatagaggggaaagatgcactattcgtaaaatactggaaattcgttgttttttgtaaaaaacgcttgcagaaagtaaaaaaagaaagtatattatcaaatgggaaaaatagtgtaacagaataacaaccggagtcttgcgtgatctattccacaactctccggttatatttatgtaaaggtatattttgtaaggagggaaagcatgaagatgcagaagaacaagaaacttgtgcaagctgctgcggtaggactttcagtctgtgtgctagcaggaggcggtctgttcgtatggaatatgtacggcaaaaatgcagaagaaaatgaaaagcagatcgtatcagatgaagttgcggaaattgaaagcttgaattcacgcgacaatgttgtagatttggaggagcttttcgagggagaaaaggcgtcgggaaaagaagatgtgacgagcgagaaaacagagaagaaagaagattcttcgacgaagtcaggctcttctcaaaagtcggattcttctaagcaatcaggcggggcaaaaaaaccggagtcatcaaaagatacagatacatcaaagaagccggataagaaaccatccaaaccggacgagaagccatcaaaaccggatgaacaaccgtcagaaccggatgacaagccgtctgtgccggatgagaagccgtctgtgccggatgagaagccgtccgtaccggatgagaaaccgtccgtaccggatgaacaaccgtcaaccccgcagaaaccggcattgccgcaggtgaatgaaccggggtggatcacaggtatatattaaggaaggaatatgagagggatgaatcaaaagagaaagagattagggttatggatactttttctggcggcgctgcttttgacgcagttcaccgttccggttaaggcatccgagccgcagatacaagatgtaaacatacagatggttggagggcagattcgtacgatcgatccgatggggctgcgaatggttgcctgcatcaagaaatcatatattcaagagttggaaaaaagcggagcgacggtaagttatggaatcgtactgcttccgaaaaagtatttgacagaaggtcaggcattgacgcttgacggcaagtacctttataacggctcggtctataagccggcaaaagtaccggcagtaaagaaattttcagaagacaatgataggatttactttacagccgttttggcaaatctgccgaaagaaagatataaaaatgattacgcggcgagagcttatgcagaaatcacgagaactgtgacagaagacggcggaaagaaaaaaacaacgacagaagttgtatacagtgagagtgaaatcgaccgtcaggtatatcggattgcagaagaggctgtaaacggaactacagagacggaagagacaaaacagtggcttcaagataacattctcgctccggtagatacgccggaagaactgccggaagaagaaaaaaagatctcgtttcgtcttggaaaagtgtccggtgtgacactgtaccataagacaacgtcagaagccggagtggaaactgtagaagaagtatcacagtttaatcttacagaatttaaaaaagaagattatcttgtgaaagttgagatggaagatcagcctgagatatttgcgggaattacggaagtgatcgcaccgcagacagaaacaggaaaagtaagttttaaacttgacagaaaagattatactacttctcaggcaggacaaacgatcgaaggcgcggttgtagagtttggtacgaagtctaacgataaagtatctacaaaatatattacgatgcagtcgctgatcgatcaaatgaaggcaaatccaggcggaacttatactctggagcatgatatagacgcaagtatggttcagggagatgattaccttgttccgacatttagcggtacgtttaacggaaatggatataagatcaaaggtctgacaacaactctgttcggaacggtttctggaggtaaggtacaaaatgttaaacttgaaaatgtttccattacaaaagtaaacagttataaagatgcaggtggtggaacaatagcgaataaagctcagaaagatgctgtgatcgagaacgtacatgtaagtggaagtttgaaaagtacaaacagccgagaacttctcggaggtcttgtagggcgtatggattatgcgaaagtaagtaaatgctctgctaatctggagattacaggatctttcaatacgacgggcggactaatcggtcaaatgtccaatcaaaatgaaggtcctaatattgtagaaaattcatatgctgttggatcaattcgaggaaatagaacgaatggggcgcttggcggactgatcggatggcataactgtaaaacaaacttttcagtaacaaattgttatgccgctatcaatatggaactgactggaaccaacagacagccaggaggattcatcggatatataggagaggctgatgcgacaggtgtactaaagagcaatgtttcatacagtaccggaaatgcaggatataagtttgatggatcaactgaaactatcaaatatactacggcacagattgaaaatctttatagtttaagagaaagcagactgaaaagagagagtagtcgtaccggaaatacgaatctgactcagatcacagatgttacagtggataaactttcacaaaaagagttttacacgaacatgggctggagtgaagacgtttgggattttgctcctctgaaagaaggaaaaactccaatccttagaaacaatgactcaaatatgacgacaatgctccagacaaaggaaatcgcatcggcagccgacctgaagaatattaaaaatgatttgtcaggtgtgtatgttctgactacagatatcgatatatcggaatcagcgtcgggaacagcggttatcccgggaatatttaaaggaacattaaaaggaaacggccatcagatcatcggtcagaagattccgttgttcgatacgttagatggagcgacgattgaaaacgtgaagcttgtacaaggcgagatcaatcagaagggaacagataaagttgcggctctggcaaaaacttcacaggcagacactcttatcaaagacgtatatgtcagagatatgagcgttacgggacaaagtaatgtagcaggtcttgttgcaagtatgaataagacaactgtagaagaatgttctgtcaacgccacagtaaacggaaaacgtgcaggtggatttgcggcagagattttaggagattcagtcgttaaaaacagttatgcaagaagaacggcggataaagagacattcgcagcaactgaaggcgacctgcagggcggatttgcggctgtcattaaaaagtcagagctgatcaataacttcagtgagcttacattaagtcaaaaggcagaggaaaaaccggaagagacaccgaaaaaatcatctgaaaaagcggcgaaaacggcatgtatggtcggtaatttcgttgcagaaagcggagtaggatcagaagcggttacaaaagcagagcacaatatttcctttggtccgaaggaatattcttttgcaggaaacagtacggcggaaaatgttttaacgaactatacagagaactacgagtatacaggaagcgtttcaaatgatgagggaactcaaactcctgaacatacaggaaaaatcgataaagcgacagcagcgcagattacaaataaaaccttctatatagatacacttaaatgggatgagaagatctggtatctggatgatgtggcaggtggaaaaagacctcgtttaaaggcagaaggtgatgtttacggagctgaggaagaagatacttcaaaaggagagggctcggaaggagattcaaacaacgcgtcttcgcaagaagtagtttacatacaggcgccggtacaggatgaagaaacggaagagccgcagatggcaggagagactccggcagaagtgatcagttttatcgcgcagaaaaatgcagaagagattgcggctatggacagtctggaatctgtaaaggattatcaggcagatcgaaaactgatttatgaaaacttgcggttgtttatgccgttctatacatatgaacagatcgtcaaagacggaaataaggttgatccgtcgcatgtattaaataaaaagacggtgcttgcggtctatccgatggatgaccgtggcaacagaattgtggcattatccgataagacagttcaggatataaaaaagatccgtattcagtttacagatgaaacaacaccgttgatctataatattacatatattgatacaagggaaaatattgcttcgtacaaagtagcgcagatccctgttcactttaactttagaaactatgttgtcagtacgacaacaacgcagtttaataaactattgactgcggcaaagggatatgattttgacggagatattgaaacgagagtttctcaaaaagacagcgcttctgtattgtcggtataccggaaaaattataacaatgttgtcaaatcagagatggagcaggtgcttatttccatggcggcatcaaatccgcagtatccggtaaatactacaaataaagcagcagaactgatggtagaggaaaatcttatcgcaaatggatatctgaaggacttcctctatgcgtataactatatagaccgttggtacgattttcagatcggcggtattaatataagagacgttgtgctttttgacaactcgatcttaaaatcgggcaaatctccgcgcaatcttgtggcagagatcgtacagcttagcagcagcgggggacgtcagggaaatagtacgccgtccttctacatcaaccggatctcacagtatacgggaatttcaaacgtcgcttctttcgtagaatattttatgactgcatacgcaggatacacggatgtaaacgactggatcattgataatttccagggcggattcatcgtagaagcaagagcgaataatccgaagatcgattccagattatggagaatactgaaaaacaatacggtacagagaaacaacgagctgatccttccggtattgtcttataagacatcgaagaacttgtatctggcatcgttcccgacatctcttgtatatggaaacttgcagatttacaacggatatcagaatacagatgagtggagacagcagaagaagcagcaggtgatcaatcagatcaatgatttcaagacaagctatgataacttcgtggacgttgcagaaaacggagcacagtcaattaataaaagtaaattcctgatcgtcgattcctctgcaaataaagatcacagtcaggatgtatttcaggaattttacaaaccgctgcagacgatgtggaagagcaacaacggagcggtagccgtaatattcggaaatccgaattatgattacatttattataacagctctaactttatcggagatctgaccgtcttaaaccatgagatgggtcatgtgacagatatgtggatctggatggagaataaaggaaaacgtccgggacgtaacggagaggactattctaacggatatgcgaaccaggcaaacgtcgattacaacatgaactttatgaagacgtatgcaagagacggctcgatggtgacaaacctgactccggacagaatcaatacacaggaagaatttaaaagctattacaaagaagtgttcgagacgatctatacgttggattatcttcagggcaaagcgtacctggagttgacgcccgcacagcagtcggcgatcacatcgcagcacagatatggaacgacgaacaattaccagagtcggaatcagtcaaacagtacatggagaacgatcggcgccgccgagcttgagaatatgaatcttaagacgttggacgatctttgggataatcagctgacgatcagaccgggacatcggttcgatcttagaagtatgaacgatgtcggcgtgaataatctcggggcatatcagatcgacagagtgtgctatgcaagctggtacgtgccttacgttgacggaggaacgccgaatgcccagacatttagaagaaacggatacgaactcggcggactgtacggatacagcgacggtcttgtagagtatttaagtaaccgtacacagacaggagatcttgcatatttcaaaaagaaaatgcaggatgagaatttctcctttgaaacatacagaaagaataaaaataaagagatcgaagaaaagatcaaaaagcagaaagaacagggcaacgcatattttgacgaggaagcgctgatcgaatatttgaaacaaaatatgatcaattacggaaatggtattaactccggcgtttcaaccggaaacaatacgctcaacaatattaaagaatcaagagaaaacgtattccgttatctgcaaagaattacggatgagttcagaagtccggtttacgcagatacggcagagtcaagacatgcggtaacgatttccacagggcaggagctgatcgagaagataaacgagaacccgaacggattctatgttcttgaaaaggacatttctatggcggacattaatctgacaggagaagtttatattgacaagacgtttatcggaaaactgcaggggaacggtcataagattacagacgcgcaaggaccgctctttgcaaagatcgccaactcttacgtttccgatcttacgatcgtaaataaagaaggcgagacaaaggactggttcggaaagacaaaacagtatacgatcattgtcaatgagcagaaaaaagaaaccgttcaggaaattaagactttagaagaattaaaaacagtcggacagaacaaatatacaaaatatgtgctgaaaaacgatattgacgcgtcatccgtaacgacagagacggcggttgtcaaaggcatcttcaaaggagagttcgacggaggcggattcacgatcaaaggactgaaaaaaccattgtttgaaaaagttcaggaaggaacagtccgcaacttgaagatcgaaaatgcagagatcaacagtacagaagaaagcagcaaaaacgcagttatcacaaaagaatcaaaccacgctgtctttgaaagcctgaacctggcggatatcaaagtcagcggagtgagctacaatgcggtagtgacaggatatgattatacaagctctgttttctcgaaaatacagatccgcaatgcgcagattacaggtacgaaaaattataacgccgttttggcaggccgcgcatccgggtcgcagattcaggatgtctctgtaatcggaagcagtgttgcacttagcggaacagactgcggcggattcatcggagaaggcaaaaacgtgacgatcagtcgcgtgtacagcgatgcggatatgaccgttaatacatacacagacgataagaaccgtacgcagagcgccggattcatcggcaatcttacaggcaagagcagcgtagaatatgtatttgcggcaggaaaagtagacaataaaacaagcgaacagctttataacttcatcggtacgccggacgcgctgaaaacgatggtgaaaaacagttttgttatccaaaacgcaggcggagtatcgaatatcacagacggcgtaggacaggagatcttgcgtgaagtaacgtctcaagaggcggcaacgtcagatttctacaaaacatcaatgactctgaacgaagagacatggaacttgagtttagttccgatgaaaggttatccggaactgaaaggaatggagaagcgagaggtcatctccgtaaaaacggcggaggacttcatgaagatgaaagacttcccgactcaggaataccgtctgaaagcagacatcgatctgtcaggaacagaacagacaggaagcgtgataccggaattttccggtgtgctcgacggagagaatcataagatcaccggtctgaaagcgccgctgttcggtcagttaagcggtacggtgtcgaatgtagccattgatgcaggtgcgattgaaatcggaaacagcgtagatacgactgtcggtatatttgcgaatacgatgacaaacgcaactgttgaaaaagtcatgatcgcaaacggaagcatcagcagtacagcaggaaaagcggcgggattcgcaggaactgtgacagactcaactgtgaaaaatattttcattcaaggaagagtaaatgcagtttcgacagcgtccggtttcgcagaaacgtcccaccattcggttatggaaaatatctatgcaaacatagacgtaaacggggcagacggcgcaggattccttgtgaacagtacaggtgaaaatagttacaaaaatatctgttcaataggaaacgtcgcagaaaacatgtataaactggcaaaaacagacatcacgtttacaaatgcttatgagttgtcggcagcagacggaatcagctctgcggcagaagcaaacggcgtgaaaacgatcggaaaagaagtgtggacgaaagcgttctatacagaaacacttaagctagatatatccgtatgggatgtagagaatgcagagacgaacggatatccgttgttgaaagagttcaatgtgaacttatctccgatgactgtggaaattcaaaaaccgcaggatatccggaagctgaacaaactgccggaaggaagatttacgatcacggcagatctggatttcacagagtacggcgcggcagaaattacagaaaacattgcggaaaacagcatagaaaacaacgcagatataaacgcggctgacagcgtggaaaacagcgcggaaaatcatgcggaagaaacagcgcaggcaggaacgtgccttgtgacagagacgtttacaggaagtataaacggaggcggccacaaagtaagcggcatgaagagcgcgatgttcaaacagctttcaggaaaagtagaaaaccttgaatttagaaatattcttgtggataatgaaacagcaggagcaaatgtgcttgcggaaacgacgcagagtgcaaatgtgaaaaacgtacatttcaacggaattacactgcgaggcgcagggtacacaggtatgattggaaaagatacaggatcgacattcagtcagatcagtgtacagaacgcagacgtgacgacaagagccgattatgcaggtgtgttcgcggcaaatgcggcaggaactcaaattttcgatgtgctgatcacagatacagaagtggcaacgtcgaacgcttatgtgggaggattcataggaaacgctgagagaatcaccgcacagaaagtattcgcagatgcagagctggatattccgtatactgtttccccgcaaaatacggcggcgtttatcggtcaggcatcggaagacagcaagattcaatatagtacggcggcaggcggcgtctatccggaagatccgtcgtcaacaagatataagctgacgcatatggataacagctctaatctgaatgaactaaaggcatttacaaattgctttattaacacagatacgccgggatacgacagcatagcaaacgatccgaaaggtgtgacgcacgaagcgctttgcggtacagagttctatacaaatgagatgggcttgtctcaggacgtatgggatctgtcggatgtggcaggaacaggaacgccaagcttgaagacgatgccggaagaagacgtgagagcgccggagacagcgccgacgcctgaagaagaaatacctatgcaggaaacagctccggaaggatatacagagatccgaacggcagaagaactgctcgcgatccgagacagttcggataaatatattttaatgagctcgatttcactttacgatgcagagccgcaggacggctcattcctcggcaacttcaaaggagaactgaacggaaacgggctgacgatccgagaagtttacggagcgccgttgtttaacacattgtcaggaaaagttgaaaatctgaaactgacagacgttaaagtagaagcttggagtcagaaccaaggagcaaatgcatttgcgaaaacattaagcggcgcgacagtttcaaaagtagcgctcaaaaacatcctcgtcgcaggaggtaataatacaggagcgcttgcaggaacagcacagaattcaaccgtaagcgaagtgtgggcggaaggattaaatgtcaatccgtatggaccgatacatggacagaatgatgcgatggttggcggcttgatcgccgacttaaagggcggatgccatatcagcgactgctatgtcggcggcgagataactgtaaatggcgagacacagggcggtgtattcggatataatagtaatatggataatggacctgaaaatacagtgaaacaagttgtttctaacatgaagacaaaagcaatttccggtcagacagacggagcaggattcataggaatgattggatatgattattcgtggagcacatggatgaaaaacagcattgcaatcggtgaagcgggagtaagcagtgatcatggaagtgtcggtcaggcttatcgttttgcgacaaaagggaactcagaatcgccgataagatttggtttgcagaactgttatgaagcgaatgtcagtgtaagaagcagtgtagtttcaggttacttggatgagacgggtaggtataaagaaacatcgttctatcaggatactctgaaattcgacagctcaaaatggaactttacatctgttgagaaaaaaggccatccgacattaagctgggtagcagacgcagaaccgcttccgccattgccggaaggttcggcagtaacgacacataaacagttgaagacagaagtgccgcaaggatatacggcaatccgtactccggcagactttatgaagatcgcagagaatccgagcggaaaatacattttgatgaataatatttcactggagcaggtaaaactcgcagaaggtcagacgtcctatattatgaagcgctttgaaggagaactggatggcaataatcaggtgatccacgggttaagagcatcgctgtttgattccatcagcggaacgtcaagcaaaaaagcagtcgtgaaaaatctgcgtgtgcagaatgtatttgtgaatgcagggtacaaggatatttttgattggcaaggaaaaccagtacttgcagaggcaaacggactcgcacgtgaagttagcaacggaaggttagaaactatatatatgaactgcgtgaagctaaacggcggaggaaatacaggcgctttgggtggtttggtaaatgaaacctatatcggaaaagtttggttggaaggaattgatatcaacagtggacttagcgaagaagaacttggaagatttaatcttgtcggaggagcagtcggaagtttatcaggttataattccaaatttgaagattcctacgtagaaggtaagattattatggataataatcagcagggtggagttgccggacaagtaaaagcggcagttgtgagaaatgtgataagtaatgtggaagcgagatccaataaaccggattcgtggacagaaaaaagcggatttgtaggagatgttaatacaagtctccaatatgataatcgttggtatcttgacagatgtatttccataggaaattcaggaaacaattataagtttttaggcaaagatcttaaggctgttacaaaaaataatttgaatttatgttatgaagttacaggaaaaacaggaaggtctaacgttacagatgcaacgagtcaaagcggtacactgctgacaatagataatatcaataatgtagagttgtatcgtgatacgctttcttttaatgacaatacggcacaggcagatccgaatgcatgggatttcagttctgttgcggaaaaaggctatccgacgttaacatggctcttgacatatgatggcgcagcggctactatggtagagcagacacctgtacaagaccaggagcaggaagcaacgcaggatgaaaatcttgctgaaccggaagtaaacttaccggatcaggatgaatatttaaaagaagattaaaagaaatatagaaaattaagataaggagatatgaaagtgaaagagaaatacgaagctccgatgatggagatgatcgaattcaacagagaagaagtagttactatgtcaggtcaaggagatgagattccgaatgagaatttcgtagatagtaatgatacaggctgggctgattaattgagtctgatatgaaacattaagagatccccggcaggcgttgtcagcaggcgcgcctgccgggggtttttctgccttttactgtcttttgtcaggaaaaagcgtttgagaaaatagttgacaaaagcagtaactttgatacaatctgactatgggaatgaagttctcccttagtgatgaaactaaaaccgctgatttggctgatgacttctgcattttgacgcaggaattatcagcttttttattctataggaaatttgcattttccatagaataaaactcttccgaagaatgcacacgccgcaataaggaagtttaccgctttgcggcgtttcggaggtggcaaagcgtcaaagtgttcatgagtgaggagaggcggtggcgaagtggacttctttattttattccggtttgtcagagaaggaggatggggttatgctgatcagtattgccatgatgtttttagtcggtatgtctatggggtggatctgtaaaaagattcatctgccgagtttgttcggaatgattgtaacgggaattgtacttgggccatatgtattggacgtgatcgacgcttctattttgaatatttcatcggatctaagaaggatcgctcttattattattttaatgagagcgggattgtcattagatcttaatgatctgaaaaaggtgggacgtcctgctgttttaatgtgttttgttccggcatgttttgaaataggaggaatgatcttattagcgcctaagctgcttggaatttcgattttggatgccgctattatgggaacggtcattgccgcggtttctccggcagttattgtgccgaaaatgttgaaactgatggaggaaggatacggtgtaaagaagagcatccctcagatgattcttgcaggagcatcggttgacgatgtgtttgtgatcgtaatgtttacggcatttacaggattagcgcagggcgatcaagtttcggcagtggactttatcaatattccgatttcgattgcagtcggagctttagcaggatttcttatcggatttctctctgcagaatattttaaaaagattcatataagagatacttcaaaagttattattcttgtgtgtgtttcctttttgttagttacatttgaagatgaatttgcatctgtcattccattcgcatctttaatcgcggttatgacaatgggaattgctttgcagcagaagagaaaaaacgtggcgaagcgattgtcggcaaaattcaataaactttgggtcggcgcagaagtgatgcttttcgtacttgtcggagcaactgtggatatccggtatgcagtgtcggcgggagttgtatctattgttttgatttttgcggttttggtatttcggatgttgggagtattcttatgtttgctgaaaacgaagcttacaatgaaagaacggatgttttgcgtgatcgcgtatatgccgaaagccactgttcaggcagctatcggcggcgtaccgcttgcgatgggattgtcctgcggtaatattgtgctgacggttgcggtaactgcgattttgattacagcaccgctgggggcatttctgattgaagcgacttataaaaaatggttaggacgacagacagagatcctaagtagatgatataaaggaaataacagttcaatacatacctctgcagcttgcggcatacattgtaaaaacgatgtttacaggggaatattttgaaagattatatcgaagaaagagccgttgagattgcagcttatattatagataataatgcaacggtgcggcagacagcaaaacagtttgggatcagtaaaagtacggtacatatagatgtgacaaaaaggaatggaaaagattactgttaatgataatgtaattatgtttttattaatgctgtttaaagggacactgaggtccctttttagtgcaacctttaatcgttaaattgcaatgatttatcaatacttgcaatattatttagaattagtgaattaagtagcgtatctatgtcaagcatatttttatcaattaactgtattacatctttataaaaagaactgtgatttttaaacggtagcttcagttcttgtatagttgaatccaatactatttcattatgaagaatagataaaatagcatgaagaaatatttttttaatagtaatgtttttcattgatgtatctatatttttaatgcctatagcattaagtacatttttaatatccctaccctgcctaattacggtagcaatatgctcattaattaatttttgagttccagtttggatatctaatattccgtctcctacatcaggacaaaagataggtttgttttgctgtatagcaaagtctacattgtgcattgtaccgccttttgcatcacattcatatattacaatagcttttgacattccaacgatcagtctatttctgttaacaaatctaaatttatcagcttttgtatatacaggatattcagacattagtattccaccggtagaaagtattcgattagctaatgatttgttttctactggataaatagtatcaagcccatgagctaatacagcaacagtctttccaccagcagaaatacatgcttgatgggatagtttatctacaccacaggctaggcctgaaataatagaacaattattattaatccattgtggcacaagataatttaccgcattatacgaaagttttgtgggctttctagtcccaacacaagcaatggaatattgagaaatctcggaaaactctcctcctttataatagataattgctggtggattatttatttttgctaattcttgaggataatttgtgtcagtataaaaagttacttttatatttaaatttttgtttatctctaaaattgaatcagctttgagaagagcattatttatttgttctttatttgaaaagtattcttgatatatcattaattcaaggtgactttcaaatagtgaactatcataaaacatctttttaatgtaagtaatattgttttgtaaaagaaatattaaatcatggttttttagccctagttcgcttagggcaataatatatcgtatcattttatctcatctcattttttattaggaattaaatatattatatagtgcatctacttctatttttgcattatcattaatttcaaaattatttaatttctggcatgcttcaatttgaaaggtataagttgagccgaacacatctccaatgatagtatagtcattcttttgaaaaggagccttaaataaacctaatgaaacacatacaattttattagcaccgagtgtttcaaatagcgtccttacagaattaaatgtatttccatgtgtcatataatcatcgaaaatacatacattaaatctgttttctcttcttaacttatcaatcctctttttataatctggattaatacaaattgtagaaaactcttcatctccacccagatttgcacgttcttcaggtgaatggctgatatgtgcggtttttttttgtgtatggcgtagtaatagatttttttgcgtatttgtatactcttcaggatattttctttttacgggttgtattccctttaaacatctaatttgatccataaatgaatacaaatcttcgtttacattgcaattagatgacgggattattccaaacaactctatatcattaaaaacggctgaattggtcattccagctaaaaaatgatataaaagtatttgataataatttcggcttcttcctttttttagaagttcttgaaaatgtagtagcatttctctttcttcgttagtatttgcataagagctgtatcttgcatccataagagagtaacaagtagtaatagcatctacttccaacttggaataccatacattttgattgtttagtgtttgaataaactttctgagctgttttactgtgtttacgtgaataccatatttttgtgctttctcttcaagcggcaaccatgtgggtacaatatataaagaacgagtattaactgcgaggttgaagtcagcatttttgccacctacaaatacaaagtagttactcttatttttatacgatttaacaaaagtttcgattttttttctatctttaaataaaaaattagtatatccgtgagaatgaaaagcatctgcataatcttttaataaatcagtctttctactataaaaatagattttattgtccgattcttccgataattctttaaacttatgcatgaatatattacgtttattggtgaactgttcaaaatcgaaatcagaaaagtcatattcttcgtaatcattttcgtcaggtttattttttagcagatccaaattacaaaatataagtttttccatcaaaatccctcctttgtataaagtttactataattttgtattatgtggtatctaaaagatatttgatattagtttttttgcagttgttattaaatgattagaaatgatttcctataatagaatctaaatcttcggcaattccagaaaaatcctgatttaaattcaatgcacgcacggaaatctgatttccgctcatttggtatgtattattgggaataacattttcatcagtctgggcatagaggagcattccggaaacggtatgttccagctttcttaattcaaattccttatttttcacatatgtaaaaatctgatagaggttattggaatgcaaagtgtttgttccatattgctgctgagtcatatgtgaataatattttgcatcgataataagtatattgtttccctgagacaacataatatcagtttgcattttaggaagcaattggttctcagaatcatcaagttgccatgcgatctgtgatgcattggcagatagttctggatgttctttacgatagtattcaagcaaaaatttttcatataaacggcacatacgttgttcgtcaaaaaagtccattatttttgtggtaccatcgttctgtgtctgtagaagtccgttataaatcagataacagattccaattaacatttgataactttgattggaacgattatagtgttggttccaatttacaaaacgtaaatcaatttcattaacatcagaaaaaaacaataacagattccgtagactctttttacgcgtatttgtgatattggctttaagaagcaataacattgtagatttaataatttggttaaattgtgtattagttgaaaattcatcatatgtacaaatcatttgtttcttcagcagagtctgagttttaatggattcagaaatattaagctttccctgtagtgtagaaagagattctgattttggcacataatctcttcctaagccgcgttttaactgtacgctaatgcccttatcaagaatggctgcacataattcagcggtattatgaaatttttctgtagccagatctttgtaattttgtgcttgtaatgcttgaaaagcgtaggacaacatataataaatattttgtacaggaatcatttaacagcactccttagtcgatcagaccagtctacgatttttgcgggctcatcaaaccaatattcttttaaaagtggaatcaattcatattctacaatggatgataaagtttgggtgttggcagattctggtgttaaaccacaaaagtagctgtgaccaatacagaatccttcacctagtgatatatcttctactatcttggaattgagttgtttcacacaagcaattaatttgttaaaggcatcactttttagagaatcttggtaaacttgaaaaccaggcgtattaaaacccggtttcatagtaaaaaatgaaaaacgtcgtcttaaagcataatctaacatggcaaggctgcgatcagcagtattcatcataccaataatgtatacatttgcaggcacagagaaattctcgtcagaatacaacaattgcagttcaataccacgcttatccttttcaatcagcataaataattcaccgaatattttacttaaattaccacgattgatttcatcaatgataaaaaaataatcattttcatcatcatcttcagccagtttgcaaaatttgtaaaaagagccctttttaatggtgaacccattttcagttggccggtatccttcaataaaatcttcatatgagtagctctgatggaactggatcatttgaacacgatcaggattttttgcaccgataatggaataagcaagtcgtttggcagtaaaagtttttccaactccaggtgcgccttgtaaaataatatttttcttcatttttaaaacatttaccaatgttttataatcttgttcattcatatacacatctgagagaaaatctgcagaagagtaagctggatagtctatttccggttgtgtatctacatcatctaattcctctggagcaaagatggcggtaagtttttcaatataatctgtgtatggagtaatatcagttaaacgttttgcaaccgcattaccaggatgcgcccattcaccaacttgaagccactttacagcgcggacatttttgtattcctgacgaagagcatcaaaaacataaccgcctgtaacaatacccttaccaacaagtgtattactgcgttttgcaaaaatcacatcattaacggctactgtatttgcaaaattccatgccattaaagcctgatttttgcgggatgtactgttgtcatatacagttatcagttcttgacgaagtgcttccttagaaggatattgagaataatcaccgatgtcatccatgcccaaaaccataaatcctttttggtaacattcattccaactgttatcatcgaagacagtatacatccagtagtgctttttatgtttttcgtcagaaagaacattagtattagagtggtcagaatccttcaagtctgctacattctttccgtaaatatgtccgaacactatgcctgggatgttacatttttggataaatagagcaatttgtcccatgcgaataaaaggaatatcactaggtttttgatttagaaaatgtaatactttcagttgtatatcttgaccgtaaaaaggggcaagtaaggtaggaaacaacaggtgataatatttcattctccatacagtattaattccagaaatatgttctagttgtttataaaggcgttcataatctgacaaagattctaaagaaccaaaagatgatattatttcggcaccttttaccagatcatcacgtatttctttggctttaagtattgcttcatcttcagtaagtaaaaccggttttaatggagaaccagaggtccagttttgagtttttttatgataaaataacccaaacttataggcagatccacctgaaatacctccaaacaagtggagatttttatccatttccagcatatagcagagattagttttatttccttcatcgttatagaataaagaagttaatagttctcttcctgaaagagatttcagtttcgctaccccaaaaagatttataaaattttctcgtaattcatcagctttatgagcaagagaaatacattctggtatttgagcttcattataaaaccagtcaggagaatattttcctgattcattttctgttatctgaatattcgacataatatacctccgaatttataaactaggattagtatatcatttaactgtagcactgtcatagattatcgaaaaatagaattatattgatattaaaagagaagagcaagatccacccgggtaataccgtatcgtaataatcgtagataatattcgaaaattaagaatattatattagctgcattgaaaatgtaagcatgtaaaaattaaatatttttttacagagcatctggcagaagccgggtgcttttttaaaattttgaaagaaaatattatgtaaatggtgcggaaatctttgatggaagctaattagatgaagatgaaattgaatcaagaggatgaaaataaaacattcatcaaaaataaacttgttaaacataggtggagcttgctcttgcataaaaattcagattaaaaagaagaaagaattaacaaagagcgaaattcactagggacgatagtatcttaattggttctctgtttatctttaagattatggggaattttgggatgttcagtaatgaaattatgaaaaaaataaaaaaattttgatgagggggctgtattttatgccctctccctttgtatatatagagggataaattttggtggatattaaattcaaaaatatatttcctcaaatattgagaaggtgaggaagaaacaaatgaaatatttgtacatggatgagcaggagtggcagatacagtattatcaatttccaaaatttttgctggaattacagctaaatcagaatgcaagaaaagaatttatgacagaattctggagagatgtattccggtaaagattgatggagtcagcagacgagaagccatggaaaatgacaatatgcagactatgaaaaacattctgaaaatctaggactatttcaaaagaaattttcatagtaatggacaaagagtgagcagggaggaggtggaaacttcaccgtggcgaaaagaaaactgaactatcgatttcataatccaaatccggtggaagtgaccgccgattacatattgaaagtgatgatagaagcgaatactgagaaggtggagaaaatattgcaggagaatatggtgcaggtggaagtaaatgaatgtgaatcggaataaagcggatagatgaggaatggatagaaagtcattaacatgaagtctaaggtgtataattttgtcgaaaattgctgaaatgtaaattataatataaaatatgagattttatctcataaaactattgccaaaacaaaaaaacggaatataataaggatataggcaagaagtttggactaatggaggtaaataagatgttatgccaatttacagtgaaaaattttaagagtatacgagatgaggtaacatttgacatgcaggctgccgtcatttctgagcatgaagacagaattataaaagatgtagatgaggaattatatttaccggtatctgctgtatacggaccaaatggtggaggaaaatctaatgtccttgaagcattgcatagtctggtaacgaaaatactgaggccattatatgcgacaagtaataacgaagagatcgcgatgaaaatgaaaaagcttgtgatagagccatttgcttttgatgagggaacaagaaatgagccaacagaatttgaactgttttttagaacaacaatggcagagtatcgttatgaattaactgtaaaaaaagaagtaatcgaatacgaaaggctggatcgtataaaattagaaacagggcggaaatcagcactttttgaacgagatgaagatgaaattactttgaaaggtgcatttgcaagattgaaaaccagtgatgaattatccgatacattgccgttgttatcgtatcttggaattacttacagcaaaaatgaagtggtacaggatgtgcttgactggtttgatgaagagattgatttcctgaattatggaaatcctatgcaggaattacgaatggctatttctaagtcagaggatgtaaaaagactgatgcttcagatgattcaggagatggatttggatattgtagatttccgtgtagaagaaaaggagaatgaccggatcgaagtatttacaaaacacgtagtagatgaatatgaagcagaattgaatttatttgatgaatccagtggaacaaagaaattatttggattgctcccatttattgcaaaaagtttattgagaggaacgacacttgtgattgatgaattggatgcaaagatacatccggtattacttaaataccttattatgactttcagtaatatggaaaaaaataaaaagggtgcacagttgatttttacatcacatgatctgtctactatgaacagtgaagtattcagaagagatgaaatctggtttgtagcaaaaggaaaccgtcagaactcaaaattatattctcttgtagaatttaaaaataagaaaggtgaatctatacgaaaggatgccaagttcgataaacagtatctggaagggaaatatggtgcagatccatacctcagaaagattatagattgggggacggtgaatggctaaaagaggcagaaaagagaaagacaactggaagaagaaacgtcggcaggaatatctggagaagaaagaattccgctactacattttctgcgagggacaagcaacggaacctaaatattttcaaggattcaaacggtatattgaagataatcccatttatcgagatatggttttgattgaaattgaaggctgccaggctgagacgatgcgggtaatcggaaaggctgaagagtatgtacgtgaaaataagattacgaaagggcagatatggtgtgtctatgataaagacagctttccatccagtgatgtcaatggagtagtccagcgggcagaagtattaaatcaaaagaatccggatattcagtatcatgcggcgtggagtaacgagtgtatcgaattctggttcatgttacattttgcatattacacagcgaataatcacagatccgagtataagaagtttatgaatgagaaatttcaagaacttggaattgggaagtatgagaagaatatggataacatatttgagacgctgatgaatggtggaaatccgaagctggcaattcggtatgcgaaacggattattaaaaacggagagggaaaaacaccggcggagatagcacctggaacgaaggtgtatgagttggtagaggaactggtgaagtatttgccggaggaacagaaaaaatgttttatgtaataatacatacggaggaagaattatgaagttggtaagatattgtgtgatgaattttagatctgtgaaaaatagtggttggatagattgcgatgatgttacaactttagttggtgtaaatgagtctggaaaatcaaatttgttattagctttgtggaaactcaatcctgccagaggtggagagatagacattttgcatgatatgcctgtttcagaattaagcacactaagaaacagaaaaaatgaagtaaagtttataagtgcagaatttgaaatggaaaaggattgtgctgaagtaatatcaaaaaatacagggtataaatgcgaagaaggaatgagggtgatagtgtctcgcttttatgatggaagatatgaaattgattttccagatggggatcctgaggtgatgatatgtgctgaaaaggagacggaacaagagatagaagaaatagaatcgaaagaggaattagaaaatgaagaaaataatcaagaacttatggatttgattttagaaaaaattcctaagtttgtatactattcaaattatggaaacttatcttccaagatttatttgccaaatgttataaagtggcttaatggtcagcaaatacaaggaatagaaatcaatgaggagcaagtaagaactttaaaagtccttttcgaatttgtaaacttaaatccagaggagatattagaattagggcaagatcccaaaatgactgcaataaaaaggaataatagtataagctcaaatccaactttgaaagaaatagaaaaggctgaaaatgataaagaagaaagaagtattttgttacaatcagcatcaaggaatctaacaacaaagtttgcagactggtggaagcagggagaatataggtttagatttgaagctgatggtgattattttagaatttgggtatcagatgaagtacggaaagatgaggttggacttgaattaagaagtacaggtcttcaatggtttttgagcttttatcttatttttttggttgaaagccaggaaaatcataaagacgcaattttattattagatgaggctggcttaactttgcatccattggcgcaaaaagatttagctcaattttttgtgggattatcagaaaataatcaaattattaatacaacccactcaccatttattattgatacaagtaatattgatagatgtagagtggtttatgttgataaaggaggatttacggtttgttcaagcgatttaagacaaggtgcggatacattaaacgaaaagtcgatttatgctgtgcatgcagccatgggattgagtgtgtcggatatattattgcaaggctgttagccaattattgtagaaggaccatcggatcaaatatattttaatgcaattaagaatattttaattcagaaaaagttaattgcaccaaaatatgagcttgtatttattccatccggaggtgtaagaggagttccgggaattgttagtatattgtgtggaaaaacagagaagttaccttttgttattttagattcggataagagtggtaatgatgcaaagaagaaattacagtctggtttatataaagagtgtcctgaccgcatattagaaataaaaaaatataaggatatagagaatgcagaggttgaagatttaattccttttagattaatagaaagaggaattaatcggatatttcatgacttggaagatatgtattttgaggatgaatatgaagagaagagtgcgatagtaccgcaaatagaagagttcgcttcaaagaataatgtagcattagaaaaggggtggaaagttgaagtggcaagaaatatgaaacatatgttgaaaaataaaaatataatgcaagagataaaagatgaagatatggaaatctggaagaaaatatttatagattttgataaatagtgtaaaaattgagacaataataaactgtgtaaaaatgaggtttattattgtcttttttatgatataataaaagatgtaacagaacgatacaactataacagagaggtagcgttatgaacatagcagcctattgccgagtctccaccgacaaagctgatcagctcaacagtctggaagcccaaaaggaattcttttcagaatataccaagcgcacaggggacactttagtaagattatatgcagatgagggcatttctggaactaaaattaaaaatcgtaaagaatttcttcgcatgatgtctgatgcagagcatggattgtttgatatggtcgttgtaaaagacatctctcgttttgccagaaacacagtggatcttttacagaatgtccgtaagctgaaatcattgggaattgaaacacagttcttaacagccaatatgactagcatgggaaatagcgagtttgttcttaccatctttggggctctggcacaggaagaaagcgcgaatacttccaaacgtgtaaagtttggtaagaagatgaatgcagaaaaaggacgagttccgaatattgtatatggatatgacaaaacaatcggagattattttaatcttgcaattaataaagaagaatctaaagttgtacagcagatttacaagtggtacacagaagaaggctacggtgctgccaagattgcaaatatgttaaatgaaaaaggatataagacaaaacgaaattgcaaatggagtcagaatgcaacgtgccgtattttaacaaatgaaatatatactggaaaaattattaatggcaagcaagaagtcagtgatttcttgacaggtcagagaagagacaaggacgagacagaatggatggttgtggaacggccggaacttcgaatcatagaagatgagacatttgaaaaagcacaagagattttaagaggcagacatgatgcatttaatcttagtcacgaacggcagagtaataagcatctgttttcgacattgatcaaatgtaaagaatgtggctggtccttccgtagaacggttcgtacttataagaacacgtatgtacggtgggtatgctcggggcgaaatggccggggcgtagatagctgcccaaataaaacggttgtggacgaggaagaacttattgaagttttgcaggaatattttacaaatgtattgaaacaaaagaaaaaagtgattgctcatgtggtaaat

SEQ ID NO: 7617 - DNA, 88022 bp, Unknown
  gut microbiota DNA sequence
attataaccagtttcccatgagacctctggggtggaaatcaccacaaactgttctgagggaatttattgatcggggtgtaacatatgtttgacaaacctacactcttaaatcgtttaaaattttaaagatcatcgatcaatgctgttgatttcgcataagccgtcgagcgtgcttcaaagaaatccgtcttcaccatattggcgtttgaatactgagatacccatttcattgtctccggctctctttcacatcccgggtatatcggggcatatccaaggcttttccatctcagattgccgagataacggatataatctgttatcatcttttcgttcaatcccggcacttcatttccgatcacataacatgcccattcgatttcctggcgaaccgcttccataagcagttctttcatctctgacaccatatgatcgtcaaacagctccggatgttctttgcgaagttcgatgataatattacggaaaagccataaatgcgtattctcatctctgttaatataccggatctcctgagcagatcccggcatttttccgttcctggacaaattatagaaaaacataaaaccggaaaagaaatagatcccttccagaacaaaatttgccatcatcactttcactaaagtccgcgcatctttttttacctgaaattcattatagcattcccctataaatgtattccttttcaacagatgttcgtctgttttccactggtataaaatatccattctttcatcaggcgagcagatcgtatcaagcatataagaatatgactgtgaatgtacacattcctgaaacgtctgaatgttcagacagagattcacttcatttgccgtaatatattctccgacgcagggcagatttgccgtctgaatcgaatcaagaaatacgagaaaggacaaaattttatcataggctttccgctccgccggcgatagattcgggtaatcttttatatcctgcgacaagttgatttcctccggtatccagaaattattcattgcctgacgataccattcggatgcccatgtatatttcaaattattataatcatttaaattagttgtattcccgccgatcatgcggcgtttcagtacgtccgtatctccgtccggattaaaaagcggtttgtgcggaagcggtttttttatatcaaattgctgcatagtcgtctcctttttctttttgccggcagcaaaaagcgacttcttgttttctaggaagaacaagactcacactcttctacttccagcgattttgaccttacatagtatactgtttttacgccgcattcccatgcctttaaatacaggttaagcacttggcgcattgtataatcgtttgttatataaaaattcatcgactgagcctgatccacatgtctttgtctgactccgcatgcgcgtacagaccaattctgatcaatatgatgtgcgtttatgtaataccaatacgtctccgggctaagatcaggcgcaactctgggaagcatagatccctttttctcttccaggaaatacttgttcataaccggatcgatccccgctgtcgttcccgcgataatggaagtggaacttgtcggcgcgatcgccaaaagatatgcgtttctcattccctgtctgtgtactttttcccttagctccttccactcatccgagcagtatccccgcttttcaaaataggctccgctctcccagtccgatccttcaaaatatcggtaagaacctttttctttcgcataatcactgcttgcttcaatggccgcataattaatctgctcaaacaatttatcaacaaacgccaaatgttcttccgactgccatttgatcttatttttcgcaagcatatggtgatatccgcttaccccaagacctatagatcgatatgtatggtttgtgatctttgcgtagggaacaggataaaaattcagatcgatcacgttgtcaagcgccctgacaaccgtacgcacaactttacggacatatgcaggatcatttaccggaaggttaccaagtgacaaagacgccaaattacagacgacaaactctcctgcttttgttgtattgacgactactgtgtctttgtcttctgtctgtatttttgtttcaaccgtagaaatcgcggacatattctgcgcaatttccgtacaaagattagaacaataaatcattcctttgtgagggtttggattcgcacggttcactgtatctctgttaaatgcaaacggagttccggtctccgccgctgatttgatgatcagacggatcagatctttcaaaagaactgtccttttcttaattcttgcatcatgaacacaatcccaatagcggcgctcccattcttctccgaaactatcttccaaacaatatccttttaccgtcatgatctcatgcgggcacatcagataccagtcctgatccaggttttctcctgccattttccagaacagatccggataacagactgccggaaatacatcgtgcgctttcattctctcatcgccgttatttgtccgaagctgaaggaattccggcaagtctctgtgccatgcatcgagatataccgcgaccgctcccgctcttaccccaagctgatctaccgcaaccgcagtatcattcacgatgcggacccagcgtatcactccgcctgccgccccttcaaatcctcgtatcatacttcccgatgcacgtactttcccgaaatacaaccccattccgccgccgtatttgcttaccatggcaaaattatcaatcgaccggaaaattcctttcaaactgtcgggaacagtgtcaataaaacaagaactaagctgatgaaacggctttcttgcatttgccagagtcggagtcgccattgtcacttctaatttagagagcatatcgtaaaactctctcacccacataagtctgatctttcttttctcattcatcgcaagatgaagggcaatccctaagaacatctcctgcggactctccagcggaacatgccgatgtgttgagatcacatatctctttatgagaagatccaatcccgaatagttaaacagcctgtttctttctttgcatatataactctccgcttctacgatctcttcttttgagtaattttccatgatataagaaccgtacagtcctttttctgtcaggtaaacaatcttttcatacagatctgaaatcccgatcgatttctcttcttctttcaatttttccgaaaagcgaaaatcaagcagccatcctgcgatcatttcccaacgcggcgcttcctgacttgtaagttccgccgccgctttgatcagcgcgtcgaatctttccccatcgtccatatccgttttcaaaaatcccgaaaatttctcaaaaagaagttccaatgaataaactttttccggaaattctgtgtgtatgtcatataaaagcttttccaaccgttcttgaaactgcaaagtacggcacacaaagctgtctgttatcaaagtcattccttttttctcaaatgtttctgtcatcaattcctccttttttcttcctgtatcttttcctcattttcatgaagacctaaaacgccttctacaagaatctcaacatcattaaatatataatcaaatgctcctgcctgacacatattgatcaaaaccattccgaccggcactgacaagatcatccagagtaatcctcctgctttatagcctacatacaaaagcagcagggtaacaagcggattcagtccgacactgtcgccaaccattttcggctgaaggagctgtcttacaacctgtgtgatcacatagaggacgaccaaagataccgtcatcttgtaatcacccataaaaaactgatacacagcccacggtatcatcgctgttccggttccgaaaaacggaaggaaatcaagaaatgagatcaaaaatgccacaagaacaaaatatccgatgcccataaatccaagtcctgccgctaaaatcaaaaatacgactcccataatcttaaactgcgctttaaaatatccgcctaatgcatatttcaaattatccgaaacaagagtcatcctcttttgaaccgatacaggcgcaacttttttcagccatgcaagcacatcttccctctgaacaatgaaaaaatatgccgacataatagctacgacaaacgaaacaagataatacggaactctttttgcaatatttcctgcggcagatacagtcggttcactgattcccgatacaacttttcccatatattgatcaagattcgacgcaactgtgttccatccgttctgcacaacctcgggaagcctatcgaatactcccgaaagagtatctccgatctgactcaacccgctttccagttgtgcatatatcgacggaaaatctctgactaagctggcgacttccagaatgagccggctgatgccaagatagagtataccgacgattcctccgagaacgaggataacgatcaacgccgaaccaagctttttcactatacgcagccgcttttccagccagtttacaagcggagccgccactgcggaaataatccatccgatcacaaacggcataagaaacccgatcgcttttattccgatgatcacaaatgcagccgtcgctgccagactaaaaagcagccgtatgccgacctgccaataaggacgtttattctccatcctgcgcctccacattaaaacattccgcttcaatcagttcccatatatcctcttttccctgtttcgacaccgaggaaaaaggtatcacttttgttcccggaacaagatccagaccttgtttaagcatttttacatgtttttgtatctgacttctcttaatcttgtcaagctttgtcgcaatgataatcggatgataaccttgctctacgatccattgatacatcattctgtcgttcgccgacggatcatgtctgatatcaatcagaagaaatactgcttttaactgcttggaactgtgcagataacgctcgatcatccgcccccactgctctttttctttttccgaaacacgggcatatccatatcccggaagatcgacaaggtacatttcatcatttatattataaaaattgatcgtctgtgttttccccggtgtcgccgaaatacgagcgtaagattttctattcatcaaagcattgatcaaggaagattttcctacgtttgattttccggcaaatgcgacttccggcttgtcattttccggcagcgtactcgtaattccgcacactgtttcgagattaatatttttgattaccataatgaacttcctttcattttcgttttctgcccatagccgccttcagcacttcatccatgctctctacaaacagaatttccattccttttgtaatctccgccgaaagttcttctacgtccgcctgatttgctttcggaacgagcaccgtttttatcccggcgctctttgcagccagaagcttttctttcaaaccgccgataggcagcacgcgccctctcagcgtcacttctccggtcatagccaaatctgccctgactttcttttctgtaattgccgagagcatcgccactgccattgttattcctgccgacggtccgtctttaggtactgcgccttcgggaatatgcacatgaatgtcatgtttttcaaaaaaatccggcgaaatggcatattttttacttaccgaacggatataactgatccccgtcctggcagattctttcatcacatctccgagctgccccgtaagcataagttctccttttcccggcattacattgacttcgatctgaagcgtatcgcctccgacgcttgtccatgcaagtccccggacaattcctacttccgcagcgatatttgccatctgataagtatacttctcttttccgagaaaacgatggatatttcggtctgtcactgcaattttttttcgttctgtcgtaaagatttcttttgcagcctttctgcacacatttccgatctctcgttcaagctggcgcactccggcttctttcgtataatttcttgctatcttccagattgaatgtttactgaacgtaatctgcttcggagtcagaccatgcttctctatctgtttcggaatcaaatgctcctcggcaatatggagtttttcattttccgtgtaactgctgatttcgatcacttccatacgatcaagcagcggacgcggaatcgtctgcagcgtatttgccgtcgtaataaaaagcacttccgacagatcaagcggaacttccagataatgatctctgaacttatgattctgttcgttgtccaacacttccaaaagagccgaaaacgtatctcctttatagtctgtactcactttgtcgatttcatccaaaagcatgacgggattttttactcccgcagtccgaagtccgttagcgatccgccccggcattgctccgacatatgttcttctgtgtcctcgtatttccgcttcatctctgactccgcctaaagaaatgcggacatatttccttttcaaagaccgtgcaagcgattttgcgatcgatgtttttcccgtacccggcggtcccacaagacaaagtatcggactttctcctttttttgtaagcgcacgtactgccagaaattccaagattctctctttcacctgttcaagcccataatgatcttcttccagtaccatgccggcatattccagatcattatgatcctgcgtagagcggtcccacggcatctcaagcagagtttctatatatgtgcggatcacaccgctctccgccggtgaattcaaagaacttttaaatctcccgatttcctttttcagcttttcttttacttcttccggcgcttttaactttttcagttctttttcaaattcttctgcgtcagatgcggtcgattcctctccgagttcttccctgatcagttttaactgctcgcgcaaaatatattctctttgatgcttatcgactctttcttttactttccgctgtatctcttctttgatatcgatgatctgcacttcattcacaagtttaaacgctagtttttcgtatcgtttcagcagatccgtctcattcaatatatcttgctgatctgtgtaataaagaggaatattcgccgcaatctcatctaccagtttccgcaggcctttcatctcgactaactgggaaacagcttctttagacatctttccgttttttgccgcgtaactgacaaacatatctttcagtccccgctccatagcttctgtatttacatcttccggaagaatctcttcagaatcatcaagaagttctacatttgcccgtaagtacagatctgtatattcaatctcttttagtcttccccgcatttcgccggatacaagcacacgcacaatatgcttcggcagtttaatgatctgtttgatcgttcctaccgtgccgatctcgtatacgtcctccatcttaggatcctctgtgtcgatcgatttttgtgcagtcaagaaaatcttttgttcttccgccatcgcttcttgtatcgcagcaaccgaccgttcacggcttacatcaaaatgaacaaccatttcaggcataatagtcatcccacgcaaagctaccatcggcaggctttttatcgtattttccatgttgtaacctcctgctgtatctcatcgcgcagatcttttcctgcgctgtcttatatttttcggacattttatcgtatacatagtaacaatcgccggaagtgacaaaaggcacgttccgggattgtaagcagtcgccaaggtctctggcaagccaggactttggctcgtcgctgttgcaaaaagcgggtgtgatgcccccatcacacccgttttacacagttcccttttatacagttatcgatgttctgtatatttgttcgcagctatgcgctctgcgatgtcaaaaaagatcttcgctcttctccgtctcgaagatacagcggctcaccttttccttctaccacatctcttgtgatcctgcattctttaatcgtctcatcagaaggaacctgatacatcgtatccatcatgatcttttccatgatcgcacggagtccgcgggcgcctgtctttcttttcagcgtcgtttcagccactgcgataagagcgtcccgatcaaattccagttttactccgtccagctcaagaagcttctgatactgttttacgatcgcactcttcggctctgtcaaaatgcggatcaacgcatccttatcaagcaggtcaagcgtaaccgtcaccggaagtcttccgatcagctccggaatcagtccgaacttcacaagatcctgcggaagcacttcctgtaaaagtacatccatatcatactcatgcttttccgcgatttctgcattgaaaccgatcgacttcctgtcaagacgagtctcgataatcttgtcgattccttcaaatgcgcctccgcatataaaaagaatattcgttgtgtcaatctgaatcagctcctgatgaggatgtttccttccgccctgcggaggaactgatgcaaccgttccttctatgatcttcaataaagcctgctgtacaccttctcctgagacatctcgggtgatcgatggattttctgactttcttgtgatcttatcaatctcatcaatataaataatgccgtgctctgctctctcaatatccccatctgccgcctgaataatcttcaaaaggatattttccacatcttcgcccacatatcctgcctctgtaagcgccgtcgcatccgcaatcgcaaaaggcacgttcagcactttcgcaagtgtctgggccagaagcgttttcccgcagcctgtcggaccaagcattaaaatattgcttttttgcagctctaccccgagatcctgttctgccataattcttttgtaatggttataaactgccactgaaagtactttttttgcctcatcctgtccgatcacataatcatcaagaaaagctttcatctcttccggtgtcaaaagattaatatcatcaaacaattctctttcgttataatctaattcctcttctatgatctcagaacagattccgatacactcgtcgcaaatatatgtgccgttcggacctgcgatcagctttcttacctgcgcctgcgttttattacaaaaggaacatctgacgatatcgtctgtcggttttcctgccatattctttcacctcaaagccaaattaatgttttgcgatcacctcgtcgatcaaaccgtacgcctttgcctcatcggcagacataaaattgtcacgctctgtatctgccttgatcgtctcaagtgattgtcctgtatttgcagccaatatttcattcaatttctgtttcgtacgcagaatgtgttctgccgcgatctggatctctgtcgcctgtccctgcgctccgcctgacggctgatggatcataatctccgcattcgggagggcaaaacgcttgcctttctttccgcctgcaagaaggaacgctcccatacttgccgccattccgatacatactgtagatacgtcacatttgatatactgcattgtatcataaattgccattcctgccgtcacagaccctcccgggctgttgatataaagctggatgtctttgtccggatcatccgcctcaaggaataaaagctgcgccacgatcacacttgcggacacatcgtttacttcctctccgagaaagatgattctctctttcaaaagtcttgagtaaatatcatacgagcgctctccgcggctcgtctgctcgatgacataaggtactaaactcatggtcaatactcctttcaatctgtcagccttctttggcacttataatattgtttgtataaacgccgttttcaacggccgttctacaggccaaactgctgcatatacatatttttttgaaaaaggtgcgccatacagcacacctttgtatcttgcttaaccttctactgcggcatttgcgatcagggtaactgcttcttggatcgcaatgtcttctttcatctgtttcttttcgttttcgcccatgtattctttaagcttatcaacttccatcttataggaatccgccatcttctgaagttcctcatcaagacgctcctcggaaacttcgatattctccgctgcaacgatcgcctcaagagtcagtcttgtgcggatacgtttctctgcctccggcttaaactcttccatcatcttttcttccgaaagacctgtaaactggaagtactgttccatcgtcataccctgctgcataatgcggcgagcgaaatcgtctaccatctgtcttgactggaagctgatcatagcttccggaatatccatctctgcattggcaactgcctgctctacagactggtcttctctcttttgctttccttcgttttctttgcgctctttgatcttcgcttttacttctgccttatatgcgtcaacagtctcgctcttctcagatacgtcggatacaaactcatcatcgagttccggaagttcttttgccttgattgaatgcactgtacatttgaatacggcagcttttccggcaagttctttcgcctgatactcttcagggaatgtcacattgatctctttttcttcgtcaatgtttgctccgatcaactgatcttcaaatcccggaataaacgctccggatccgatcgtcaacggataatcggaagcttttccgccttcaaaagcaactccgtcgacaaaaccttcaaagtcaagcgtgatctgatctttatcctgaaccgctctgtcagttacatcgatcgttcttgcattgcgttcacgctctttgtcgatctcctcatctacttctttctgtgtaactcttgtagaaactttatcaactttcagacctttatattcaccgagttttacttccggttttacagccacctctgccgtaaagataaattctttacctttctcaagctgtgtgatctcgatcttcggctgtgacacaagctcaagctcacactcgtcatatgctttcgcatacgcttctgagatcatgcggtttgccgcctcatcatagaacacttccggtccgtacatcttttcgatcatctgacgcggaactcttcctttacggaatcccggaagactgatcttgccgcgctctttcagataagctgcctgaagcgctttttccacttcctctgccggtacttcgatcgttaattttgccatattatgttctaatctttctacctgtaaactcatttttttcctccttgaatgtgctgacttcaaaactgcctcttcgtcatatcgcacttataaaaaaatatacactcgcagtcattgtcatagtatagcatacacatccgcatatttccagtattttttcgtccaagttcagacatacatgaaacacacgggaaaaatatttttgcagactgtctatgcatatacgatagattccgcgatctcgttcgctttttctgttccgcagagcagttctgtcaatttcaaagcaaatggaatcgccgctcccatccctcttcctgtcgtaacatgtccgtctgtaaccgccgcctcgtgcacgacctgtgcacagtcaagtccttcttcaaaagacggatatgcacatgcttttcttcctttcaaaataccaagttcgctcaaaatactcggagctgcgcaaattgccgcaagatactttttcttcttatcgaattcaccgatcagattccgaaggccttcatgctctttcagattcagcgttcccggcattccgcccggaagtacgagcatatccccatccgaaaaatccgtctcctcaaacagccgatccgcttccacaatgattttgtgtgccccgttaatctgtttctgtccggtaatcgagatcgtctccacatcgatcttagccctgcgcataatatcaacaaccgtcaatccttcaatttcttcaaatccgtccgccaaaaaaatgtatactttcaaattactacctccgtattttactttttctttcttttccgcattcgctctgctataatcattatagcttaaaatcagcggcgaattcaactcaaagcattgctccttgcatagtttttacaggtaaaaccggctcatcgccgctgcaataaaatttatgccgcaaaaatgcggcggaatggagaatatttatggaaatcgaacgaaaatttcttgtagatctttccgatcttccgtttgatccgaaagattatccggccagaaagatcgagcaggcttatctatgtactgccccggtcgtccgtatccgaagagataatgacgattttttccttacttacaaatcaaaaggaatgatggtaagagaagagtacaaccttcctctcacaaaagaaagttactatcacctcctgttaaaagccgacggaaggatcattacgaaaacccgctatgtcatccctatcgaaaacggcctttttgttgaactggacatttttgaaggcgaccttgcccctctcgttctcgctgagatcgaatttcccgatgaagcgtttgccaaagcttatcaggctccttcatggctcaaagaagacgtaacctactcttccgaatatcacaacagcaccctcagcaaaaaagattgaaacaggaaactcatcggcttcagacaatgggcagttcacccttgtcttttgatttttcaagttactatcgttatattatttttattttcttcatggacatgcgttctctgtcgtgatactatattacagtaaatcgtttctgcatctgctctttttagttagatgtacgcatacgatcaccgtatttacacggcagcttacagtttaatccggaggaataagtatcatgggactttgcaacaacagaattgtagtaaaagtgggaacatccacattgacaaacgacgcgggaaaaagtgatcttcgcgccatcgaccgccttgtctgcacacttgccgacatccagaatatgggatatgaggtcatccttgtatcgtcgggagcgatcgcagtcggccgtaacaagctgaatatgcacgaaaagccggacagcatgcgtatgaaacaggctgccgcagcagtcggacaatgcagtctgatgtatttatatgataaatttttcggagattatgataaaacagtcgctcagatccttctcaatgcagaagatatcgagcaggaagaaaagaaagaaaacttaacgaacacatttgacgccctgcttgaaatgggagtcattccgatcgtaaacgaaaacgattccgtaagttataaggaaattgaatccgaagacagacttttcggcgacaacgatatgctttcttctgtcgtatccgttctctgccgcgctaagcgacttgtcattttttctgatatcgacggtttttatgacagcgacccccgccttcacccgaacgcgaaactgatcaaagagatccgtcagatcgatgaaagcgtctattctctcgcaggcggcgcaggatcaagacgcggaacaggcggtatgaggacaaaacttcaggctgccgaacttgccgcttcacagggcatcgatacgatcgtgacgaacggaaaacaccctgaagctttgtacgatatcgtaaacggaaaacaggcgggaactttatttgtcggaaataaggactgcctgtaataaagatatctatgacatctatacaaagaaagcagtttcccgaattcaggtttttatattttcaaaacctctatcggaaaactgcttttttcttttcctcagttatctacttcaactctgcctcttttataaagctttgtaattcttcgctgtcttttaaaaatttcatctcttcatctgtttcgatcgattgaacgagcgctttttgtaactgcgaaccaaacgacttatcaacttctttcgtctgaatatgacgatacaaaggcgaactgttaatatcccattttttcgtaagtgatctcagcatcggcaaaagtatctttaccgccttcgctctttttttcgtagccacataaagctgaaactgtgcaccgtaagaattatattcccacagatcaaatacctgcgccgcctgcttgtcgatatccgcaatatattccgcgtcttccatccgcttttctttcaatgcgatctccattaacgtcatcagcgccccgtgaatttcggttgtggcagacaaaagcttttcttctgtcagctttgccgctttttctaactctccctgcgcaatgtacaaatttgcctgaagctgttctctgtcgagcaccctcttttttgaaatcgtatccaacactttctgggcctgttcataatcctgtttttccatcaatttagagatcagatacgcctgcgcctgttctctgatatcaatccggtcactttgcattacccgttgaaataaagcttcgatttcctcttcgtatttttcatatgaatcaattctgtttccttgaaacaacagcaggccgtttagcagcatcgccacgttaccgatcagcagatcacaggtagggtattctttaattttcccgatcgcaagagaatatcccgcttcaaagccgtctttttttgccgcttcagacacttcattcaaaaacagcgcaacttctttctccgacagatcatcctgaaaagacagcaaggtgttcagatccgtatcaagaagcctggcaagcgccggaagcaagactatgtcgggacacgacgttcctttctcccatttattgacagccggagccgtcaccccaagataattcgcaatctgctcttgtgtaaatccttttgccagacggcgttcttttataatttcattgattcgcataataataggcacctctcttgtctaagctcaaatacatgtctaaatcaaatataacatctcttcttcacttatacaattaaggcgccgttaatttatccttatgtttttttaactgccggtataccgaaataactttcccagcctttatattttgtatgatatccgtgattctcttttggtattaaatcattcttttcatctacacgccccgctctacctttggctgccacatgacaatctcattctgaccaagactttttttcacatcgatgactctttgattcgatgaacctctgaacacaagacggatatcttttaacgcctctacaaactctccgtccacaagcacatctagcatagagagcatttcatctgtgtattcacatcttgcgcggctgtcatttaaaagctgctcatcatacaaataccctgtataacaccatatatttttttcaggatagctctctcttacttttcggagaagtccgacaagcgtcttttgattctccggctcaaacggttcgccgccaagtaatgtcaatccattaatataacttggcgagagcgcctccaaaatctctttttccgtctgatctgtatattcgcttccgtatttaaaattccaagtatctgcattgaaacatcccggacaatgatgcgtacaccctgaaacaaacaaagatactcttacgccctcaccgtttgcaatatcacacttttttatttcgccgtaatacacctgaattcacacctttcctctatactctcttatccgtttgatctatatatgcaatgaatcaccggaagtgccaaaaggtacattccgggattgtaatcggtcgccgttaaaaaaacaggataccaagcagggcatcctgtttcttttgattcatttatccctctttgtttgtcacccgatattttacaggtgaagcactctttctttgatctcctgtgttcttccctgattccagaactgtgttccgatgtaaccgcatgtacgtcttgctacattaagagtatcctgattgcggtttccgcagtgcggacattcccactcaagctttccatcttcagacgtcacgatctggatctctccgtcgaatccacattcctgacaataatcactcttcgtattcagttccgcatacatgatattatcataaataaaacggattacctgaagaaccgccggaatgttgtcctgcatattcggcacttctacataactgatcgcaccgcctgtagaaagcgcctgaaactgggattcaaatttcagtttgtcaaacgcatcgatcggctcacatacattaacgtgataactgttcgtgatataactcttatccgtcacacccggaataataccgaatcgtttctgaaggcattttgcaaatttgtatgtcgtactctcaatcggagaaccgtaaatactgaaacctatatttgtctcctctttccatctgtcgcacgctttattcatgtatttcattacgtcaagcgcaaattgtgtagccgacggatctgtgtgcgattttcccgtcatatatttcacacattcgtaaagtccggcatatccaagagagatcgtagaatatccgccataaagcagattatcaatcttctccccttttttcagacgtgccagcgcgccaaactgccaaaggatcggagccgcatccgaaagagttcctttcagacggttatgtctgcacataagagcccggtaacaaagatccagtctctcgtcaaacactttccagaatttgtcctcatctccgccggaggacaatgctacgtccacaaggttgatcgtcacaactccctgattaaagcgtccgtaaaacttataatttccgttttcgtctttccacgggctaagagcgcttcggcatcccataaccgggaagcagtttccttcttttagttctttcatctttttctcggaaatataatccggaacaagacgttttgacgtacattttgccgcaagctccgtcagatagaaatacggagaaccttcgtcgatattatcttcttcaagcacatagatcagcttcgggaacgccggcgtcacccatacgcccgcttcgtttttcacgcctttataacgctgctttaacgtctcttcgatgatcatcgcaagatcttttttctcccgctcatctttcgcttcgttcaaatacataaatactgtaaggaacggagcctgaccattcgtcgtcataagcgtgatcacctgatattcgatcgtctgaacgccttttatgatctctttttttaagcggccttccacaatatcattgagcacctgcttcggataatcgatccctaccatttccatttcctgaaggacttccgcacggatcttatctcttgatacctgaacaaacggcgcgagatgcgcaagcgaaatactctgtccgccatactggttgctcgccacctgtgcgatgatctgtgtcgcaatattacatgccgttgaaaagctgtgcggtttctctatcattgttccgctgatgaccgttccgttctggagcatatcttccagattgacaagatcacagttatgcatatgctgcgcataataatccgaatcatgaaaatggatgataccctctttatccgcttcgacaatatcttccggcaaaagcattctctgcgtcaggtcacggctgacctctcctgccatataatctcgctgcacgctgttgaccgccggatttttattggaattttcctgtttgacatcttcgttattgcactcaataagtgaaaggatcctgttgtccgtcgtatttgccttacgcacaagcgatctcttataacgatatctcacataccgttttgccagttcaaatgctcctgtcgccatgatctggtcttccacaagatcttgtatctcttcaaccgaaaccgcacggttcagtttattgcacttaaactcgacaaactccgcaatatcttctatctgcgaatcggtcagacttctcccttccgatgatgaatccgcttttgtcactgcaattacgatcttcttaatgtcaaatacttcttcggctccgtttctcttgataatcttcatatttcgcctctcctcatctatctttttttcagatgcttttccgctttctccgcctttttgcgtatttcacggaacattttcctcatgtcttgcatcgcacggctgtcatatcccgtgctgtctaaaatctattctaatacaaaatatagtataatgcaatccccaaaacacatgataatgtattttcagaacaagcctgtttttatgaaagattgtcgtttttaagggaatatttccgtttccttttacacaaataaacttcacaaataaaattatctgtcactttcccgcaatccgaatcccaaacctgttaaatccgacagatttcaagcaaatataaaaaatcatcttatcgctcacaaaacaatcgctcatcataatataaaaagatatcaaaaataagaccgcctgtagcggaaaagccattttcccactgcagacagccttatatactgtacagatctttttgtatttacaatctttattatgtaatcttatctgcttatttgctttgctttttttgtcttgcgaaataatctttcgtctctcttacgacaacaccgcttaacgccaaaatcgcgatcaagttcggaaacgccatcagcgcattaaaaatatccgcgatattccaaacggccgcaaccgtcatatatggtccgataaatactgcaagaatatacaaccagcggtacccttttactacggatttatttctgttaaaaagatattcgatacatctctcaccataatagttccatccaagtattgtagtgaacgcaaaaaatacaaggcagagcatcagtgagaacgaagctacgatcggagggaacggcaggcctttttggaatgccgccaccgtaatttcaacgccttccagttccgggttcatccatgtacccgctatcacaatggaaaggcctgtcattgtacaaatcactatcgtatcgataaatgttcctgtcatagacacaagtccctgacgaaccggctcttttgtctttgccgccgctgctgcgatcggcgcacttccaagaccggattcatttgagaaaataccacgggcgattcctttttgcatcgcaacgaccattgttcccattgccccgcctgccaaagcgctgcccgtaaaagctgattttataatagatacaagcgctgccggaacagccgtaatatttgtaataataatgatcgctccaagcgccacataaagcactgccataaacggaacgacaatttccgatactttcgcgattcttttaattccgccgatcacgacaaggccgacacaaagtgtcaagatcaacccagtcacaaccgtagccatcgtatagtcatgaccaaaggcagaaaaaacaacgtttgatgactctggatcaaagaagtttttcaccgctgacgaaatactgtttacctgcgtaaaagtaccgataccgaaaaggccgacaccggctccgaaaaatgcaaagattttagccagccatctccagttctttcccattccgttttcaatatagtaaaacggtcctccgagaacatgtccgtctttgtcgatcgtgcgatatttgatagccagaagaccttcggcatattttgtagccattccgaaaaacgccgcgataaccatccaaaacagcgctcccggacctcctgctgccaatgcagttgcgactcctgtgatgtttcccgttccgatcgttgccgataacgccgtacaaagcgctccgaaactggttacttcaccctgtccgtcctcttcatttttaaacataaactttagggctttcccgagatgtcttatttgtaaaagacccagccgggttgtgagaagaaatcctgtaaacaggatcagaatgatcaacggcagaccccacaccgctccgtcgatcaccttaatgatttggtcgatttgctctaacattcctttatacctccatccttttgcctgagagactcgcggcgtctgccttaaaaacagaatataccgcttacaccttcggcgctctttcaccggcctcgccacagccgataaagagactctcctgagttttctctttcgcgctttaacacgacatagttcagaataacatggaaagtataaaaaagcaagaaaaatcgcccgaacctcaaacgatccgagcgatttttctatttataaaggcttttgcaaccttcttttataccgtgccttgcgatcgacacaattactgacgacgtctttttctctcaaaaaatgccgctgccgctgcaaataatccgaagatacctgccgctccccatccaaagaaggatgtcgcgtctcccgtctgaacagcctgacctttattcggtgcacccgggttcttattgtccgttgttcctgggttcttattgtccgttgttcccggtttcttcaaaccatccatcgctgtctgaagacttgtctgtgccgcgtcaacttccgcctgacttgcatcttcttttgcaagaacagcctgcgcttcttttaacgcctctgcaaacggcttccatgtttcagatgtataatctttctccttcaaagcctctgctttttcaactaatgccgtcaagtcagctttatttacttcaacttcttcgtcttggaatcttcccatcacacggatctctgccgctgccgagaatttatttgcctcatctcctgtagtcgcagtcggtacgagttttacgtctgttacatctttcacttcttcaaaagcaaccgcctgccatccggttcctccgaagcttgcatccgctactttttcgtagtcggcagcgcctgcttttttcacccagatttccgcttccctgataataccgtttcttccgcttctctgctgaagtcttaatccgcttactgtcgccggtttatctaattgcagatttaaccagtggttttcaatcggtgttcctgcccatacagtatgccaaattgtatcggcattaccgtctaagacgttgcttgcaggtccttctccgccttcctgcgcctgctcgcttcctgctgtagcagtcatctgctctttcggaagatctttggaatcatctgtcgcatcgattccagccgagttatccatcgtaaccatagcagcttttaattcatagtatgctttctcgatttcatcctgtgaagctccctctttgtcaagaaccgcttttgcttctttaagtacgtcctggaagctgctccaaatttccggtctgtaatcgatttctttatacttttcttctgcttctgcaactaatgcggcaagtttttcctttgtaacttcttctgttactttttcgatcacgaggttgtcaagaacaagctctttgtatccgccgaagttcgcctctgccgcatccggactcacgccttgaagatccggagccttctctgtagagtagataccgaaccatgtctgtcctgtggaatctcccgtaacctgcattgtaaaatgtccgtctttctcttttcccatgctcatcggaagttctttgagctgaacgtttccgttatactcgccgacaccgactgcagccgcgtaaattccgtcgctgcccgcctgataatcaaagcttacattgtatgtcacaccaggctcgaaacggaagttctgcgggatcgtctggtatgccagcgtagatctctgtgtcagtccgttgatcttcacagaccagtctccgtcaagaacatcatccatcttcttcacatcccatcctgcctgtgtgtacttgtcatgtctttcagaaagatggattctgttatcctctactccttcaattcctccgactacgaacgggtaaagtccctgtacgctcttttcaaaattctgttcaaattttacaacttcgcccttctcgtttgtcgtaatgttcttagaatcgttttgcacgatacggatatcatcgaagtatgaagatccttctcctgcttcccttgcgatcgtaagagtcacatctcctgatttcggcgctgtaaagaatatatacatattctggaaatagctgcttccgtctactgtcgaactgtttgtattatgtgtatatgcttttacatagttcttagcgatagaacgtgttgtgtagtttgatccaagtactttatcgcctgatttaatttctacagatgctttggcgtcgcttctgttatctacgcctactaaaacagcatactgttttcctgcttccagatctgtcagtttctgtgtcatagaaacttttccgtccagtttcatcatcggattgctgtgctggctctttgcgatctgcgctgttccttcgcctgcttttgtccacatatcaaggcttccactgttgaatcctgcatctacgatatgcattccttcactccatgtcactttgatattttcttttttgcctttgcatactacatacggaacttctgattctgcttctaatgtgatcttaccgtcaacaacattgaccgtcttctcctctgtctttccgagatctgtcagtttgtatactttgacgtcttttaagtctgcccaactgtccggaagctcccactgtgttgttccgccctgcgtattccagtggtacagcttttcatcttctgattttactttttctcctgtcttcgcatcccagatccacggcagcagataagactctgttccttttttgtttccgttgcggatatcgtcgtctgttctgtctccctgtgataccgcgcctcttgcgatcacttttccgtccaaagtcatcgttctgtctctgtatgccgcctgagccggatcgtttgatcccctctcaagaacaagcgtagatccatcttcatctttcaaagtgatcttcatttcaggcgtccagtttaccgctccgcctacgttgaccggtgttccgtcttcccaatctacgatctgataatgctggatgaattttgtcgtcaggtcatgtgtgtaaagattcgtaatatacgcgtcataatcgttacgtccctgccatccttcaaagtctttcatgttatatccgccaagaagaggagcaaccgccgcgcctccgtaagtcggataatctcctacccatgaatctttctggtggttacgcaggaaacgcatcacatcactgttctctccttttgcgccttccccgccatatgtaaggtctgttgcccaatgctggaatgtagagtcatactcgtttgctccaccccattcgttggacatacgccatccgttgtcattaatctctttggacagcttacgggtctgctgggaatcatcattgtcacttcccgtattatttccccaaatatctacatagatgaagtcaagcatatcttttccgtcgccgccgaggatctcatgaagttcatcaaagcgcgcttctctttctcctgtggcaaggtcatagatactgtcaagtccgattccctgatcgatccagttccatccataacgaagacttccgtccttattacggcgaacattatcatccttaaacgcttttgcttccggatacatctcgcctgcattgacatggataccgaattttgctccgtaatccgcgcctttttcaagcaatgtcttcatatcttccggtccgccgattctctttcctatatctgcgtaatccggatgcgccgagtcatgtccttcattcgcataacctttcagcaggacagattgtccaagaccgtctgtgtgcattgccacacgttttacgttatctaatgttgtcaggaacggattctgcgcgtgagaaccgaagttcatcgcaatacggtacgcaaccaattccggaacttcctcgctcttgaacggattgttcataatatcacggaatgcaaccgctccgtcctgccagtcaacatttttatcgccgttgcagtttcctgtgatcacgactttcatcttcggattttctgtctcttccaaaacccatgtccgattatgagaatctgtcatcactctgtgccagtaccatgcagaacttccaagtcccatcgatacatagccgtcttttttctctgaaacagacatcactcttgtattattagatccgccggaagaacttgctccggcattgcgaccttcaaactctgaattgctccaaagtcctgcgctcatctcatcgttagaaacaaaggcatacatgtagtctctctctctggcaggcgtatttgcatttacttctacatattcgtcaccgcttacctttgtttgtgtggacatagcagcgcctattaaattggcatttttctgtgtactgtttacagatacaagactgtgattcgggatctcgatcgtctggatcggatttcccaccttgccgctttccaatgctgtgcccggttttccttctgtcagcttattttccactttcgtaatttcaaatgaaaccgtattgtcttttgctgtcaattctgccgtaagaactgcgtcaatatgtttttcttcatttttcacagtcatctcatacgttgctttgtcacccttgatcgttgcttttacatcacctttggaaagtttcacatctgttccgttgatacgcaccgtattgatagtcgaagtctgaccgtagaacgtcttgccgtttaaatcgccctttttcatctcgtattttacaacgctcgggaaattcttcgctacataaacgtccatatccgctgtagaaagcttctctgtctctatctctgctgtcttttccagttttacggcttttgcttccacgttgccttctgttacagttacagatgtcgtcgccgtctgatatcctgccttcgtaatcgtcagctcatgcttgccggctcctaactgtaaggaatattttccgtctttatccgtttcagccgtcagatttcctgtcgttacaaccgcgccttccaacgcttttccactctcatctgttacacttcccgtaacagtatatgtaaccgcttcttcctgtcctgtataatgaatatctttcaaaaggacatctgaaccgatctgtccccaagaacctgctttgatcgcaattttgtttccgagagaatctgcgataccggaaaagtcttctttatcaaacacaacttctccgttgagcgtaaacgtcatcttatgatctgctgtccagtcgatgcgaacctttacttcctgatctttcgtcggcgcaggttttctcgtctgctgataatagtctccgttgccgcctttgtatttctgccagaaccagccgccattgtcatatcctatgtacataccgttttgatccgtattatatccgaggtaaacgcctactctgtcactgtcgcttattcctgtatttgcattatttgattttaaagtaaatgaaaaatatcccggcttgttaaaatcaaatgtatttggatttacaaccatctgcggtcttgttccgggattattccgattgcccgcagctgatttaatatgcagccagccattttccacagtgactgtgtctccgtctgctttgttatcctgagtccatgcatcattgatcccatcttctaaagctgctgttttttctgtaacatcaacttcttcggcagatgcggtctgaatgtttgacggaagcatagtacctgtcatagatgcaaccatcacaagactcaagagtcttaagactacttttcttttcataccttttctccttcccttcaggctgattttatatttcagccaatatatcacatcctccattatagcaaattaccaattttttacaatgtattattcatatttttagcgtttttttgtctatttcttatctcccttacttttccccgtcgttttttctttgtttttttgtattttattattctttttgagcattttctctcacttcttccaacatctcagccactgtttttccatacgccggatggcgcacatacggcgcgatctcaaaaagaggccgcagcacaaaatctctcttgtgcatttccacatgagggatgcacaactcgtctccttcatatacgagatcatcatacaaaataatgtccaaatcaagcgttctcggaccccagtgaacgatccgttctcttcccgcctccatttcaatcctatttaattctcttaacagttctttcggataaaacaaggttcttaatttcagacatccgttcagaaaatcatcctgatctgtcaccccatacggaggcgtttcgataaaagaagagcatttttcgacaacgcatccttttaaagcgccaagcgcttcaactgcatctgtaatatatttttctctgtctcccatgttagatccaagtgcaatatatgcggtatgccattgccgctcgatcacaacgctgaccgttttcagcggaaggcgcaccggagcccacggtttcttgatctccagtctgatcttctctagtccggctgtatgcagcaaaagttcttctgcaagcgcttctgccgccctctccaataattgaaatgtatgctcccgcaagtagcggtctataaaagcgctcacttccccataatgaatagaagcgcttagatcatccgtaagtcccgcccttcgtgtgtcggtgtaaagaactgccgagactagaaacttttgtcccaacacattttcctccggaaatacaccgtgattcgcaaatacttccagatcttctattctgatctcatcataatcttttttcattttctgtcttccttcctccttaccgtacatttttctgtatgacaactctttcttcaccttaactatacgaaagcgaagcagtcagtccgacagcttcgcttgcctgttttacagtcctgattacacttcatgttcccgcatgagcgcctgcgtcataagtatcgctcttttattcttctctacgtcatgaacacggacaaacgcacatcgtttctgcaccgcataaaccgttgtcacaagcgttccttcttcccgctcgtctgccggaagatctaatgtaagaccgatcacagatttgcgtgacgttccaagaaggatcggtaatttaaattcatgcatgatctccagtttctgtatgatctccagattcatttcatatgtctttccaaaaccgactcccggatcaaggatgatcttatcccgtgcaattcctgctttatctgcaattttaacgcactctttcatatctttcataaaatcgaaaagaaaactatcgtataccgcctcgttccgattatgcatcagacagcatgcaacgtcatgtttcgcgatcacatctgccattttctcgtcatattttaatccccatatatcatttacaagatctgcccccgcacaaaccgcaacttcagccaccgcgcttttatatgtatcaatagagatcggtacgtcaaattcctttttcagtttttcaatgaccggaacgacgcgcgcgatctcttcttcgtccgtaatctgaacatgtcccggacgggtagactcaccgccgacatctaaaatatccgctccttcttttatcatcttttctgcatgaagaagggctgcatccatcttatcaaaacgtcctccatccgaaaaagaatccggagttacatttaagatgcccataatatatgtattgtgttctgtgtcaaattctcttctgcctatgatcatatttttatctccatatttttcttctcttcactccagttacattcccggtttgccggacatgaaagacacagcctcgacgctttgtccgcttcatacaaaagcttttccaatgtgtcctccccgtcacgaagccgtctgtgtccgcgcaccgcattttttatcgttcttttttcttcctcagaaaatcccgtttctttcggaagtgtatccagtatttccccggcgatccgctctcccgcaatctcatggggaactttttcttcatattgaagcgcttttcctatatcgtgcaaaaccgcggcggcataaattacatctttacgaaaaccgtatcccttctctaaattacggatatatgctattcttgccacatccaacagatgcgacatctgatgcctgcaaaaaatacgttccttttccgcgcgctccagcctatgatagtattccaaatacagcggatggcaaatcactgcatttactctgtccatttttcctcctttaccggtcagtttcccgcgtccggtctaccctctttcaagcattctgaaaaaacgttcttccaaagccggatctgtctcaaacagccctctttttgcaaatgtcaccgtcctgctgcccggtttttttattcctctcatcgtcatacacatatgttctgcctcgatcacaaccgccgcgcctttcgccttcagttcgttcatcagcgcatctgcgatctgacccgtaagctgttcttgaagctgaagccttcttgcaaacacctctaccgttctcgccagcttgctaagccccgcaacttttccgtccggaatatacgcaatgtgcgctttgccgtaaaaaggaagaaggtgatgctcgcacatggaatagaacgtaatatctttttctacgaccatatcgctgttttccacatgaaacgtcttacaaagatgctcttttgcatcttcttcgtaacctccgtatatttcctcgcacattctggcgatcctatccggtgtttcgatcaagccttctctgtcggcgtcttctccgatcccctccaataataatctgactgctttctttactttttcctgatctatcatcttttcatcctttatctttttctatcaatacatctgtcgcttatcctgttctttttcaaccgcttcctttacttttcccaaataggacaaagagccaaacgcaaggatcacgtcgtcttcgtctgcgttttccagcgcttcttttaccgcctgcttaatctcgccgacagcatacgcgggcacatattcagactgtgcttcaacagcttcttttagtttctgcgcgcttagcgtacgttctttattcggaagatcgaccgtatatacgcattttgcatacggaatcgtcaaacggatgatcttttcatattctttatcttgaaacacacccattatgtaaataagcttccttcccgggaaatacgcttctattgattcccgcagtctttttgccgcatcttcattgtgcgctccgtctacgagaaatacaggccgctccgaaatacatgtaaaccttccgaaccattctgtatcgaaaaaacccgtctcgaccgctctcttttcctcttttttcagcagtcccggaacatgtactgcctcccatgcggtaacagcgtttatgagctgatattttcccgaaagacggatgcttatattttcggaatctttataagaaaaccgcatcccgcgataatcttcttccaagacaactgctttttccggctctgcataaataatcggacagccaaactgtcttgctttttgttctaaaatttctcttacttcctgcttctggggcgctgatacaacgatgcatcccggttttatgatccccgccttattttcggcgatctcggaaagtgtattaccgatcacaccgatgtgatccatactgatcggcgaaaacacgacgcagactgtatttttcacaacattcgtagcgtcttccatccctcccagccctgattctaaaacgacaaaatcgcacttcattcttttataatataaaaatgctatcgccgtttcagcctcaaagactgtcggaagctgttttcccgcttcctttaaccgaacgatagcatcctgaactttttctgtctcttctgcaaaagcatgctttgatatcatttctccgtcaacttgtatcctctcacggtatgagacaactgtcggtgatacataacgcccgatcctgtatcctgcttcacttaatattgtggaagtgtaggcaagcacagatccctttccattcgttcctgcgatatgtatgaaccttaaatcatcctgaggattcccaagttcacgcagcagacctcgaattgcatctaagccaagtacacttccgtatttagacaattcatctaaatataccctcgcttctttataggtcacacttttgttcctttcctgaatcaatttcattttccgccctgctttttgccgagcagacttatcatagcactattcgtttcattgtacaagcttcatatttgcaacaattcttactttgtatagacatttgctcctttctgtgttacgataagtgtactacattaaataatacacttaatacactcattttaaggaagggacaattatgattacgattgactatcaaagcaaactgcctttatatgaacagattgctaaaagatttcagacgctcatcttaaaaggcgcgcttccacccgattcgcagatgccttccgttcgttccctcgcaatggatctttccatcaatccgaatacgatacagaaagcgtattcgcttttggaacaggaacgctatatttatccggtaaaaggacgcggaaatttcgtttccgatacgacgcttctcgttgaacagacaaagaaaacacttctcgagaacgtttctcgccttatcgcaaacggaaaagaactcggagtaaagcgcgcagaattcacgcagcttgttgaccggatctatcgaaaggaggattctcatgatcgagttaaaaacgcttgataaaacatttcagatgatccatgcttccgaccacatcaccgctactatcccggacggtatggtattcggactgatcggatcaaacggagccggaaaaagtacgcttctgcgtatgatatccggtattctcaaaccggacgaaggagaagttctcattgacggagaatctgtttttgaaaatccttccgtaaaatcacagatctgctttttatcggacaccccttacttctttccgaatgcagatatccaacagatgagaaattattacatgctctgttacccgtcgtttaacagaaaactgtttgactctcttacagacagatttaatcttgatccaaaacgaaagatcagcagcttttcaaaaggtatgaaaaagcaagtttccattttgctcggtctttgttcaggaacaaaatatctcctctgtgacgaaacgttcgacggacttgatccggtcgttcgccaggctgttaaaagtctttttgccgcagagatattgaatcgggatttcacaccgatcatttcttctcataatctgcgggagttagaagacttctgcgacagcatcggacttttgcatcagggacagcttctgcttacccaaagtctggatcagataaagtgttccgtctgcaaactgcagtgtgtcatttcagatccacataaagaacagcagtttctgtcttctataaagatattaaaaatggagcgttccggttctttacttacgctcacacttcgcggaagccactcagatattctttctgcggtacagacttatgatcctgtttttgcagaagtccttccgcttacactcgaagaaatatttataagcgaaacggaggcagccggttatgatatcaaagatttcttatattaaacttatacgagaggacatacggcacagaggatggctcgccgccctttccggcgtcctgttatttctttcaatgcctgtttacacactgatctaccttgacagttattctgaagatcctgaagtattaaaagagttcgcggatacattttccggattcattaacggatataattccgcttttctcatcatactgatcggaattctcgctttcgcagtcggaataagcgggtttcagttcatgcataaaaaagaaaaacttgatttttaccacggacttgcgctcaaacgtcatcagttgttcgcaatctcttatttggcaggactgttcctctttctcattccatatatagtatgtactgtattgacgatccttgtcggcgctgtaaaaggaattatgactctttctctcgccggagaatgttttcttacaatggggacgggaatcctcgcattccttctgatctaccacacatgtatttttgcgggaatgctgaccggacgaagcgtaacgatgttcctcggaacacttgtcatcggagtctatccgagcctcgtattgacactgcttccgtcgctgcgagatgcgtttttccagacaacttataacgtacacgacagtatacctgaaaaactttcggaatatctttcgccatttccgttgttcatccgcatgcttgaacaaaataattcttactcgaatgtgtttatgatcaccgctgctcttgttttgatcgttcttcttttggcggcctcgatcatgctgtatcgcatttacccttcggaatcagccggaaatgcccttgcgtttaaatttacaccgcctgtatttaaagtactgatcagtattccgaccgcagtgtttatcagtcttcttgtaaaatcatttatcggagcttccggcacaaaatggatcattatcttaagtatgctcgccattgtcctgctatgcggattgatcgagtttatttactggcaggatctgaaaatgctattaaaaggatggcgttcttccgtaattgccatcgggtttgtagccgttttgcttgcagtgtttcaatttgattttaccggatatgacacataccttccgaaagaagaaaaaattgcccggatcggaacgcttcccgattcgttcgcatcctatttctggtatcccgaagactatacttcagaggatgacagggaaagtttcgttctttccgatgacgttgacgttttatacaatcttgcgcaatcgggaatcgaaaacgtgaaaaaaggcattactccaaacacgctttactcctctcagacatcgatgcagacggataaagattccgacaattatatatgcgccgcattttgctttgaactggaaagcgggaagaaagtttatagaaactactgtgtttcctataatgaaacgcttgaggcattcacaaagctctgccaaaaagaagattaccgcaaggaacttttcccgatcttccatgtggagaaagaaaacgtatcttctgtctcgcttcaggatatttatataacgcccgaagaattacttctgactgccgaacaaagaacagaacttctaagcgcatatgaaaaagacgtattaaacacagatatccgaaaactcggaagcgaagttccgattggagaattttcccttacgatccgccatgttcctaacaaagagacgaatacgaatcagcctttccattcatgggtgaacggaacgcgtgaatggaatgctgcagtcaatacagcttttccggtaacttcctccgaagatgaaaccaattacaagacgttttcgatcggatcattgtacatttacgaagactatgaaaatacactttcctgtcttgaaaaatacggatacaaaataaaaagacttatctgtgcagaagatatcgactctgtcactctatacttaagcggcgactcaatgaaaaacaaaaaatggaacgatcttttagcatccttttcttctgccaaagatgagaacaattccgatccggataaagctgcttacgaacaatcagatgaaaaagatgcaacgtcaatgttcacgatcacagctcccgaagatttccggcttctggcagaacatctttaccttaatccttctgattttctcgacaggggaggaacgtcacgtgattatgcagaagttacatttaaaaaagaaaacaatactttcacttatcttttgaagtaaacatttttgtctgatatttctgacaaaaccggcattgcatccaacagcagactcttttcttcatctgcccacggaagcaatgccggttttttcttttattctttttatttcctgcttttttacttcctgcctttcggaaaatattttaataatactttacttttactcttcttcccattttttctgctgtagaaacaagctgttctacaagattctgccgcatactcagatcaaagttcagttccgactctctatgggcgtcattcacagccgttcctacgaacagattcagttccgtacattcttcaatcaaaagttttgccagcttagacgctccgttttccgcatcaagctcatcaaaaaattctgcatcgaactcatctcttacatattttttcaaaagctttatgcattttccgagagtaagcactccttccgtcacaagatcgattccttctataactgccatcggaggaatatcgggattacggctgtccacctttgtgacaatctcttttccgaggatacgcgccgcaatattagcgctcgttcctcctgccacaactttctttccttccgtatgcataaactcatacatcatccgctcgtcatcttttttctctttcggcggtcctgtaaaaacatttacaattcttctgtcaatcacgcgtgcaaccgcaactgtcgtatcgtctcccggtttttcttcatacagttcgtcgcatgcctgacttaacataactgccagacgggacgcagacatcgtctttttcgtacatttaagcgtatactccgccatcgcttcccacgtccatccctgaaggttcagaatcgatcccgctccggcatagatcacaccgtcgctcatcaggacaaagcaatcgtttttctgtacttgaaaccgatattcatgtatcttttttccctcgatctcgcgggtttcatatgcatagttcacaatcttcccatcacggataaacacacaggacggattgtcaaactctacaagatacgcctcaccgctgtgaaagatctgcaaaacagaaaatgtcgcatacgccacctttctcacctgacatatcggaagcgtttttgcaatcgtttctacacacgactccaacgccgccccctcatataacatcgttccgagaattttcgacgtcaatgtcgccagaatattcgccttcacaccgcttcccatcccatctgcaaggatcagtatatcggaatcatccgtctttaacacttctactttatctccgcacaattcttcgtgatgtttattcaaactcttccaagctacatcaatacttacactcatgaacctctctccgtcctacttcttttttctgactttcatctgtttcatctttaatcgtaacagttcaaccgcgccattcgtaaaaccgcactacgtgcttatcatggctgaactgttacctttaatcttcttcattcaatatcgagtctctcaatttcgtcaatgtaactttcgtctctgccgttgtctcgccaagcagccccgcgatctcctgggcgaccatcatctgcttttcgatcactttctgcgccatttccacagttccgactttcagcttataatgctgttcccgcactttttcttcccgcgtcacatcttgatatgtcaccaaagcggcatccagattgtcaatgtatacgatcgtctcttccactgtcagcctgtcattatcaatcttgatctttttatgcatcaccggttttttcgtgtccagcacttcttcaatatcctctgtctcgataaattcaaaaatataccgttgtaccgcttcctcccgtccgactccgagaagatcctgccctttcctgttgcagtctaatatcttcatatcgcttccgatgacaaagatcatattcggcgtcacatccatcacgacattagacatcgactctgcctgtgtcaatgcataaggcatacacatagacaattccgcttttccctgaaagactgcgaccgctttttccctgcatgtagaatatccgcatgccccgcagttcagttcgtcttccgcacaatattttccggtagatttcaaaatatgacggatctgttcttcggacggcatcgcatctgaaagactacagtctttaaactctttgtgcagttcttccgccgtcatatccggaagatcacgcgccgccttataagaaactccgttttctatttttacttttgtctttacataagatgtgttccaatgtgccgacgcaggtcctttcgcacatccgccttcacagacgttcgcctcgataaagcaatgatccagttctccctttccgagacattccagcatctccatacagttttccagtccgtctacaaatactttatgatatccgtctgcatcttcctctgtgatcacagactggatcacccctccgctgacaggatagagtctgttgatcttaggatcagggttccccatcggtttctcttcgcattgatgaagatcaatcccttcttcggcgaaccagtctgccagctcttcaaatgtcaggatcgcatcgaccgcgccgaatactctctcgtctccgatcgcctcctgcttcttcgcgatacatggacctaaaaatacaactttcacatccgatccgtatattttcttaatatatctgccgtgggctaccatcggcgatacgacaggagtcatatacttcgcgcagtcgggataatatttttcgatcagatcgttcacactcggacagcatgtcgtaataatattcggcatctcattttcccgcacaagttttttatattcatttgtcacaagagccgccccttccgcagtctctctcacctcataaaatccaagtttcaaaagcgcgtccacgacctgccccggctgatcaaaatcaagaactcccgcataggacggagcgatcgatatgatcgttttaaacccttgtgccaaatatcctttcactctttccagatcgcttgcaaatgttttcgcgttctgcggacagacttccagacagcgcccgcagttgatacaatgatcgaccataatgcgcgcctgctcgtctttgacactaatcgcttttaccgcgcagtttcgtacacatttataacaatgacggcattttgcatctttaaaatcaatgactttcattcctcatacctcctgtaggacgttccctttttcacaaaaacggttccataaatatcagcgtcaaaagcatcagcccgttcaacagattataaccgataaagatcactgccgaaggcgttgtaagagcattaagataataactcccgggcgcagcgttttctttcagccagctaatccactcttttcttcttataatcagaagaacaaaaccgatcacaaaaccgatacctaaaaatacagtaaacgcaatcccttccacatcatcgggaagcagcccgaacaagctgccgatcacatctccgagaataaagttattcgcgatgtgaaggatgatcgaccattttatcgaatattcgattgctatatatcctaaaataagtcccacgagcgttccgaatacgatctgaagcggattcccgtgcataacaccgaacaaaactgccgagacaataaccgcaaatcctttaccatatttttcaaaccgtctcataagaaatcctctgaaaacgagttcttccacaaccggtccgacgaatccggcatagatcatcatcataatccccatatcagaaccgaccgaagcaagctctgtcagcgtatccatcgaaagccccaactgattcaaaatcagttccgctgctgctgcgatcaacgaaaagaccatctgagccatgatcatgtagatgcaaaatcttgaaaatgcgcctgctgtcatctttcgtttcgatttttggaaaatatcgatcttttctgcttttgtaccgtcaatcttaaaaagacagaaaactccgatcaaaactcctgcgatcatccctgcggaagctgccgttcccgtcacctccgaaataagcgactctgacgaaccgcctgtcttcgtcaatgccgaaaccattgcggagaccatctctgtcacaaccgacatgatcaaagtgtaccagaccagatttcttgtcgcaaatgccgtatctttccgaaacttatgccaatcccatcccatattccgttcccctttcccgataaaccgaccggcaaagtcacattgttcacaactttttgttttatcttcatttcctgtcagttatctttttaataaaacagctttttataattataacacaggaaaatctaaaagacttccctgtgttataaaatatttgacatatagtaacagcgcggtccataacaactaagatcagttgtttctcggactttttaattcactgtacgttttacatatgttgtatgaagaatatgatgcgctttctcacttcccggttcgccgagatattcgctgtaaacccgtttgatggacggattctcatgagattttctcaatgtttttgcggcatcgttatcataaagtacctttgcacgaattgcctttacatcttcaaaattacgcacatccgcatgcacctgaggctgaccgccgccgttgacacatcctccaggacagcacatgatctcaacaaaatgatagaccgcctctttagctcttattttatccatgataatcttcgcattggaaagtccggaagcaacggcgactttcacatccattcctgctacgttgtaaaccgcttctttgattccctctgttccacgaacttctgtaaattctactttctcaagcgtctcgcctgtcagttcttccactgcggtacgaagagccgcttccataacgcctcctgttgcgccgaagatcactcccgctcctgtagattctccgagcggatcgtcgaatccttcatccggaagactgcggaaattaattccgactttacggatcaggcgtgcaagttcccttgtcgtgatcgaaatatctacatcaggaacgccgcctgcgtcctgatcttctctttggatttcaaacttcttcgccgtacacggcatcacgctgacgcagacaatatcttcaggcgcaatgttcatcttttccgcataatatgttttcgtaatcgctccgaacatctgctgcggtgatttgcagcttgaaagatgatcgagctgatccggatagtaatgctcgcaatattttacccatccgggtgagcatgacgtcataagcggaaggactcctttgtttttcactctgtctaaaaattcatgagcttcttccataatcgtaaggtctgcactgaaatttgtatcgaatactttatcaaatccgatccttctaagagccgcagccatctttccttctacgtctgttcccatcggataaccgaattcttcgccaagagccgcccgcaccgacggagcaggctgtactacaacatgttttgtctcatccgcaatagcggcaagaacgtcgtcgatattgctcttttcgtagagcgcgcccgtcggacatgccgcgatacactgtccgcagccgacgcagcttgtatctcccagtcccatctcgaacggagagccgataaacgtggcaaatcctctgttgttcggtccgatcactcctacgctctgcactttttcacagacggcagaacatctccggcaaaggatacatttgttgttatcccgcaccatatgaaccgcgctttcatccaattcataatgtgttgtctcgccctcgaagtaattttcatctgtcactccgagttcctgacaaagctcttgaagttcacactgcccgcttctgacacaagacagacattttttgtcatgattcgacaaaagcagctctaatgttcttcttctcgaatcaagaagtttcggcgtattcgtctgcacttccattccttctgcaaccggatgtacacaagatgccacgagatttcttgcgccttttacttccacgacgcacatacggcaggcgccgatctcattgatctcttttaaataacacaaagtcggtatcttaattcccgcagcctgtgccgcttcaaggatcgtagagccggcaggcgctgtcacatttaaaccattgatctttaaattcacatttcccatcttctctgccctccttattctttgtaaattgctccgaagcggcatttttccatacaagctccgcacttgagacatttttcaggattgatcatatgcacttcttttactttaccgatgatcgcatctgccggacaggttctcgcacagagcgtacaacctttacatttatccggatcgatcttatattgaaggagatctttacatactccggcagggcattttttatctacaatgtgagcaatatactcgtctctgaaatatctcaaagtcgaaagcaccggattcggagccgtctgtccgagcgcacacagagaatttgattggagatgatagcacagttcttccagcttatcgagatcttccatcgttgcctggccttttgtgatcttctcaaggatttcaagcatacggcgtgttccgatccggcacggagtacattttccgcatgactcatctaccgtaaactcaaggaagaatttcgcgatatcgaccatgcaagtatcttcatccatgacgatcaaaccgccggaacccatcattgaaccgattgaaagcagattatcgtaatcgatcggaatatctaaatgttctgcagggatacatcctcctgacgggcctcccgtctgagcagctttgaatttctttccgtttggcactcctccgccgatctcttctacgatctcgcgaagcgtcgttcccatcggaatttctacaagtcctgtattatggatctttccgccgagagcaaatactttcgttccttttgatttttccgttcccatcgaagcgaaccactccggtccgttcacaataatctgagggatattggcatacgtctccacgttatttaaaatcgtcggtttttgaaacaggcctttcagcgccgggaacggcggacgcggacgcggctctcctctgtttccttctatagaagtcataagagccgtctcttctccgcagacaaacgcgcctgctccaagccttaattcaatatcaaagtcaaatccgctatcgaaaatattttttccgagcagaccgtactctcttgcctgttcgatcgcaatctcaagacgctgcacggcgatcggatactctgcacgaacataaatatagccttgggatgctccgatcgcatatccggcgatcgccattgcttcaagaaccgcatgaggatctccctctaagatcgaacgatccataaatgctcccggatctccttcgtccgcattacaacagacatatttttgatctgcgtcatttcctgccgcaaacttccattttaaccctgtcgggaatcctgctccgcctctgccgcgaagcccgctgtccaaaagaatctgaatcacatcttccggcttcttttccgtcagaacaataccgagcgcttcgtatccgcctgttccgatatattcgtcgatcttttcgggattgatgacaccgcagtttcgcagagcgactctgtgctgttttttataaaaattcgtctcgtttaacggaatgatcttatctgcttttacagtctcttcataaagcagatgctttaccacgtttcctttgagcagatgttctgtcacaatctccggaatatcttcttcctgaaccatagaataaaacgttccttccggatatacgatcatgatcgggcctaacgcacacaagccgaaacaacctgtcttaacaacacagacttcatcggacaatccgttcgcttcgatctctttttccagtctctctctgatccgggcgcttccggaagacgtacatccggttccgccgcagacaagcacatgcgtgcggtatgtatttccatcggcatcttttccgctttcacacattgcggctttctcaagtatttctttcacattctcttctctaagctgcacgactttacgcatccgctcacagatctcatgtaattgttcaagagatttcatataactcctccatttcctgtttttctaaaatcaataagtatcatattcccgttttcatattatccgggattttgatgtccgcattattcatacttcgctaaaatgtcatccagatcatctactgtcaaacgtccgtatacttcgtcattgatcatcataacaggagctaatccgcatgctccgacacatcggcacgcatcaagagaaaactttccgtccggcgtacattctccgccgacaatacctaacttttccatcaaagcattgtaaatatctcccgatccttttacataacatgccgttccaagacagacggaaatcctgtattttcctttcggactcaatgtgaactgtgaataaaatgttgccactccatagatcttctccatcggaatacctgtctcgtctgagatcattttctgaacttcgatcggaagatacccatatatatcctgcgctttctgcaagatcggcatcagcgcccctttttcatcttttagctcatggattactttcatgagtgcttcttcctgttcttttgttcccgagaaaggaacagtcgcctttttctctgccattcttcaacctccattcttactgttaatgcccattagagatatcatatcatacaaaatatcataattctacttattttttgttaattttttgtctatttttatcaccaaaaacaatgtgcaccgcttttgtttttacattttacacataatacatctgtttctttttcattttttatatcttttatctttttacatttattaccgaaacatcgacggatcgaacggatccacacttcagtctgtcgccaatgcagaaactgccagcagtttttctgctgacagaatgttttaacaccttctttatcttattatcaggaacggtaatctcgttcattatcaaacacattttcaataatctttctcgcttctttcactttcttcggatcgtgatctatggaatttagtccgatgacaatatcttctgtcaatacgacagacggaaaataaaagtcacacaactctctgtcgtctgccgtgttgaccggaatatgtgctttttgacactcttcatacacacggcggtttacttcccgacagtttgatgcggcgatcacaagatctgctccttttgcatccccttcctgatattctctgttacacaaaacaacttttccttcggaatccagacgataaaactcacttctgatctccggcgcgatcactttaatatccacgccgaaataaagcagcgtctccgatcggcgaagcgcaacactgccccctcccactacagtaacctgtctgcccgaaagatcaacaaacatcggaaaatacggctttttcattctctttttcctccgtctcccatgtacaaaagtgcattacatatacatgccgcaatattgctgccgccttttcgtcctctcgcaacaatatacggagtattttcaagacttaagatcaattcttttgactgtacaacattgacaaatccgaccggaaccgcgatcacaagttccggggcgatcttttcctctttgatcagctcatataaacgcacaagcgctgtcggagcatttccgatggcaaagattacctgctcccctaattttgccgccttatccatactcgcggccgcccgtgttgttttgtttctttttgccgcctgcgccacatcgtcatccgacataaagcaatatacctctccgccatagccggcaagacattttttattgatccccgcttttcccatttgtgtatctgtcacaatagacgctccgccgcggattgcttttagcgccttttcaactacattttccgaaaaaataagattatccgcataatcaaaatcagcgctcgtatggatacatcttttcacgatcgattccgttcccggaatcaactgcttatcccccagttcttccgcaatgatctcaaaacttcttttctcaatctccgacggaagcaccttttctatctctgtcaacatcttcttttcctccttttctttgatcgttttcagtgtttcttttcattttataacatatccgatcccacagatcacgcggtctgcccgaactgcctttttagtcaaaccggtcataattcttccgactgcctctctgtactcacgctcaaacgcatcaaccggaaccagaccgcacccgatctcgtcacacacgataacaagatctctctcttcgcttatcatttctaacagttcttcttttgttcttcctgatttcagccagcgccatataaaaagatgaaacccatctacagcctcccatgttttgacatcctcgaaactacagtccgctccgctgctccatttcagtcccggatagcataactgcgcgtagtttttctttccctgaaacgctccccctgtcacgatcctgattcctcttttcattttgccgcaggacatttcacactttgccgtcttcatctgtctttcgttcccttcattccgtcttgtattcccgcatgcagttttatcttccgcggtctttacttttcttctgagaggtcttccgcagacgacttcagtcacttcatctgccatcttcgcaagctctttgttgatctctcccataatatacttatactttctcatctcttccgaatcttttgccgattccgaaaagatttcatttgtcacaacaacaagatgacaacttttctttttcaacattgccatggcttgcgcaacaacccggacagcctcgtctttcgccccttcttccatatataattcgttcgcagccaaattagagacgcactctaaaagaacacatccaagcgcctccccggacgcttcaaactgatggatcttttccgtaatgtttgtataccattcaagagtccgaaacccttttccttctcttcgtctcctgtggtcggctattttctcttctgtttccgttccatacggatacatcgtcgctatataatacagcttttgttccttctttcctgtcttacggtattcttcatacaatgcgcagatcctgtcttctgcatacgcggatttcccgcttccgcttcctcctgttactaactccatcatatttttaaaacctttcttttttctttcccgatagcttttctatacacaataaacgcatcttttcttctctgaacccacattcttatttgaaaacatgatatactacctctatatgagcgtcaacaaaaagaacaggaggaacttttatgtcatttatcagtgtattcgatgtactcggtccgaacatgatcggtccgtccagttcgcacacggccggcgctgcggcaatcgcccttcttgcaggaaagatgccgaacgccgccattaaaaaagctgattttattctttacgggtcttttgcccgcacatataaaggccacggaacagaccgcgccctgctcggagggatcatgggattttcaaccgacgacagacggattccggattcattttctatcgccgatgagcgcggacttcagtattcgtttacggcaaatacaacagaaaccgaaattcaccctaacacagtagacatccatatgactgacgaaaacggacaaaaactcatcgttcgaggagaatcggtcggaggaggaaaaatccgaatcgcaagaatcaacgaagtggaagttgattttaccggagaatacagcactcttatcgtcgttcaacaggacaaacccggagtgatcgcacacatcacaaactgcttaagcgaaatgaacgtcaatatagcttatatgaagctttaccgggaagaaaaagggtgtacggcgtacagcatcgtcgaatctgacggaatcgttcctcagacagtagccggacgaatcaaagaaaatccttatgtacatgacgtcatgctcgtacttccgaatgagaaaggagaattttaatggattttaaaagcggacagcagctgatcggattatgtgaaacaaacgaatgtcctatttcagagatcatgctgatacgggaagaaacttttacggaaagaacacgaaaggacattataaaccagatgggaaaaacatggcagatcatgaaagaatctgcccattcctctgttgaaaatccaaaacattccataggcggactcatcggaggcgaagcaaaacttctaagtgaacatctcagttccgggaaaagcatctgtaaagacccattaagccgggcaattacttactccatgtcaatcctcgagacaagcgcctctatgggactgatcgttgccgcgcctacagccgggtctgcgggaatcgttcccggactgcttcttgcgcttcaggagacatatgatttctctgacaacgatattatccgtgtcctttttaatgcaggggccgtcggctgtcttgccatgcgcaacgctactgttgccggcgctgtgggcggctgtcaggcagaggtcggagtcgcctcggcaatggccgcttctgccgcagtcgaactgatgcagggtactgcgcggcaatgccttgacgccgcgtccaccgtactgatgaatatgctcggacttgtatgcgaccctgtcggcggtcttgtggaatgcccctgtcagatgcgcaacgcatcgggtgtcgccaacgcattaaccgcagccgaaattgttttaagcggagtccggcaactcatcccctttgacgaaatgttagacgctatgtataccgcaggaaagagacttcctgccgaataccgcgaaaccgctctcggcggctgtgcagctacttctacgggatgttccctctgtcagtgagcagaaaatattttgcagcgtgcagaccggttatttctccgaatgaccggtcctgattttcgcatatcgatattccaaagcgccgctcgccggaatctgacgaattccttcgatcttcgggttcacaagattaacgctcttcatcgcgtaaagcggaagtatataaaactgttctccgactgccagttgttccgcttcatgcatcagcgcagaccgttttacaggatctgtttcggaatccgatcttcggacaagttcatcatactgttcatttttgatcccactgcaattatacgtactatccgacagaagcatcgaaagatatgtgtatggatcagaaaagtccgccgtccagttcatccggcacagatcaaaattaccggcatgacgcatactgtaatttgtctgtaattcttgagcgtttaacttgatctctatattgaggtttttcttcaactgttctcggataacctgcgccgtgtccgagtcaagttccaaagacggatagctatatgtcagttcaggaaatccttttccttcgggatatccggcttctgccaaaagtttctgtgcccgttctatattttcttcaaaaggctgttctgcctcctccgtaaaatatttccccgtatttttgtctttcatatattttgccaccagattatacgtcggctctgtgtcttctccgacaatcttgcacaactcttctctgtcaaccgcaagattaaacgcctccctcacacggacatcgtcaaacggcttcacattcagattaaaataaatatatcgtgtcgcaatctgatctgtcacaaacagatcttcttttccgtcatataattccatgaccgaagaaggaagcgctgttgccacatcaacttctcccgtttcataagccgctgccatagactgtgtgtcatcaaaaaaacgataggtgatcttctctaagctgatattgtcctttccccagtaatattcattttttttcagcgtaaaatactgattcggtacatattcagccaaataaaaaggaccgtttgataaactcgtcttcggatctttctcccagccacggttagcagcatccgcatatttcgagcaggaaggcgtatataccgggagccggagaagatcaagaaaatatacgcacggcttttcaagatgaaaaacaatcgtcttatcatcgggaagctcaactcccagcgtctctatatccgcctctttattataaattttttctgcatttaaaatcggaaaaagataaactgcatatccgcttcccgattcagggtctaacgctcttacgatcgtattcttaaaatctgccgatgtcacttctcctccgtcagaccaaagcgcatcttttcgcaaatgaaacgtccacgttgtaaaatcttcatttacttcgtaagactgtgccgcacggtactcgatttctccgttttcatcaaaggtcagcagttcgtctaaagcgcttaccgaatatgcaagatacgtcaaagcgattgatcctgccggatctaacgatccggtttcactgttgatcgcaactgtaatctcatgatcggcactgccgttgtttttcctgctttttgacgatttttctgtacttgcacaccctgtcaggatacttcccgcaaacaataccgccgccaaaaacaaagctgttcctctcgacactgttttcaggatggccttctgatctataatctttttttccccgccttttatattttttctgtatctcacttttatttatctcctattttcatgattcccgattctttgtgcaacaattcatctataccgatgtccgtttctatatctgtagttttcgtaattttgcttttttatatctgagatgtcatcttataattcggatttcttccggcgcgttgttgtttggaataaaggtgacaggaaactgctctgccttcaaaatcatacatttcaggggctgcgtctttgcacatttccatcttatatccgcaagatccgaaatacggacagcctccttctgattttccttcatgcactgcaggtactttttgttttcttgccttcaacggatcaggcggcattaccgaatcgagaagtgctttcgtatacggatgccacggatccctgcataaatcccgggtttttgcgcattccgccagtgttcctttgtagagaacgcctgtcctgtgactgatccggcgaatcagcgccatgtcatgcgaaataaacaaacaggcgatctttttttcttttactactcgcagcagcagatccaatatctgcgttcttgtcgctgcatctaatgaagaaacagcttcatcacaaatgagaagttccggctctaaaaggagcgccctggcgattgccgctttctgacgctgcccgcctgaaagttctcttggataccgtttcccgtctaaactactcaatcctacgcgcgtaagcatctgttctatctgtctttgccggtcttttttcctttccttttgatcaaactttatttgtttttctttcgcccgaagcgtttccgtcaacatttcgtttatcgtcatgcacggattcagggatgaatacggatcttgaaatatcatcctgactttcccatgcatatttttgtttctttttctgttttttcgatctactctttctcccctgcaaaacacttccccactgtcaggctgttccagccctgtaagtatttttgccagcgtcgtttttccactgccgctttctcctgcaagagcaaacacttcaccctcacaaatatcaaacgacacatcgttcaccccttcttcgttttgaaaccgctttttcaaatgtcttaccgtaaacagcggattttcctgagcagcaaacactttttcttttacaagaagctgttctgccgttgcatcagacagaagtttctttgtatattcagtctgtggattgtagaaaatatcatctgcacatccgttctctatcatttttccgtctttcataacataaacgtaatcacaagctgcagcgatcacccccatattatgacttacaagaagaagagctgtatttgtttcttttactatttttttcaacagccggattactctgacctgcatcgccgcgtcaagcgccgtcgtaggttcgtctgccacgatcagattcggttcgcaggcaagggcaatcgcaataacaactctttgtctcattcctccggaaagttcaaaaggatattgtttcatccttaacctggggtggcggataccaaccgaatccaatagttcttccgatcttttctttgcctcccgccatgtacattttttcctattccgcacagtctcggcaatctgtctgccgatcttcactgtcggattcagacattttaaaggatcttgaaaaataatggccgcattgtctcctgctctgacagtatttccaaaaagagacactttctctgcctctacagcggctttatgatccaaaagtcccatcacagccagcattgccgtactcttgcctgaaccggattcgcctacgattcccgtcacttttccttcttccgccgaaaaatctatcccccgtacagcttcaacgcgttcttcctcagacaaatacgttacataaagtgatcttacatccagcatattcaatctgtctgccctcctcttctttccatcgccattgcaagtatatgaaacacgaccaaaagcacacacaacgtaataagaggcgccaaaagttcacacggataaagaatcatcctgtctcgtccttcctgtatcaatgttccgagacttgccgtcggcgcagataatcccacccccaaaaagcttaaaaatgcttctgtaaaaatcgcctgcggtatcagaaacaagaagtttacgactatcatccccagtgcgttcggaagcagatgtctaaacaaaatccgaatgcccgatataccatctatctttgccgccgccgcaaaatctgtttcttttaaacggatcatctccccccgtacgacacgcgccatatcgatccagccggcaatacaaatcccgaagatcatgctttttatccccggtcccataacgagcgttatcagtataacatataaaatcgacgggatcgcggcaatcacatccgctgctctcatcagaatcatatcgatgcgtttcccacgataccccgctacagcaccgtacaaaataccgatcatcccattgatcagagaacttcccacgccgatcacaagactaatgcctgctccataccaaacccgtgtaaaattatctcttccaaactcgtctgtaccgaaaaaatgaatcaacgacattggctggttccgtatttccgcattttgttccgtcggagaataaggcccgaataaaggtacgcatactgccagaaagatccagatcaaaaggatgataagcgccgctttttcatccctatatccctttctttttttactgcttattctgttttctttccgcatatttttgtcacacctcccgccggttcctgacacaagttttttcttatttctttctgtaagctcttctgacacttggatcaagccatgccccaagcagatctgtgagcaaattaagaagaataacaactgttcccataaatacagtcaatccgagaataagagtataatctctgtttgcaatcgacatgacaaactctcttcccagacccggaatcgtaaacacgctctctatggcaaaacttcccgtaagcagaaacgccgatgccggaccgatataattcaataccggaaaccatgcgttttttaacgcatgagtaaaaatgatcctgctctttttcaatccttttgccctggcaaaaagaacgtaatcttttgccatctcctcatccaatgcatgtcctgtcattcgggtgatcacagccgtcggataaagcgacaatgccgtaaccggtaaaatataatgtgaaaaagaaaataaacccgacgaaggaaaccattttaattttacactgaataccattaacagaagaatcgcagcggcaaaaccgggaatgcccgccgccagcattcctaatgatccgattacctttttcactgcccttttttccgacgcggcatagaacaccccgcatcccgtaccgacgatcactgatacgatcaatgccgaaagtccgagcgacaccgtaagcggagctgcccgtccgataatctcttccaccgatgtacccggatcctgataagaaatccccagatctccttttaaaagatttcccatatatgacagatactgctcgatcagcggatcgttcaacccatattcttcttccacagcttccacaacctgctccgaaacgccgcctctttgaaacggacttcccggtatcagccttacgagaaaaaaagtgaccgtggcaagaaggaacaatgatactatcccagtcaatattcttttccatgtgtaacgcatcattgccctttcacctccttgttcagaccctgtttttttctttgctctgccgttttattccgtcacatcctccagctttgccggaatgactttcagaagatcttccagactaagttctacctgatatccgatcttgccgccgctgaaaatcatcgtttcaaagttttttgccgttttatgtatcactgtcgtaaactgttttttcattccaatcggagaacatccgccgtgaacatatccggtaaggggaagcagttcttttgattttagcatttcaacacttttttcttttacggcatgtgccgctttctttagatccagttcacagttaaccggaatgacaaagacataattcgtttttgattttccgaccgtcacaagagttttaaacaccatatcaggattttcacccaaaacttccgctacttcaattccgcttaccgctcccgtatcaacataactatagctttcatatgcaatcttcttctgatctaaaatcctcattacatttgttttttctttattttttcccattattcttccttccgaattctatctataccgaaatgcttctgtgataatccaaatttctacaaagaaaataaacaataacagaccatctaccgcccaattatactgaatgctattcagcggagtccgagcaaaacgaaacataaaatcttttacttttttcctgcctgtcaaaaacaaaaggaaaaattgcaaaatcggaaataacaaaattcccattttataatcccatccatccggcgttcctaatatgccaaaatgaaccggtataatatccggcagaaaaaataaacttactactgcagtcaaaagagtgattccaaaaataatccatgatacttttctactgtttaaaaacgacataattattccttctttccataattttcaaaccggataacctgctcgtcattttaaatttttaaaaattcacatttccgaaacattccacaatcttctctgtcattgcatccatatccgcccgttttgcgacttgaatcttcattccgtatttccttgcttcggccgctgtttgttctccgatacaaacggcagacacattttgaagttctacgttttttattgctttgacaaacccttttaccgttgaggcgcttgtaaaagtaactgcatcgatctcctctttttggaacatcttttctatcttgtgcctaagtaaagaggagacttcatattcggtccgatataatgcaatatcgtttaccgggacgcctgtttccataagaggcggaagcagttctaaagatccttcctctgcccgaaagatcgtaaccgcactatactctgaaatattttctgcaagtgtttttcccaactctcctgcattataaatcttcggcacgatatctgcaaacagtccgtgttcttttaatgcagccgccgtcgcagaaccgatggccgcgatttttatctgtgcttttcctgcgagcagccttctcatatcccatgcttctttttctaattgttcaaaaaatacatgtactcctataggacttgtaaaaacaaaccattcctctttttcggaatgttgaatttcccctaatgcctttttcagcctctcattcggatcgatcgctactgtatgaatagacggcatctcgatcacctgtgccccgagatttcgcaggcgttttgccagagcggaactattctgcctcggtcttgtcaccaaaaattgctttcctcccaaaatcctgtcttttatccagtgaaactcttctgacaaagaacacacttttcctactacgataatcgcaggcgctttgatcttcgcctcatctgcctgctgctttaatgtttttacagtcgcacacacctgcctttgtctcgcagtcgttccccgctctatcacagccgcaggcatatcttccggcattccggcttttatcagttccgtcagaatcgtttccattgccgacacacccataagaaagatcaaagttgcatttaattttacaagagcctcgtaatcaatgtcgggttttacatctcttctcgtatgtcctgtaatcacatgaaaggatgaggtataatctcgatgagtcaccggaatccccgcataagccggaactgctactgaagaagtgattcccggaataatttcgaaagaaatcttttcatttctaagtatctctatttcttctccgcctcttccgaacacgaatggatctccgcctttgagacgcaatactcttttccctttttttgcttctcttacgagaatctgattgatctcttcttgaggaaccggatggtttcccgcatgttttccgacataaattgtttctgtttcccgcggaatacggcttagtatctctgcgcttaaaagagcgtcatatacgatgacatctgcctcttcgatcaattccgcagtccgcaaagtcagtaatcccgcatctcccggacctgcccctgcgatccatacctttccatataaactctgttccatctttctcacctttccccaaactgctttttcattgtcaaggcaagtctttctccgagacttgaagcgtcttcaatataagaagctgcctttttcacaaaatactgtccgcttttttcattgtaatacagtcctgtcagttccaattcatttccctttacttttgcataagccgcactcggagatgtgcatcccccgtcaagcacacggataaaactacgttctgccagagcctgtactctgctctttttatcatccacatattgacgccacactgtatctttcaaaaattcttttctcccctgaactgccaaaattccctgtcccgcagcagggatcacctcatctaccgaaaagtaccttccgatcaccgcttccatattcagccgcttcaccccggcggctgcaagcaccgccgcatcgtattcttctttgtttaatttactaagtcttgtctgtatgtttccgcggattccttgaaacactgcattcggatacaatttctgaatctgtatcatgcgccttttactggaagttcctataacagcgcctgtttttgtgagtatagacccttcctctgttccctgttcttttttttcacttttataaataagcacatcccttggatcttcccgtctgctgtatgcaagaatcggaaattcagaagattcttccatcggcatatcttttagactgtgaacggcaagatcgatccttccgtctgccagagcctgatctaattcttttacaaaaagtccttttcctccgacagattccaaactcctgtcaaggatcttatcccctgtcgttttcatcgtgatgatctcaactaaaatcgtttggtcacatcgcctaatctgatcttttataatttccgcctgctttaccgcaagcctgctttctctgctccctattctgataacagactgcatgacgcttcgtttcctttctctataatcttatacacagcctccatgttcaggttctctcttactattgacgcaagccggtcatactgttcttctttatatgcgtttctgtcacgcactgtaattttcgacggatctattcctttttttcttaaaactgccgccaaaaatgttttgaccgtttcagacatatcgaaaatcccatgcatataacagccatatacatgatcgctctgcgctccgtcctgccgctgttctccttcctcttccatatagacaagcggaacagtccccttggacaaaaccgttctccccatatggatctcatacccttcataacatacaccgctcatttctgcaagcgctccgcctactttggcaaaccttcctgaaactcttgtccttcttttttcctgttcaaacactgtcgtcaccggcagaagtcccatcccgcgaaccgttcctttttgttctgcccccgtcggatcgctgatcgactgtccgagcatctgatatcctccgcaaataccgaatacgatgcctccttttgccgcatggcgcagtattttcccttccaaaccgttttgcctcatccacaaaagatcgctgatcgtatttttgcttcccgggatgatcacaacatcaggatctccaaattgagaaatgtttgacacataggacacgtcgagttcatccactgcttcaagcggagctatatccgtaaaattagaaatcctgggaagacgtataaccgcgatttttgcaagacctgatctgctctttttccgaaaccgctctgtcaaactgtcttcatcttcaatatcaagatgaaaatacgggataactccaagtacagaagtatttatcttttcttccaacatccgaagtccgggttttaaaatcgatacgtctccgcgaaatttattgataatcgttcctttaacacgctttttttcttcttcctcaagcaggagcatcgttcccgcaagctgtgcaaatacaccgcctctgtcaatatctccgacaagcagtaccggagcatctgccattttcgcaaaccccatattgacaatatcgtctttctttaaattgatctccgccggacttcccgctccttcgatcacaatgacatcatacgtttcgtccaattttctgtatgattccataatcgaaggaataaattcttttttccgcttataatactcagacgcagacatcattccgaaaggtctgcctctgacgataatctgtgatcctgtatcatttgtcggttttaaaaggatcgggttcatatccgcactcggctcgattcctgccgcttctgcctgcattacctgcgcccttcccatctccagtccctcttttgtaatataggaatttaatgccatattctgtgatttaaagggagctgttttataaccgtcctccttcaagatgcggcaaagagcgcctgccagcacactcttccctacattcgacatcgttccctgtatcatgatcggttttgccatctatgtccgcctcctgtctgtttctttctataatctccttcaatgctttcagcagttgttcattttcatgtctttgcttcactgctatccgataccaccctgtttcaagtccacggtaatttgcacagtctctgatcaagatcccgtattgcaaaagttcttcaaacagattgatttcactatatataagaatgaaattagcatctgaagaaacaaaatcaatttttaatatatctaattgtttctctatctccatccgttctatctgtatcatacggcgcattttttctacccggtctttttcatcaagcgccgctatgcccgcctcctgggcgatcaccgacacattccacggctggcgcatcttctccatattctccaacaatttttcatcagatgtcaacccataccctaacctgatccccgggatcgcatatgtcttcgtaaaagcccgaagcaaaaacaagtgaggataatgaacgatgtttattttatcaaaaagactttccggctctttttcaaattcaagaaagcactcatccaacacaaaacgaatctttttctgctcacatcgttttgcggcttcttttaggagttcgatatccgtttttttccccgacggattgcaaggagaacataaaaaaatgatatccacatcttctgttagttcttctaagaaatcataatctatacaaaaaccattattttttttcgtttgatagtattttatttcgcatccaactgtttttaacgcctgctcatattctgaaaacgagggaatggggaggagagctttcttcgatttttctgccaggacaagagtatagagcagttctgccgccccgtttccaaatgcaaacatcctctcgtccacccgaagcctgtctgccagtttttcccttaatttcctacatttacagtccggatatgccgctgactgcaaaagcgctcttttcgccgcctcgatcactttcttagacggaccgagagggttgatatttacggagaaatcaatcatctctccatatgtatatatatcgcctccatgtgtatattgcatattcagtctccttcttttgtcttatctgacgaaaatccggcaaaagatcacatgatgagtacagtgcataattttattcctccgaaaacaaacatcattaacaatgccgtaacatacattaatctccctgcttttataatatcttccgggtcaatcggacgaagatcatctccgataaactcctttttataaactttcccaaaataaactgcatctccggcgagccggattctaagcgctccggcacagaccgattctgtctgggcagcattaggacttgcatgttttcgtctgtcacgcaaatatatcctccatgcatttttcccgtctaatcccgcaagaaaacttgcacataccataaacatcgccgtcacacgggcaggaataaagttaaatacatcatccatcttcgccggtattttcccgaaatacaaatatttttcattcttatacccgagcatagaatccatcgtatttaccgctttatataaaaacccaagaggcgctcctccaagcatcatataaagaagaggagctgtcactccgtcagatgtattttccgctaccgtctcaaccgcagcctttgtcacaccttcttcggtcaggttttccgtatctctcccgacaatcatagaaaccgctcttcgcgcctccttcatatcatttctctttaaacagtaatacacttttttgctttcttcactcagagattttgccgcaaagatctgatagcaccaaaacgactctaagaaaaagcagatcaacggatggatattctgcgccaccctcagtcccgcaaacggaatcccaaacgaaaggatcgctacaataatccataagacccctcctgccgtcatatttttcttatcattttcttttctcagtctcttttccaaaaatgaaatcatatttccgatcattctcaccggatgatacagccataccggatctccaaacagacgatccaaaaaaaatccggtcacacaagcagccaacgacatcatcttccgctccttttctccgcatttttcagcagttcaattccattctcccattccttctccgatacagatacaagataaccgcttccattctccacctgccagttataaaaatcttttttttcttcgtaaagagcgtgcatcaccgccatgatcgtaccgccatgaacgacaaacgccgcatatttcacatgtcgggcaatcaaaaatctgacctgttttttcattccttccacacagcgctttcggaattcttcctgatcctctcctcccggaaacgccgttatccctccgcttttcagccactttatataagcggcgttctttttcagctgctcatatgtttttccttcaaactgtccgaaatcacactctctcatcaaaggttccaaaacgataggacaccctgataaatccgtaccccaaatccgctttgccgtttgtacacaacgtttcatggggcttgcgataatatattccggtatgggataactccgctttaaaaaagcggtcttttccgacaacacttcatccgtacttccgatatactgtcttttttcatttcccggcgtagcaaaatgccggattaacatgattttcaacatattcctcccaaaaaggcgacaacagtcagcatgacgagttcacatatctgtaaaaaatatcccgccaaatctccggtaattccgccgaactgtttaaaactcattttataataatagaaaaatacaagcagcgcggccgttacaattattgcaccctgaacacgaaaaatatagattgctcctgctgccaaagacataagccatatagataagacgatccgcgtcctcttcctatccgccctctcttgaaatgttctcaacaagccgctgcttttcgctgatctgaaacttacgactgaaagtccgctcagcgctctcgatatcggatacatccatacggcaagagacagcgttttaagattcacttcactccaaagagctgccgtaataagaaaataggcgcacagaccgatcactgcaaacgctcctgtatgaggatctttcaaaatctctaattttttctctctgtctttataagaactgacggcatcgatcgtatccgcaaacccatccaaatgaatcccccctgtcacagcgaccggtatcatcgtcattaccgccgcaaaaaagagttttccgcactctgtatatcgcagaatcagctgacctgcgccgaataccagcgctcctataatcacccctacgaccgggaaaaaacacatggcatacctcatatttttttcatcccaatctatattcggaacaggaagttttgaatacatagccaatgcaattatcaaagatttcagcatattcattttctttttgtctcctcatacatcttatccactcttacaacacacctgcccttactttaattcttcgtactgttctactcgtatttcctcaaacgtactcatgcttttatatacggacaaccccatttccaaaagaggcattacggcgaccgctccgcttccttctccgagagacatcccgcagtcaagcagcgccgatagtccaagttcatccaatacttttgacgccgccggttcgcccgaacaatgcgaaggaagcatataaccgatacagtcaggaacaagacgagccgcacaaagcgccgccacagaagagataaaaccgtcaatgacgatcgggatacgaaagattgctcctccgagaaatacgcccgtaagacctgcaatgtcaaaaccgcccacttttgagattatatcgatgggatcaccccgatcaggggcatgaagcgatattgctctttcgattgcggcaatctttcgtcttaatccgtctgcgctaagtcccgctccccttcctgtcattaattttaccggaatatccgtcaataccgatgcaaccgcactgctcgtcgtcgtatttcctatccccatttctcctgttgccaaaatttcatatgacttcgacttcaacattcccacaatctcaattcccgtaaggattgcccggattgcttccgtcctcgtcatggctgcttcccgggtcatattttttgtaccaggtgcaattttatattctttctttgtaacaccgggcacatcagacaccatcccgatatcgatcggaaacagatccactcccgcgatttgagccatcttacatacacttgtctcgctttttgtaaaattttcggcgacaacagccgtcacttcctgcccggtctgtgtaacgccttcttctaccactccgttatccgcacacatgatgacaagaccttttttgtccaaactgtacgcaggacttcctttcattcccgcaatcttcgtgacggcatcctccaatttcccaagactaaataaaggctttgcgatctgtttccatcgcttttttgcctgcgccgccgccttttgatccggaggacagatctgttcaagatattcgttcagccgctttgtcactttttctaattccggttctgattgttctttcatatttttcctgtcttctgacatatgattccttctctgcttcttcttatttgcttcgttttctttggcaaacagtctgcactgatctgtaaaacgctttgcaaactgcggacaggacggcatatataaatgaggataccccgcaaacaaactgccttctgtatgaacacatttccaggacgttcttcgatccggcttcgctgctgttaaaccttctccgttatccgaactgtcccaataatgaaactcatgccctttgatcacttctccttgtttcagataacagctttccttttgttccttttcatgacttaactccacgtagccgaaacgcacaagctttcccgccggataagtcctgccgttcaaaactcctgccatctcccatacaatatgcctctcatcttccatctcctcatgaagatacataaaaccgccgcactctgccagacagggcattccgcttctgatcgcatcttttaccgaccgacgcatagaattgttctcggacagttccttacagttaagttccgggtaacctcccccgaaaatcaaaccggaaatattttcgggaatcttttgatctctcaacggactgaaaaacacaagttctgctccgctttcttccagaagttctaaattttctttataataaaaacaaaacgccgcatcctttgctaccccgacccgaaccttgccgtcgtctgagcttttatacttttccatatcgcattgaaacggctcccggctctgcccgtttcgcatattctgcttgatctgccctttttccgggctatttgctttctgttccccttgtgcgatctgatacaatctgtcaagatcaaccgtctctgtcacaatatttcctgcctttgtcatctgttctttcagatgacagatctcctgcggagtaacaaggcctagatgacggctttccagacaaaacgcttcatcctgcggaatgtatcctaatacgggaatatcatacccttctgatttcaaatgatcttccagcattttcttcaacctgggatacaacatttttgacacccggtttaaaatgatcccctgaatattgctgtctttttgaaaggatacaatcccgctgacaacagcacaaagggaaagcgccgcccctttgcaaggaagaatcaatactgcgggaatgtcaagtgttcttgctacatcatatgagcttgccgtaacagaatccagtctcatcccatcataatatcccatcacgccttctgttataacaagttcagcatctgccgcatgttttgcgtattcttttctcagctcatcttccgaagaaaagaataaatccagattttttgaatctacgccaagcacttctttatgaaacatcggatcgatatagtcaggtccgcatttacaggatgatacttttttattttgagcctgatatgccgccataagtgcgcacgccgccgctgttttcccgcttccgctggagatcgccgtgatcaaaattcccgaagccatcttcctttcctcctgctgaaataatatagacaggattcattcctgtcatcatatgatactgccccagaacacgagaacgcgacgcacatatctgtgtaacttccatatcggtcagtaacccttctttttccgcgtccatcacatcccggactgtctcaagcgatatagcgctgatcacaatctttacatttggatttttctgtttcacaacagtcaatatttcttttaaattaccggaacttcctccgataaacagatgagtcggcggttccaaatgcacgagcgcctccggcgcgcttccttctatgatccggattccgtccgtcctgaattttctcctgtttttttccaaaagaagcaccgcctccggattcttttcaatggcatacacttttatctgctcacctgaaagagccgcctccacagatacagagccggttccggcgccgacgtcatacacaaccgcatcttctgtaagctccatgcgggcgatgctgacggcgcgcacttcttctttcgtcattggaacttttcctctgacaaacgcatcgtcacggatatgcggaccacgccgctttgccggattctcattttccaccaatgcagtacataacccccgcacttcttctatttgaaaatctgccgcttttttccttatgatcttttcatcttcataagaaagatctcttccgaccgaaaggaacagttctcccattccatactccaaaagtgcgttcagcagtcgttctcccgcatcttttccgccaagaagaaagaacgtttttctgttcgtatctaccgtctgtataaacagcgtttcatttccatgaagacttacgatctttgcatcgtcccatgaaacaccgagttttgcggcaaaataaacaacagatgaaatccccggaatcaattcaaccgtacaatcgatctctgaatgcaaaagggccgcttccagtttttttgctccgctgtaaaacccgatatcaccggaaaacaaaaccgcagtccggctgcactcctcatgctcttttacataagaaaaaataaagtcccaccgatattcacttaacatatcccgccgttttatatcttttttctgctctaaaaaacatgcggcgctttcaagcatccgtgaagctccgatcagacaatcgcttgcaaggatctcttctttcgctctttcggtcatttcttttactccgcctgtcccaatcccgatcaaagatacttttctttttttatcacacatctttatagcctctcggagttaccattttcccgtttaactctttcgtatttgagtttccgatataaacagtcgtaaacatatctgcctgtgttgttttcagctttttaagagtcatgatctcatataactcgccttctcttcctatatttttcacaagaccgcacaccgtctcttccgaccgtgattttagaatgatctcacaggctttctcaagataatccgctctcttcctgctggacggattataaagacagattacaaaatcagcctctgccgcggcgcaaagtctcttctcgatcagctcccacggagtcaggagatcgcttaaactgatcactgcaaaatcatgcatcaacggcgcgcctaaaacggctgctcctcctgatgccgccgtgatcccgggaacaatctcaatcccgatctcagggtaatctctcccgatctcataaatcagacctgccattccataaatcccgctgtcaccgctgcataccattgccacgtcaacgcctttttttacctcctcaaacgccatcttacagcggtcggcttcttttcgcatcggagtgctcaagaactgcttttccggaaataaaggacggacaagatcaatatataccgtatatccgataatgaccggacatgcgtcaagaactttttttgcctgtactgtcatctgatctcctgctcccgggccgagtcctacaacatatattttattcattctttagtattctccttttctgcctttccaacatgagaagatgctttccgaaattctgttgtaaatgtcggatcatataattttgaccgttcatactttccatctaaaaccctgcctactacaataagcgccgtcttcgttacgcctgcctcttttgcagtctgcgccaatgtttttaccgtacagttgagtactttttcctccggccatgacgccttatacacgatcgcggcaggagtgtcctgttcatatcctccgctgatcagctcttcggaaagttcttttagcatccctgtgcttaaaaaaataaccattgttgtgccatgagccgcaaaacttctgatcgactccttttcaggaaccggcgttcttcctgccatacgggtaattacaaccgactgtgaaattcccggaagtgtatattctgcatcgagcgcagctgctgccgcgcaaaaagagctgacgccggggcacacttcgtatccgatcccaagtctttccaactcatccatctgctctttgatcgccccgtacaggcaaggatcgcctgtatgaagccggacaatgttctttctttgagtctcaccttcttttatcacttccagcacttcttccagtgtcatcttcgcactattgtaaactgcacacgtttctttacagccatatagaagtttcgggttcacaagcgatcctgcgtaaataacaatatccgcctcttctaaaaggcgttgtccacgcacagtgatcaaatcttttgcacccggacctgctccaacaaatgtgaccatctttctctttcctttcgctttcttagcctctttacttttttaatcttttctccgatctttccgctgagtttcgctttcatcttttatgataaacaacgaataatatcccgcctgttcggggatttcttccgtcgaaaaataaagcttctccgaatccataccacagttttccaccatttttgcctctaaagcgttctcgacaagaaaacgtttcacttccgccattttccgtccgcttttcataaatactttcgttccctgcagcctcatactttcttctactccgtaggaagcaggtatgatatgcagttcatcgctgttttctgaaagggaaatgtcaaggcgagccgccgccgcgcaaaaagaagggattccgggaatcaactctgtttcatatcccatccttttcagtcttttgtgtatatacatacaggtagaataaatgctcgggtctccgatcgtaagaaacacaacatcctttccttcatttaacttctctgcggtaaacgccgcgtcttcgtcatgaatctctatcagtttctccctgtctttgatcatcggcataggcagaaagatcacctctttttccccgatctgcgaataaacttgtctgacgatctgataagccgtacactgctgcatatattttggatctgcgttttcacccggctttttcaaaccgctgtctgatacgggaatcgcgacaacatcactttcttgtatcgcatgcaatgcttttaatgtcagaagctgcggatctcccggcccaactccaacgcctgtaaactttcctttcatagcctctttatcttcctttcttttgcctgacaaaacgacttgtctgctcaaacagactgtctgctttcgaggttttccccaaaaccccttcttcatttgaaaaaacaacagccgcaatatccaacgcttcccctgctctgtttgtcagataaaattctattctctccattacgctttccattactttttcgagaagtccgcattctttgagtactcttaatgcctccgatgtattcacacagtccatgaccgaacgcaccgtatgcgaatctgccccttctaaagccgcatgtaccgccaacacttccatcctgcagtctgcctgtcttgaatgggtattcattactcctgccgccagtttgacaaattttccgatatgaccgataaatagaattcccttcatcccgagtaattttgcatcgtcgatcgtatctccgatatagttactgcattttactgttacttcttcgtccacgccgagttcttcacgtaaaaaatccattccgtaatttcccggaacaacataacacctgtcataccctgtctcttttaacattttcatttccagccatatcgtatcagtcagcgctttttcactcatcggctctacgatgcctgtcgttccaagaacagacaggcctcctacaatgccaagcctcggattaaacgtcttctttgcgatcttctccccgcccggaatagacagcgtaatctttattttcccaccgtacttgtattgacggcactcttcgtctaccgcatcggcaatcatcctgcgaggtattttattgatcgcgggaaagcctgtctgctgctctaatcctgcttttgtgacccggccgattccttctcctccggcaagaacaatatgatctttgatttcaaaacagcgttcttccgcttcttcctcttttaaaaatgactcgatcttctcagcttttgcgtatactttcatcccatctgtcacatcaggatcatcgccgctgtatttttcaacagcgcactgcacataatccgcagttctgatcgttgactctacttccaaatacagctcgatccctttcggagtgatcagtttcacatgagtaatctcttcttctttaagaagcatcgccacagcagcttttgccgctgcggcagcacagcttcctgtcgtatatccaagccgaagtcccgaccggttcctcccgatctcctgtttcattttatgctattctcctgatatgctttacaattcttccagcatctgccgtggattttccgccgcttttactttaccgaacactttctcgatcacaccttcttcatcgatcaaataagtagtgcggacaacacccattgttttctttccgtacatattcttttctttccatacatcataagcctgaatacatgttaactctgtatctgaaagaagtgtaaagggcaaaccgtatttttcttcaaatttcttatgagatgcgacgctatccttgcttactccaagcacaaccgctcctttttctgaaaattcaggatataattctccgaaaccacatgcctgttttgtacatcccggagtgttgtctctcggataaaaatataagatcactttcttccctttgtattcttccaatgtgtgtacctttccgttctgatccggcaatgcaaactccggcgctttcattcctgcttctaacatttgtatttcctcctgttttttattttattctttttagcttgttcttacatttccgcttcttcgatatgttctgcgaatatttttctgattccttcaaattctccgagtccttttaaaataacccggacttcatatcctttttcctccagctcgcttttccatgaatcttcttctcctgccatatcattttttgcatgatctccggcaacaaacataaacggcataagtacgactttttttctgcccgatatttccagctttgccattacatttctcaaatcaggaaagctttccactgttccgacaagaacctgctgatatccaagcgagtgaaacgtatactctaacgtaggatatgcggaatttgcatggtgatctgttccgtgtcccatcagaacgagcatttcatcttcgccgatcaccgttttttccatcacggcatgaattgcttttttataatcttccacagaactaagaagcggtttccctacatatacttttcggaacaggtgcatatgttccatgacttcttgcagcatccggtcattttctatcccgttgatcacatgagtcggctgaacgataacttcttcgatcccatctgccgccattttttctaaagcttcgcctactgtttgcacctttatatttgcagtgcgctttaatttttttataatcatattgcttgtaaacgccctgtatacaacagcttcttcaaacgtttttgcaaactccttttcgagcacgtcaatcgtcttttccatcgtgtcaatatgacttgttccgaaactgactgccagaattccttttttcattttacatctcctctcatttttatttattttattatttccctgttttcttaaattccctttgatgttttctatttcaaacttttcagatcaagtaagccttgactccagttcttcccatgtgcgcggaggctcttctttgtctgataagatttttttctctgttaatttgcgatacatacgaatgactgtcggtatttccaattctgcttctttcaacgcttcctcatcctgacagatttccatcgtctctgcatggcgtatcacttttccttcatgcataagcacaatctcatctgcccatccacaggcatactctatatcatgtgttgcgatcagcaccgtaattcctttttccgtcagcctctcgatcatctcattcacttttttcgtatgtttcatatcaagcgccgccgcaggttcgtctaaaatcatcacttcaggatgcataaccagaatgtctgcaatcgcaacctgttttttctgtcctccgcttaaagcatgagtcggctcttcctgaaacgcagaaagccccagttcctcgattatctgtctgaccgccttttcggcagtttcttcatccgcccccatgttcaatatcccgaaagagatttcctcataaacacttgcagaaaaaagctgttcatccggattttgaaatacgatcccgacttttcgtctgacatctaaaagtcctttttttgtatattcgatcggttttccatctataaaaatccttccggattccggtcttctgatcccgttcaggcaaagaaaaaaagtagattttccgcagccgtttcctcccataaccgcgacttttttccctttacgaatgttcaaactcaagtgatccaatgcctttattttacttccctcatatgtataatctacattttctgcacgaatcacatattccgtttctgattcttttttttcttcctttttcaatgttctcttttttgttttcatatctttcattttatccatcatatcatccgttccgccgcagctacaattatcaaaacaagctcaaatacagccaacaatatcatttctttctttttcgccggagtgttcctttctagcacattgattgttccgtcataccctcttgcttccattgcatcatacagcgcatttgcttttctcaaagaaataaagaacaaagcggtcagcatctttccgaatgcacgaagctgtgtccgataatctctatttccaagtcttgcctcctgtgctgtcataattgcagacgcagtatgaagaagaataaatacaaaacgatagatcaacatcatcaactcaatcagaagcctcggcatatgcattttcctgagcgctcccagtatatctgtcatcgttgtgttcaacgacagaaaataaagacatgtcactgccgccagcgccgtgatacataaattgactgcccaaaaagccgattcacggcttgccgttatatatatttccccgaccggcacggcaaatgcatccataggaactttcgatagatttaaaaaaacagctcctgttccgacgatcaaaaatacgatcggaatcatcagcagtcgaacatagcaggaaagaggaatcttcccctttcctaccgtcaaaattccatttgcgataaatacgatcaaagccgccgcataggagcgggtcaaaacacagatcataagagaagaaacggcatacagtaacttctctgccgcactgacatatcttaattttgaccggtaacacaatttatctataatgatcattcatcgctcctttttattctcctatgacttttgtttttccctcaaaacttcaaaagcattatcgcccagactatccgtccattttttacgttccacgaaccgtcccattataaatgcgatgattcccacgcctatccctgtctgaatacagaaaataagactttctatctctccgggcagttctctgtctaacgcagtctccaaaaccggagtaaaccacggctcatattctccgtgaatttcttctaccatcacgcttcccgcatcatcagaaccgccgaattctgcttcttttaaaacgaaaagaggaacaacggcgattaaaacagcggcgatcaataataaaatcactgtttttttgtttttactcatcttgtgtctccccctttttatttttgaaaaatcctatacttcttaattccggttttgcatatgtttccagacctatcacaatgacaactgtaaggataccttctatcacggcaagcggaatctgtgtaggcgcaaatactccgagaaacttaacagccgacgctccgacgcctcccgcttcagacggataggcaaaagcaagctggatacttgtcacacaatatgtaaacagatctcctaaaaatgcagccaaaaaaataccgactcttctgtttacatttattttctgacataatttataaattccaaaagagacgaccggtcctgcgatcgccatggaaaatgtatttgctccaagtgttgtcaaacctccgtgagctaaaagcaatgcctgaaaaagcaatacaatgacaccgagcacgctcacagatgccggtccaaacaaaatcgcgccgagccctgttcctgtcatatgcgaacaactccctgtaacagaagggatcttaagcgatgaaataacgaaaataaacgctcccgacattgcgatcagcgttaaatttcttctattttcttttactttgtttttcaatgaaataaatcctgcaatcagaaacggcaggcagacgacgccccaagcaacgcagtatttagccggaagatacccttccataatatgcattgcattcgctgccgggactatggcaaataccgccgcaaacacgatagatgcctttagtaagattttttctttttttgacatgttttttcctctccttgatcataatcccgtaatctacggactcatttgaaagtgaatattctgacttagggatcgatgcaaatattccgccttcccacagaatcttattccgcagtggcaatatggaataccgctcctccaatacagcaacgggtattgtgcaggattctcacctgacttcctcacagatatctcaaagtaacctaaccttatctaaagtccggtacaaagagcaatctatacttctctatctgtttatctttcaaacgtatgccgagcccgactaatactcaatccctcttctagcccggattccccggtcgtaagggtgtttcaccttgcagatctcagatacataatccgctttctctacaaggcgaaggtcaggatcccgtcctgttaagacaacttccagacctgtcggtttcttttccagaaaacaaagagcttcctcgtttggtatcaatccataccggtatgccgccataaattcatccataacaagtacgtcataagatccgccggaaacttttctcaagacctcattccacagagcttcatatagcttctttacctcttttttttctttttctgtcagtgttttatagaaaccgtaagatttctccagatgtaaaacttcaatgtccgaaatgctgtcgagaatgtttaattctcccgaattctcatttttaagaaaacgtgcaaaaagcactttctttttgcagcccgcagctctgaccgccagcccgacggctgaggacgtctttcctttgccgtctccacaataaatatgaatcaaacctcgttccatcgtcttttacctctctgtaaaaatcctttatattttaccacaaatatacactctgtgacaacattttgtgttatactaagctgaatcggtatacaccgtacataaaaataacttttccgtatttatattatcggaactgtctttatgaatgtaatatcaaaaactatgattaaatgataaggaggagcattatgaactttacttttgcccacaacaacttaaatgtctacgatctggatgcatctttgcgattttataaagaagctctcggtcttactgtcacacgtacaaaagaggctgacgacggcagcttcaaacttgtttatctcggtgactcgacaactcctcacaaactcgaactgacatggcttcgggatatggaccgcccttacaatttgggagataacgagatccatcttgcatttgaaaccgatgattttgatgcggcacacgaaaaacacaaagagatggaatgcatctgttttgagaatccggggatggggatttatttcatttccgatcctgacggatattggctggagatcgtacctaaaaatttataatattaaaaagggcagttttttatgatcgctgaaaaacccggcgcacagagacgccgggttttccgatttccaaaaaatatattatacaaactatgtccgaaaggagttttcttatggaacattatacattgccccatcggcacaatcagtcaatgtctcagttaatgagtcatttaccgaatattgaagagtttcagacgaccgcagatatatttaaacaactaagcgatcctacccgcatccgcatcttctggatcttgtgccactgcgaagaatgtgttatcaacatcgcttctatgatggaaatgagcagtcctgccgtcgcgcatcatttacgtctgcttcgttcaagcggtctgatcgaatcccgcagggacggaaaagaaacatattaccgtgccgtcgactcgaaaaaaacacaaacgcttcatcatatgatcgaaaagatcatggatatttcctgcataaacaaagacgtataaatcaaaatttaactcagatctatagattttgaactctaagcgccctgactgcatttaagaccgcaatgatcataacccctacgtcggcaaagatcgcaaaccacatatttgcaattccaagagcgccaagtccaagacaggcaaatttaattgccaaagcaaatataatgttttgatatacgattctcagacatttttgagagattttaatcgctttggaaatctttaacggatcatcgtccatcaacactacatctgccgcttcgattgccgcgtccgatcccattgcccccattgcaattccgatatccgcccgagtcagtaccggtgcgtcattaatgccgtcacctacgaatacaagcttttcttttccttctttttccaagagcagttcttctactttttgtactttatctccggggagcagttcactgtacacttgatcgattcccaaagtttttgccgtctgctcggcagctttccgcgaatccccggtaagcatgactgtttttttgatccctgcttttttcaattccgcaaccgcttctttggaatgttctttcacaacatcggaaatcacgatatgccctgcatactttttatcaatcgccatatggatgatcgtacctgccgtatggcattcatgatacttcaaaccgagttttttcatcagcttgtcgttacctgccgcaacttcatgaccgtccacgacggctgtaatcccatgaccgctgatttcccggatatccgaaaccctgtttctgtcaatttcctttccgtatgctttttgcagacttttgctgatcggatgtgatgacgcacattctgcaagcgccgcatattctaataatttttcttcttccagttcattgtgatgaaccgcgcttacttcaaaagcgccttttgttaaagttcctgttttgtcaaacataacatattttgtctgagacaatgtttccatataattagagcctttgatcaacactcctgctttgcttgccccgccgattcccgcaaaaaagctaagaggaatactgatcacaagtgcacagggacaactaatcacaaggaatgtaagagctctgtaaatccacacgccccactgagccgcctgtccgagaaagaccatctctattaccggaggcaagagtgccagcgccaatgccccgtagcaaactgccggagtatacactttggcgaatttggagataaaatgttcggattttgatttcctggaaccggaattttccacaagttccaaaatcttagacaccgttgattcttcaaactgtttcgtagtccgaactttcagtactcccgtcatattaatacagccgctgatcacctcttctccctgacgcacatcacgcggaaggctttctcctgtcaaagcgcttgtatttaaactggagcttccttcgacgacaatcccatcaagcggaactttttcacccggctgtactacgatgatacttcctattccgacttcatcaggatctcttttttccagtttcccgtcacattctacatttgcataatccggtcggatatccattaatgcactgatatttctgcggcttttcccgactgcataactttggaacaactctccgatctgataaaacaacattaccgcgattgcctcgttataatcgccgctttttgaatagacggcaagagcaaaagctccgattgttgcgactgccatcagaaaattctcgtcaaacatgcgccggttcaaaatacctctgcctgcctttttcaaaatatcgtatcctatgactaaatatactgctaaataaagtgtgaaccgcaaaattcccgttacaggtacaaaattcaatagaataacaccaaatgccgctgccatgatcctcgtcaacatttttttctgttttttactcattacaccttgcatcctcctcgctatttaatatacacatatgttcattcgttcatatgttgtatataaatctgcgccctttgccatcagcatatcgggcgctcctttttctttttagccactttcattcaatctttgagaagtttcttaaaattcaatttcacaatccggctctatttttttgcaggctttcagcacatctttcataaccgacttcggctctcgcccatcctcgaactgtacagtcattttctgtgtcatgaaattcaccaccgcatcttctactccgccggtctttttcgccgcatcttccatcagattcgcacagtttgcacaatctacttcaattttataagtctttttcatattaaatacctcttttcttttaaaatctttttatttcaacaattaagcatttatttaattgttatgcttttactatacacctatcttttttctctgtcaatccttaaaaatgaaatctattaaaaaaagcaggagctgtaaaattcacaactcctgcgatcgacctatgtattattcacttgattttatacatcttatcataacttaccgactgactttgtacgcctagcgacgaacataaaccattcctgcctgtaccggtcctatcttaacattctctcccggctgaggcgcatggatcatcataccgtttccaatgtaaataccgcaatgatcccagttcgtacatacatcgcccggctgaggatcactgacgcgaggccatcccataaatgtatacgttgttcctacacgtccataaccgcctgtcagacaatatcctacaagtcccgagcagtcaaaagagttcggtcctgtcgctccccacacataagggagtccgatacatccatatgcacggtctacaataacatttcccgttaccggatcgtacggcgccgctcctgaaccgcctgaacttccgttattcggattggaaggtgtcaccggctgttccggagtcacattgttctttgcttcctcttcccgtctgcggcgttcttcctctgcttttcgttcctcttcggcttttcttgcagcttcctggatcatgccgtccaaattggtgatctcatcttttttagaattgatcgtctcggtcagagtcgcctgctcagcctcgtactctttttccgttgcttccagattcttttgctcttcttcaagtgtcttctgcaaattttcaatctctgttactgtatttgtatattctttcagttgttcacgatcatattcatgcatcttctgcgaatactctgcctgactgagcatgctcgacatatcgccggatgtcataactttctcgactgtagcgctgcctgttccggattcgtacataaacttaatccgctttttcatcgcctcatactgttcttcttttttttcttccgcagcttccagatctgcctgcgcctgaataatcgcctcacctgtcttaatcagcttaagttccagttcattcgccttttggatcaatgtatcaaactgcgtctgaagattagaaagctcgctttccgcttctgttttctgatttttcaaattctccgcatcttctgccggatttgcaaacaccggcgtcactgctaatgagcaagccaaagccgccgtcagaaatgtgctatgtaccttttttaatctcatactgccacctttcctcattttattatctatttccccacataacagcatcatacaacacaaccgtccgcttttcaacaaacttaattaaaaaaatgaaaaacatctgtcggaaacttgtactgtaatagatgccaatcaaaaaaatgcaggtttttcttcttattttacgattcactatcgaataaataataacaaatcacccgcattttttcaacactttttaatatttttgtaacatttcaaatgttttgtatcatttttctttatttattaccattcactgtttcctatatacaaacaaactcatatttcatcagccatcgctcgatcgcttctttctcgcctcggactgttccctgaaccatctcgggttttccgccgccgcgtccgtcgaatcttttattaaactctttcgccatttcacgtacatcttgttgacggcttcccaacacatatcgatacccgtctttttcatttccaaagaacactgcgcaaatacaatgccctgcgtctaaaacataattcatcaacatacgcatggaatcaccgccgaattcttccgtaaaaatgcaaactgcatctttactttccgaaatcatgtccgcatacgctttcactaggcgccgctctttttctgcaagttcatatttcagctgattcgtctcttctgccaaatgcgcaaccgcatctgcaatctcattttctttcgcacaaagaagcctggaaatttcttttgcctgcgcttcctttctcacataatccgaaaacgcgcggactccgcacagcatagtgatccgcactccgcccttataacgctgcgcttgaaccagcttgatcagtccgatctctcctgtatacgtcacatgaggagcacagcaggcacagcagtcataccccggaatttctataatacgtacctgaccctcgatctcgatcttactccgatattctatctgagacagttcctccttcttcggataatgcgtaaatactttcaggtttttccacacagctttatttgcctccgcctcgatccggcgaagttcctcttctgtgatctcaccgtcaaagtccatcgtacagtcctcactgccaagatggaagccgacattattatacccgtatgcggcgtggatcagccctgaaacgatatgctctcccgtatgctgctgcatcttcataaagcgttcttcccagtcgatacttcctttcaccgcagttttggcttcaatgaaaccgtccgttatatgaaagatacgcccgttcctttcacggacatcgagcacttgaactttctttcgagccgtttcatccaagccgcacgtatcatcgtctgccatatatagcactcccgtatcggcatactgacctccgccttccggaaaaaaggctgtcctgtcaagttctatttcataatattcgcctgcttttccgtccagcctgccaaacgaatccttcacctgctgcctttttgctctgacacacgaaagaacttctgcatcgaactttgaaagatgactgtctttataaaacagtttttccgtcatttttccattacatcctttccggcgcttcaaatccaagcaggtcaatgcacgtctccaacacgcgctttgtcagtccgaggagcgcaatataaccggaacgtttctcttcgtcttcctcggagaggatcttcgtctcatgataaaacttattaaattcattcgcgatctcataaatgtaagcgcacaatttatgcggagcagtctcttcgcatactgcctcaaacacatcgttgaacttcaagacttgaagcataagcgccttctcatatacatttcccgacggacggatcgaaagtttctctgcgcttcctccgttttccttatactttgccaaaatggacttaatacgcacgattgtataaagaatatacggacctgtatttccctcaaatgaagtaaatctgtctacgtcgaatatataatctttgcctgcctgattcgacagatctccatatttaattgccgcaagtccgactatgcgggccgtctttttcgcttcttcttcctccactgtacgattatccataattttcttatacatttcatcgttaatttcgcggatcagattttcaagacgcataacgccgccctcacgggttttgaacggttttccgtctttcccgttcatcgtaccgaatccgagaaattccaatcttgtattcgggctcacgatccccgtcttttttgcacagcggaacacctgtgtaaagtgaagttcctgacgtttatctactacatagataacttcgtccggctgataatcttcttccctttgtacaagtgttgcaagatctgtcgtatcatagagcgccgctccgtctgactttaagatcatacacggaggaacttcttttttatccgactcttcctgaacatcgaccacaagagcgccctcgtcgtaacgcgcatagccttcttcttttaacatctgtaccatatcaggtatatatttctgcgcgtccgcctcgcctttccaaagatcaaattctacattcagtctctcataatttttcttaagatctgtaaccgaaacattcatgatgtgattccaaaccgctctgtatcctctgtggccgttctggagcaaatatgtcgcatgcaacgcttctttcctgtattcttcgtcttcttttgcatatgaacttgctgtcggatatatctcctccagttcgccgatcgtaaacggagcttccgccggatattctcccgtaaaattttcatcaaaatacggcagctccggtttgcgtttctttaattccgtgatgataagtcccatctgatatccccagtctcccagatgaatatcaccgatcactttgtttcctttaaaacgagtaatccgttttacgctttcgccgataattgcagaacgcagatgtcctacatgaagcggtttcgcaacattcggtccgccgtaatctatcatgatcgtttttggttcttccgcttcttctactccgagtttttctgtttctgacatttgatttaaataatccgcaacactttgcggagcaagtttcagattgataaatcccggctttacaacttctaccgtctcaaaataagaactttcctttaaatataccgccacatcttccgcaatcataaacggggcttttttatatttctttgctcctgccatcgcgccgttgcactgatattcgcacaaatcgggacgatttgaaagagttacttttgcaagttctttatcataaccggctttttcaaaagccgcttccatttccgttgtgatcaattccaacattgttttcaatttttccacactcctttatatagaaactctttatcatatgaatgctattctaacatgtatcagttttcacggcaacaaacaacttgaaaacactttacattttgcttactttatgctaggataattaaagttgtttaacacaacgatgcgtctgtagctcagtggatagagcaatgccctccggaggcatgtgcgacggttcgactccgttcagacgcttttttcatgctcttttacaatccgttctttcatatcaggatcaaatttccctgcccgaagcatctcaatttcatatttataaggagcatatgatttctttggattttccacagatggtatatatggcgtctcaagtattttcggaacatccctaaagtccgcatgatgaacgatataattgatcgcttcaaaaccgatatgtccgaatccgatgttctcatgcctgtcctttgcagcgcctggaacattcttactgtcgttaatatgaaatacggcaatctgatcttttcctataatacgatcgaactcttctatcacatcatcaaaatgatgaataatatcatacccactgtcgctcgtatgacatgtatcaaaacaaactctcaatttatcgctatattttaccccgtcgtaaatcctggctaattcttcaaacgtacgaccgatctccgatcctttccccgccattgtttctaacgccacacaacaatccatatcctgcgtaagaacttcgtttagtccttttatgatctgctctgttcctatgctgactccttctcctacatgggctcccggatgcagaatcaacgtatggcttctgcagcttaccgtacggtctatctcctttgcgagaaactcaaccgcaagagaaaatgtttccggctttaccgcattgcctaaattaataatatacggagcatgaacaatgatttcttgaatcccgtgctctttcatatattcccatgcaggatcgatatttaattcttcgatttctttccgcctcgtattttgaggcgctcccgtataaaacataaatgtatccgccccgtaagatactgcttcttttgcagaaccaagcagcatctccttaccactcattccgacatgtgaacctattttcacaatgttatcctccaatctatatttttataagctttgcaaacaaagcaaacatttttctgactcctgcagtatcaaactgcaccgtcacctcataatctcttccaccctctttaatctccgtcaccgtgccgtctccaaactttacatgccgtacacgatctccgactccgtaagagagtccctccgactttttcgccatcagtccgctccccttttggatcgcggcaaatgccggtttctgagcatacgcagatcttttgtatccactgacctcggacgaatacgtcctcttctctcccaaagaaacattttgagaaaaaccgccttctcgctttcctgtatcaatcaatgcagaaggcatctctttaatgaaacgggacatactgttatattgtctctcacctctgaccaaacgcatacgcgcgcaggtaagagtcaatttttcttcagcgcgggtcacgcccacataacaaagtcttcgttcctcctccaactcttccggatcatctccgctgatcgacatataacttgggaacaatccatcttccattcccgcaagatatacatgtggaaattccagacctttcgcactgtgaagagtcataaggatcacgtaatcccgatcttccgctacgctgtcgatatcagcgacaagagccacctcttcaaggaaaccgctcagcgtcggtctttctcctctgtcactgcagctttcctcatatacggccgccttactgacaagttcgtctatattctgcactcttgcttccagttcctcaggatcatccgcttccagactttccgtataccctgtcttctcgatcacttccgtcagaagatctgtcaccccgctctcttccgatcttcctttaaaatattcgatcaaagctgcaaatgaatcaagtttcgatgcgctgcgtccgatcccgggaataaggtccggagctgaaagggcgtcataaaaccctattcctctcgcagcagccgactcctgaatccgattaatcgttgtcaaaccgatcccccgtttcggaacattaataatccttctcacagccagatcgtcttttccgttatcaatcgtttttaagtatgacaaaacatccttaatctctcttcgggaataaaaattgatgcctccgacaatcttatacggaatattcatcgcgacaaacttttcctcaagaagacgcgactgcgcgttcgttcggtataaaactgcatgatcactgtaatttgctccctgtgccgtttcgtccttaatatcctctgcaataaactgcgcttcgtcatatgccgtatcaaactgccgcagacggatcttctcccctttttcattatcagtccaaagagtcttttcttttctgcctttattgttgcggatcacactattcgcaacttccaatacattcccgacagagcggtagttctgttccagtttaattacttttgcatctgaaaattctttttcaaaatccaaaatatttcgtatattagctccgcggaacttatagatcgactggtcgtcatcgccgactacacacaaattcctatactttcccgcaagcaggctgacaagccgaaactgtacggtattcgtgtcctgatattcgtcaaccatgatatatctgaaacgttcctgataattctccctcacatcaggctgcgtttccagaagctgaactgtctttacaagcaaatcgtcaaaatccaacgcattattcgcccgcatctgcgcctcatattctttatagacttttgcgatcttaagctgtacaaaatctcctccggcattcaattcaaactcttccggaaggatcatctcgtttttagcagaagaaattaccgataaaagcatcctttctttaaaccgctttgtatcaatatctgtcttacgacatacttctttcatcagcgtcttctgatcatccgtatcataaatcgtaaatctgttgtcatatccgagacgatctatgtatcttcttaagatccgtacacacatggaatgaaacgtactgacccaaatactctctgctccgatcccgacaaggctgtctactctctgacgcatctcttccgccgctttatttgtaaacgtaatggcaagaatattccatggattcactcccttttcctcaatcaggtatgcaattctgtgagtcaaaactcttgtttttcccgaacccgctcccgccaggatcaaaagcggaccttccgtatgaaatacagcctccttttgaggtttattcaacgtatcatatacagccatttatatgctccttatctttctttttctcaattacccgtaaaatatttagttcaaataacgagtgtgtattgttcttattatcgaacatattttcgttaaagtcaaccttcttttttcgttcatttatcccatgccaaacgcttccatatcgttatcatttatcaaggcgcactcctgataaaacggctgataactacatttttatacaaaaacaacgatgggaaatcccggttaataaaggtttagaaaaggcttgccatctagttttcactactatataataaggatatcgaggtgatattatgaaaatagacatgacagatctgttaaacagcataacagaaaacttaaaacgtattgattacatcaaaccggaagaaataccgaatattgatttatatatggatcaggtaacaacttttatggacgaacatcttgccggaacaaaacgccgtgacgaagataagattttgacaaaaacaatgataaacaactactcaaaaaataatcttcttcctccgtccgtcaagaaaaaatattctaaagaacatgtacttcttcttatatttatttactactttaaaagcattctttctatcaaagatattgaaaccgtacttgctcctctgcgggacaaatatttttcagacgaggcggcgcttagcctctccgaactgtataccgaagtttgcaagcttgaaaaatcccgtatcaagccgctttccgaatccgttcaagaagcatacgaaagttcattctctgctttttcaaatatagaagatgacgccgatcaaaaagaacttcgtctttttgcatttatttgctctttaagctttgacgtctatttgaaaaaagttatgatagagaaaatcatagacgaactttctgctcaaaaagaagattgacgagtacaaaagtacgtattaaaaatgccggacacgcatgaacgctccggcatttttttattttttatcaattctttcaaaaaccatgtcatatccatcattgccgtaattaagagaacggttcacccggctgatcgttgccgttgaagcgcctgtcttttccgcaatttcaagataagttttctgctctctgagcatttttgccacttcaaatctctgtgacagagacagcagctcgttaatcgtacaaatatcctcaaaaaaagtataacattctcctttatttttcagactgagaatcgcttcaaaaagatagtcaactgcctctgtcctgatttttttactcatataaacttctccttttcaacaccgtggcatatatccgagcaacctctgcatccacagcaattatttcaagcactgttatattttagcacattaaattcttgaagtccatacgttaatcagttaaatttataaagttttacaaaagtaccttatccctttcatctgcatacaaaagtccgctctctcctacataccgaaagtgttcatattcaaatattgttttaatacatcaaattttgtcgtaacaacaagttcctccggaaaatcgcaaaatttaagcacttcttttacataagtaaaattgcctgcatctacatctacatgtgcatcactgcctgtcgtaaccggaacatcatactgtttacaaagatcaagcattgtaagaatattttcacgagttccctttctgctgcttgacggtctcatggaagaattatttacttccaaaagcgttcccgtctcttttgccatcttcacaagacgttcgtaatcaatctgaaaacgaccgtcatcaggatgcccgataatgttaatatacggtttcttcatcacagcctcgtatgctctcatattttcctcttctgtgtgccccatcccatagcatggcggatgaatgctcgcaataactatatccagatcacggcaggtactttccggaaggtcgatcctgcctgtttcatccattatatttacttccgctcccattaagaggcgaattcctccgcattttcttggaacgacatccaggttttgaaaataaaacaacccgcacgttcccggcattttcggagcatgttccgtaagcgcaagcgcttttaagccttttgcttctgctgccgccgccatttcttttatcgtgctgtatgcatgtccgcttgccagcgtgtgtgaatgtgtatctgcttcaaatctcataatttctcctttcgcctttgttacaaattctgctgtcattttttgcaatatctgtataattatgacgctgttttttatcttttaattttgatatcatatcacatatcgcgctatattttcgatcatatttgatatttttcgatttattgttacatttttcattgttctaactcatttgaaatgttataataaaaccattataaattcgatttaacgaagagagaggagtattgatttttatgaaatgtccgatatgcggaaacaaacttgagatcaaaaacaaacaaatcggcactgacaacagcggagatcctgtctttaatgaatatgcagtctgccgtgactgtaaaaaacagtggaatttagacaagcaacgtgcaaaaaaagcagcggcaaaggcatctgccaaaaaagccgaagcggcagataagaccagccgcaaaaaaaacgagagcgacgttgctcaaaaaaaagacgaaaacaaaatcaaaaaggcgcacaaagagccggaagcagctcataccggcagccccaaaaaacgcgctgctgcagaagcttccccaaaagcttccgaccgggtgaagtcacctgcgcaaaatcaaaaacggcggcctgatgaaaaagcaactgacgagaaaacagttcggattcaggaaaatcccgaaaagaaagtcccgaaaagaaagccttcatccaaacaaactactgaaaaatcagctccgaacgaagataaacggtacagtaacatcccaccggaacaagtccgcacaaaacgggagaaagctgttaaaaaaggctatgatgatatgcttgcaacaggagttcttgatactgacaaagtaaaaaaagcctcctcaaaatcatccaaaaataaaaacgacaaatatgacacaaaagcttcgcgtaaaatgcctgaaccggaaatcgacgattatgaagatgattattacgaaagcgttccgagattccgcgcagtgcgcatcattctcgggatcatctctctcgcaggattcggattctttacttataaaggattcatgaccggacttaacggcacaacagacggcggcggcacaagcggcactttatacattatccttgccctttgtatgctcgtatcttcacttctctattttatcatgcaaaagtcaaatacgatttttgctttccttcttccgatgcttttttatctcggaagcggcgtatttgcatttttgaaacgtggagatgatctgcagcttctcatcgcagctattgtaagcggagtattggcaattatttcactcatacttgcgatcacttcccgcggaggatctgattatgatgatagtgaagaaaattatgatgaagcctttgaagacgattatgccgaggaagaatttgacgattagaaagccataactgttttagaaaaactgaaatttaaaagcagagcgttacttacaggaatccccaaaaccgggagacttgcgtatcgctctgtttttatatccttttcactgtacggttatattttacatatattacaataaaaccaaatcatctggagatttcatgaaaaaacaacttttaacctctctttttgccttccttcttgtattttctttgtgtatgggatgctctaaagccgaaaccggagataaaacgacagcttccgactcctttgaagtatcgtctcaaaaaacttcccctgtaaaaatcacactaaacgaagtggctcattctgttttctatgctccactatatgtggcgattgagaaaggatacttcaaagatgaaaacatcgacctcacacttgtcaccggatttggagccgataaaacaatgactgccgttatttccggagaagccgatattggatttatgggatctgaagcttccgtttatatgtacagcgaaggagcttccgactatgtcgttaattttgcacagctcacacagcgagccggaaactttctcgttgcacggcaagacaacgagcattttcagtgggcagatctcaaaggaaaaactgttctgggcggtagaaaa

SEQ ID NO: 7618 - DNA, 76306 bp, Unknown
  gut microbiota DNA sequence
aaatgtttattaacaatagagaacagttgcttcgcagacttctttctgaatgaaaaaaagataagcatgaggagaaaagaaaaatgaacaataatcgaggcggagaaagaacgatttatgatgaatccctgttcagaatatttctttggtcaggatttccaatatttatgattttgctgtttgcctgtgtggcaattagcgggattgtcttcatttataggcattcagatccagaaggagtaaaaattattattttttgttttgcggttttaattccagtttcttatggaagcccatttgttagtttatttaaggcgtggaaacaacaacataagattgggattttttggaaagagaggacagatcatcatcttccagaatggaaaagagattggtatttgatttgcgacagaggtggatttattcttgaacatagaagttacataaaacggattattggctgccgtgaggaaacggaaagagcagatcatgcacgaggaaaagtttattatataacatttgaggatattgatgggaaaaaacacacattgaaattttcttatgagtcgtgggctttggaatttcagaagtggtttgaaaagcagacatatgaaaaagaaaatgtagaactctaggaataaaaggagtgctttaaaatataaaaataaataagtatgattaggaagtgaaactgatggatcgtaaagatgtatttgaatatgtaaaaaaacaatatggaacagtaccggaatatctttggaaagaatccccagaaagtgcggtacttcgtcataaaaacgggaaatggtatgcagtgttgatgcaggttaaaaaatctaagttagaactagaaggagagggcacggtagatattattaatgtgaagtgtgaaccggatatggttggagttttgatagagacctatggttttcttccaggatatcatatgaataaggaacattggattacgatgctgatggacggaactgtaagtgaagcgaagattttagattttttggatatgagttacgatttaattgatagaagctgataaaaaagaaactattattgtgggatatgcctttttggaggatgaatctgaagaagaacgtgcagcattacagagacgcctggaaaaaacatttggtacagatcatttgctttatttagcaggcgataaagaggatgttgaaaatgcgaaaaaagcaggcaagagtttgggaatttatttggcggagcagatattagctggagagaatttccataaagtggtaaatgaagccacggaagaagaagtattggaattgctggaaaagaatccttgctctatgacagatcaagcattaaaagaaatgattcagcaaaagttatctgattacgaagatgcggatgatcttgaaaaagaagagaatgcggatcgtgatgacgagcagaatgaggatattttagaaccgcaaaaagaaaggaatgaggaacaagaagaatctgcttcgggagagaaattagaagaagttggtgagtcaaaggaatcagatgagctggatacaataaatgaaccagaatctcaagttgaggaacatgagtcagatacacaagatatttcagacgaaccagcagagcctaccgaggaaatagattcatatgaaatggaatcagaagatgattcgacggagagcgaaggagaagaatcagagatttcaggtgaagcagatgaataagtgaatacgtgattttgtaaggaaaccaagagctgcaagctaagaaattagtgaacagctcttttttgatgctttgttagtactccaacaatctcttggaccacttcgggagcagcattttctatttcttatggaattttaatataaaaggaaatatgctttcccctatttaatatattctgaggtattcttgatatgcaaaaggaaatgaggtgaatgatgtgagtattataaaagcgattaaaaagtgtgaatatgattttgaagttcgtgcagaaaaatttttgtggcatcatcctgtacttggatttttttccatctttgtaggaatgcctttgatcgtgttatgtgctgtttgtgcgattacaattgtttttgcttttccaatgtcattgctttttggatggatctaatctttattgtatcttaaactgtggttcgaatgatttatgccatattaagagaaaaaggactatgataatgcatggaaaagttgtaaaggattatagatagaaattacaaacaagaaggatgtttatgaattcgaagaattctttataacataaaataatagatcaaggaggaaggaagctatgatggatgtattgatgatagcaattttattaggatgttttggtttggtgaaggcgtttgcagatttttgcgactggcagattaaaccaaaagaaaaataggaggatgaaatcaaaatggatatgattgttttaggtgttatgattgccggagttgggatttatctggtgtatgcattgataaatccagaaaaattgtaaagagctggtgaaaataactaggaggagaagacatgttacagattattttgacacttgcgatttttgtgatactggtcattccgatgggaaaatatatgtaccatatcgcaacaaaacaaaagacttttgcggataaagtttttaacccgattgatcgctgcatctataaagtttgtggaattaagggcgaagatatgggatggaagaaatatgcattgaccttgctcttggtaaatgcagttatggtatttgtaggatatgcaattttaagactgcaaagcatcctgtttttgaatccgaatgggatttctaatatggaaccgacactttcctttaatacgattatcagctttatgacgaatacaaacctgcagcactactcaggagaaagcggtctttcctatgtggcacagatgtgtgtcattatttttatgatgtttacatcagccgcaacaggttatgcggcatgtatggcattctgccggggactggctggaaagaaaattggaaatttttatgaggatatggtaaggattacgactagaattttaattccagcatcttttatagtcgggttattattggtaagccaggggacaccacagacgttacaaggaaactttacaattgaaactttggaaggaaatttccaggatattgcagtgggaccggtagcagctctggaatccattaaacatttgggaacgaatggtggtggattctttggagcaaactcaactacgccgtttgaaaaccctacggtaatcagcaatattatagaaatgatatctatgatgctcttgccgggtgcctgcgtggttacttttggacatatgcttcatgataaaagaaaagagaaaaaagcagagaaagttgccatgaatgcacaggtattgccgggaacagcccaaaagaaagtgatttttggacgtcagggtgcagttgtctttggtgcaatggcgattattttcctgattggacttactatttgttaccaatcagaaatggcaggtaatccagtgattcaggagatgggcatagaccagagccagggaagtatggaaggaaaagaagtacgttttggtgttccacaatcagctttgtttacgacggtaacaacttcctttacaactggtacggttaataacatgcatgatacgttgactcctctatagtaataggcttaatattactctttactgatgcttggtttataggaatagtttgtttagttatgacttttttgacataccgtagtaaccgccaaagcattcgagaaaaagaaatagaatacgcaaagaaagggaaagatacaacaatagattcattaaatgaagctaaagaaatactttctgaactaaatgaagaaataaaaggtagttttagggagtcaggtgagtatataaaggaacataagaagtaaaagaacggtattttgcaaataaagttcaaaagtttaacaacttcatatctatacttataaagcagttagtcttttgatatgtgcccagaattctgggtacatatcactttcggattagctgttttttacttttatattaagtgagattgagagaataaaaatgaaaaatttaaaaaggtgaagaaaaatggcatatcctatcggctatatatatgaaaggggtaaataccttatgttctttgacaaccgcatatcagcattacaggtacgttcccaaagatagaagcgtgacagtataagcgccaggacggatggggacaagcactgcaggaggattatgacaaggtctgtccaaggactatggcggatcatttcgtgagaaaacggtcagtgcctgttcacattctgagcgaatccttatagctgtgaatggactttcgcaggtctttcgccaggatcatcggagggggataatgatacgaatttcttcccatacggaagaggatggactccaagttgtaatcagcaagactttcaggaaatctgcgagcgatgtgaagcgaagcatccgcctgtaatgttccctgccatagatatggtgcggcagccggggagtcgaggacaaatacggtgctaaagaaaaaacgataagaaatcaaaaaagagtgtgtcgttgatatcagatatatgcggctgtgggaaatcccacagccgtatccttgtggtattaacgtcatgtggaaagaagaagcaatatgttttacaaagttgaatatcaaaagagggcgcatcaggaagtagagaagattttccgggtgctgcttccggaacagggattggcggtcagggaagaacagatccgcttgtgccatgaaatgttagataccttgctgggagaaagaattgcactgtgtgacgcaggggtaggaattggcaagacgtacgcttatctggtagcctgcgtactattgcggaagtattctatgttgacaggaagaggaaatccgttggaacagcgtccggtggtggtgtccacttccagcattgcattgcagaaagccatagtaacagaatatattccatttttatccagggtgctgttggaacaaggcatgatccagtctcctcttcgggcagtggtgcggaaaggaaaggaacactttgtctgtgacaacaggctggaacaacgaatcgaggcaatccgccataaacagaagaatgctgcccaaaaagaagcgttgctgtctttgcggaaacattatgatatggatacggtaaaagatttgagtggatttgacagaaggctggtatgtgtgccgaaattctgcccaagggaatgtccgggcagacagatgtgccgctatcagaggtatctggaagaagccaagaaacaggatgtatttattttaatctgcaatcacaactatttactggcagatgcgtatcatagagcagaaggatataaaccgttattgtcggattatcggacattgattgtagacgaagcccataagctgccggaagcggccaagcagatgttcgggaaaaatctgtgtatggatgatatccgggaaatggtgtattatctggaacgggagcatcagaaagaagaggcaagaatccttcggacagtgatgggcgaagcattgcgtgtcgttggagcagaacaacggatcggaaaaggaatcagggaaacattccgtaatacaacgaatagtgtagtttcgctgtgggaaggtgtagagatgctggaattccttttagaaaaattagagcgaagtgttccaaagtggatacggaaccgtttggaagaggcgaaggatgtgctagagtgtttttgcagcagcgatgagaaatatgtctgttatctatatttggataaagagcagcttcccattttgtgtgcagccagccgggaaatcccagaactgcttcaaaagatgttatgggacagggaagaggaaatatccgcaatcttaaccagcggaacgctaaaggcaggagcagactttttgcgcacccgacaggtcaccgggctggaagcaagggcaggggtacaggaatatgtggcagagtccccattttcctatgagaagaactgtctgttatacttgccaaagacgctggagcattgcaggagaggaagccgggaagaggcagtgatgatagcaaaccatatccattccctgatctgttccacttacggacatacgctggtgctgtttacttcttacacgttgatgggaagtgtgtaccagattttaagagacagcctgccatttcccatggtggaagtatggaggcattcccaggaagaaatcctgcggtttaagactatggaaaacggggtgctgttcgcagccggctcctgttgggaaggggtggactttccgggagatatggtatcttcactgattatcgtgaaactgccttttgcagtgccggatcctatcagcgaggcggagaaagaaacctatgaatccttggaagcctatattcagtccatcattgtgccggatatgcagaaacggttgcgacaagggtttggaagagccatccggacagaaaccgatacctgcgtagtgtctattttagataatagagcagtacaaggtggcaagtatcatgaagatgtgctgaatgcacttccaacttgtcagatggcagaagaattgagagaggtacaggcttttatccgcagccggaagggcgtggaatattatctgtaattgtcggaagaaattcgtttgccggaattgttggttatgcttaaactgaaacaagtttaacagagaaagtttagtacagttttagaacccttttgcgagggattgttggtattgatgaatagacgttttgacatgaagtgggtataatgtgtatagcgttagaggaaaggacggtgaatggatatgagagcatacgaagtagaaatgatcagagatggaaaagtgaaatatttcttcattcggaatatggaaacaatggagatagaactccttccgacaagatttttaacacataagacgcgtgctcaagagtctccaaacaccgtaggaagtctggcgagatccatctgttactatatgaacttctgcgatggcagacaaatgggatttacagatgtctgccagatggattatgaagcacaatttaatcatttcacagatttcctgcaatgactgaaagcgggaaaccatacaaaaaatctgaagaaaacgccaagaaacagaacctgtaacacatatctaaaaaatgtgttcgggttcttttcctttttagaaatggcagaagatcaatttggacctttgcaggtactctcttatggcacgatccatgttgcgaatagtgtgggagtgaagcgaaggttaaggtttcgatcctttgcaggatatttgaaagaagaagaacgggaagtccgggctgcagagaaaaatgagatcgtgactattttagaagcgtgtacaaactgccgggatcaactgctaatactgatggcgtcagaactgggatttcggattggtgaattgctggggattgattatacaaaagatattgattatgaaaatcattccgttcgtgtctgcttccgagatgacaatgctaacgatgcacgtgcaaagaatgcagaggaacggaaaggcaggttaagtgcagacacctatgatttcctgctattttatatttcggaatactgggacatccttcggcgtcagaattacctgtttatcaatattacaggtgaaacagaaggaaagccgatgcaggtggcaagcgtatatgatatgttccatcgaatggaaaaaaagacaggaattaagatcacgcctcacatgctgagaagatatttcgctaacgcaagatgggattccggctggccgctggaacttgtcagccagtctcttggacatcgacatttagatacaacgaccagatatctgaatttaatggatgacaagctaaaacaggcaagtacggaattttataacaagcattctgctttatatggagtgcaggaattattataaagaatcgaggtgatataagatgccagtgctttccacgcaggcatggagattatcacagcaaagattgacagaagaagagcaaatccaattacataaggagctggaaacctgtatcgaggtggcaggaacaatccggaatagtgtggaaagctacatgacagaaaaagcgatccggcacatagaagagttggattatccctatcggcaggaatatgagaactggttgaattcggaattgactcgtggaacgaaggtgaaatatctgacaggatttgattggatcaaacgccatgcaatccgagaaaaagcaaatacattgctgggaagaaaccagaagatactatatgaaaataaaatatggtttcttctatattatccagatcaggaaatagcttccagatttaacaaaagtacagataaaaaagcattgatatgggattttcaacagaaaagtccggaacggatgaaaaggcagatttttcagagcctgcagaaattgattaccgatgattatagtaacgattacagggtagaaaaattaggacatctgcgatatttttataacttttgttctgaaagagggattgaggatattgaatatctggaagccgaagaagaggtcgcatttcggcaatatctgatagaacggaagaaaaagccaaatcgcatcattgattactgtagagaagtgctatttacagaagcgaaagaaaccaattggaatgcaaatgtgtggtatctttccagattctgctttgaaaaagaaagagtgaaccagagcaatatggtgcggacagttacttttcaaacggtaagacatttgcagaatagaagattatttcaagaatatatgaagtatgggattgggttatctacattgtctctgagcagtcttcgggaagaagctcattatatacagagttttctggcttattataatgaaacagaatttgaagatgccagaaaactgacaggagaaaacattgatcgtttctttaaatatataggagaaaagaagctgcatcccaatacgttcaaccgctatgtgaaagcagtcgatcatttttaccaatatctgctgacacgataccaggttaaaagaattccttttcataaagaatattacttaaagacagaaatatacaggcatcatgaccgttcggtagatgaagtgatttctaaggaaatcttgaagaatctgcaatattttccggaagatatccggttgatgtacctacatctttgggcagtggggatgcgaatcagtgaagtttgtacgatcaaggcaaaagagtattacagacaggacgatgattactggatgcagatttatcaggtgaaaatgaggaattacaaacggattcctataccggaagtgttatacaggctgatgcaggtatatatcaaaaagaaacggagaaagccggaggattatgtattccaaaataaaaagggcggtgcattttgcagctctaccttccgggaacggatgaaaaagttatgtgaaacataccaaataggagatggaacgtatatattccaggcacatgggtatcggcatacattagctaccgtattttatgatgagggagttccgcttcaaagtgtaagggattatctaggacatgcttacgaagaaatgacgcagcaatacattgattatatgccacgctggattgatgaagcaagcaaagcatattttaaggaaacagacaattcgctgtctgttggattgaaagagaggtggaagcatggaggaagtcatagacataaggacactacaatgctaccagaaagcaactgaagaacagcggaaaaaatgtaccagtaaactatcttttgaaataggaaaactgccaactttaaaacttcaagaagaatggacattctatatcaagcattgtggagaagtgaaatctctgagcagcgtccgccaggaaacggtatattttaaacgggtatgtgaatttatgaatcacctgtcggtagacagtatgaaggttcagacgaaagcagtatggggacagcagtttgaaagctgggttagcgcacaaggattgaaggcataccgagaatccaataaaaataaaaactggagagaacgaacacctatcgttttatactttctgcatatgttggattttattgattcagaaatgtcaggacagagaatttacttcaaagacttagcatgttatcaggaagccagtgaagaggaacgtaaaaagtgtgggcgagagccatactttgatctgagtttactgccaacgcaacagcttcggaaggaatggggtgcctacattaaagaaagtgccagaatttatacactgggaacatcattccagcatcgggtgtattataatcaaatctgtagatttttaaacagcagaattgtttgtgcagaaagtatgcgggagcagtcaaaagagaaatgggagcgtcagtttaaacgatggctgatgacagaaggaatccagataaacagaaaaagtccaagcccatatagcaaagatggcatgaccaggaatcctaatatttcttatctgctgcggatgttggattttacttatgcggatatgtggaaagatgagacagaaaaggatgtctgggaattagataacctttccattgagataaaaaataatccaatcaagaaatacaaaacattgaatttcacaaatatccgtcagcctgatatgaaaaatgaaataaaaaaaggaatttatctactgcttcaaagggaagcaatcgctacggtttcaaaggaaatgaccgcaggaaaacgcttgacggaatatctgtataagaaacatccgcaaatacaatcacttggagagttagacagagacatttttgaggaatatctgatccatttgaaaacggacaggacaagaacaaagtcactgcatgcggaacttacaagattgcgggcattgctggaagcggttggaaaaacttataagtaccctgttttggaaaatctgatcattaacagagatattccaccgactgcaagagcagaattcagaacctattctgatgaggaattaaaaagactgaatgcagaaattgtaaaaatgaatgagcagatagccaggctaatgatcctacatcagatgcttggaacacgaatctctgacacacttacacttcggactgattgccttagagggcaaccgggagacagagtggttcatatccggcagatgaaaacgcacccatatgaaaaacctgtcagcgaagaaatagcaatactgattgagcgatccatacaatatacaaagaaaaaatggggagagacagaatacatttttgtgagtgactccgatccgtctttaccggcacaatataataggatacagacacaggttgtgcagatgatacgggagaaagatttacgggatgattatggaagattattcggtttcggaacacatatgtaccgtcattactatggcgtgaagctgacagaaatgcatctggatgattggacaatcgcaagactactgggacacagcagcgttcacaatgtaaaatattatcgtaaaatgagtaatcagatcctggcggatgaaacaaggaaagtgcgagaaaggttatcgcagctgattctggaaaatttagatggatggggcgaggaatatgaacaagtacgatacgatgttagctgtaaataagaagagaaataagagaaaaattgacacagcgaagaaagaaatctataaaatgttggaaaatggtgaaaaagtcactgtaacaaagctgatagagcagacaggtttatcaagaggatttttttacaaaaacgaagaagtgcgagctttgttagaccgggcggtggaacagcaggcaggtatggtgagtccaaagcgttacataggaaatatcgcacaaaaaagaaaaattgaattattagaggaacagaatgaaaaattgttaaaagaaatggcggcgttgcaggaagaaaacaacaggttaaaaaaggcgcttgggaaacgagctttgaatacgattaaaaatttgtaaaatttgtaaagaatgtaaaatagcaaattgctggatggcagacgcagatctatgcgtctgttgtccgttcacataaattttactttgatttaacaaactggtggtagtcgattttacatgattttcgtacaatggtatcacagcagtaaaatgtaatgttgtgaaaaatgaagaaaagatagaaggtatgaaaagcaaaatgagaagaaataatcgatcccgaaggggaaaaataccacaaaaagagtacacaaaacacgcaattatacgccgtacagcccagtgtttacaaggggttgagggcatcctacccaaaatggtggatgaaccgacatcggcgcttgacccgatctccacatcaaagatcgaagaccttgcgatggagctgaaaaaagattatacgattgtcatggttacgcataacatgcagcaggcagtgcgtgtgtctgacaatacggcgtttttccttctcggagaagttgtggaatacaacaatacagaaaaactgttttcaataccgcaaaataaaaagacagaagattacattacgggaagatttggttaattgaatatgtcggaaagagataagaaaagcaagtctgagaagggcttgctttttgtagttcaaaggaggcacattgcaaattgattataagttccgaaatgtataaaaaagcatatataatagtagaaaatgcacaagatacatatattgcctgatgatataatgggtgcataatataccaaaataattctgaaataccggaaaaaatatctacaattcacaaaaagaatggaggaaaggaaatgagggattggaagcggtggactgctgtacttttggcaggctctttagcgtttacagctgcagatgatatgaaattgattgttcaggcatatgaaatgcagaatgaacaaggacaggaatcgtatcaggcggaaagcaaaagtaaattggacgatttaaaagaaaaagcagttctctttcaggaatttcagggcgaagaacagagatttgacggaacgcgcgccgtcgatgtcagcgatcatgcggaacaaatacataaaatagagacgggaagcgtagtgttcagatttaaagcttccaaaaaagcggacggcgttttactgggagcgaaagataaaacgatcgatcttccgacagatcttaacaggggaagcgactgtacttctttctttataagggcgaatgaaaagtttcgtatggtatataaacatactgcggcggaacatgtaggaccggcttcattttcagatgggaattggcacactgtcgttgtcagcagtcagaatgagaagtcgatgcgtctgacgatcgacggacaggaaatgtggagtaacacagacgcagggaacagaggtcttttttcaaagcagtcggttctggatcaggtgacgatcggagcgcagaaaacaaaagacggacaggtttacaaaggatttcagggggagatttctcacgttatcattacaagtgaaacgttgacggacgcggacgcgatcgcgatatcgaaaccggaaacttccggtgagatcgcaagcggttcggcagtgggcgagatgtttcaaattcagtacggcgataactcatgggtatttacaggaggagaagccgtacagggaggatttgcccagacaagaggggtaagaaattatgtaggacagtttgaagagtatgtgcggtggacgaaagcaggaaatgaaaacgggcggcagcgttatacgatcaacacaggaaaggccggtcagactttaaaagacgtcgttgacaattatcagactttagtggcggattacagcccgaaagcggcggcttatctcgtcgggaaagaggattatcaggcaggagaagcaggaattgcttcgtttcaagattcattgcgtcaatttatcaacctgtcattaggattaaaagaaaacggaaaaggatttgctgtgatccaaaagccatttgcagttaaagatgatgcggtaaatgcaacaatcatgctgtactgtaaagcggtagacgaagttgtaaaagaatacgaagacgagtcggagaagctcgatcggatcgttgtagtcgatcattttgcacagacaaatcaggatgattttaaaaataataaattaaaagacggtcaaacgctgaacgcagcgggacattttgagatcggaaaacagttttccgcagctacgatcaagacgacggacagttatccgggaaacggagtgactctgaatctgaaagaagaagagcagccggacgtatatttgaacgttcttccggttgtgacggcggagaatgccggtctgcatgtacagatcccggaaacaaatgaaacgtcgtggagatacgagttgagtattggagataaaaaaataacgggaagtgcggatgggaatacatttacgattacaggagcagaatcgggaaaagagtaccttttcaaatgtatttcatcagacggaacgacacagcttcaaactgtgacaggaaaaacggaagcaggcaatgtcggaatcgcgtatgggcagacgctggatgaaaagcaaaaagcgctttcggaaaagctgaaagaaaaagataagatgacatggctgttcatgggagattctattacacatgcggctttgtggacaaaaggttatgacgggatcgctcagacttttgaaaaatatttgaaagatgagatgggaagagcttcagatactgtgatcaatacggctgtttcaggagcgacgacaacaagtacgctgaataatattgaacagagattggaaaaatatactcctgacgtagtctcgatcatgcttggaacgaatgatgcggcaacaggaggacttacggcggatatatacaaaaagaatcttgagacgatcatagagaagatcagaaataaaaataaagacgcggtgatcattttaagaacgccaacgccaatgtggaataccggttcaagagaagcgaatataccgcagtatattgcaaaaatgaagcaggtcgcagacgagcagaacctgatctatatcgatcagtatacggaacttcaaaaagcgtttaacgattacggctggctgaaaaaagatactgttttattcggaaataatctgcatccgggcgcaaacggacaccttcttatgaccagacactttttaaaaggatgcggattgtggaaagaggacagcgcgattgccaatttgttttatgagatgccgatcaatgagaaaacatctgaaatcactccggaagttataaaaacgccgaaccgcatcggcgtgtctttggaaaagctgaaagaagacagcaagtctcagataggggcggtgcatctgaaagcggtttccaaagcatcagggcagacatatgagacagatgcagaagcaggagagaagttgattgttttaaaaaaccttcccgagaatcagaaatacgaggtagaagtgtctgcatggctgaaagaccgggcggaaaaaacagtatttcaaaaacaggagattgaattaaataatacgcttgaggaagcatttgatatttgtttgagtgatgaaaaagtagaaaacttgaatgaaggaacaacggtgggaacattcacagttaatgagatggctcctgaaggaaactatgttttctctctttgcacaggagaaggcgacactcataatccatattttgcgatagaaaacggagtgttgaaaacagcaaagaaactggaggaaggaaagacatatacgatccggctgaaagcaaaaaatgcagaggctgaaaaagaaaaaatatttaaaatatacgcggtaggcagaggattggttttcagaaaagaggatcagaagatcgcagtaggatcaccggtagaattaagtacaaaagattacgcagaaaaattgatgaagctggaagaaggtacgattttagtacactatacatcgacaagcgatcaggcaattcagtctttgtttagtgtttccaatgcaaaagcaggacatgaaaacagacattttcatgtttatatcagacctgaaggagtacttggctgcgaaatcagaaatgagagcgcgatgaattatggatttaaagcggcaaatgcagtgaaggcagattataaaggaaaacctgcagaaaatataattgcgcttcaggcagataaagaaaaaggaacgtatcagttgtttgcaaacggagagaaagtgctgacggtagacgccgctgcattgggaggataccgctttatttctgaaattacgggattagatactgtttctctgggggcaacaaaaaggggaggaattaataaatatactttcggaggaaatatccataagatcgaagtgtatgagactcctttaacagatgaagaactgatcgaggaaacgaagaagaccgcatatcctgaattacagcagattttccataaaaatgacggaacaggcgcgaactattaccggattccggcgcttttgacactgaaaagcggtacagtgatcagcgcggcagacgcaaggtttggcggtacgcacgattcaccgaataatattgatattgcagtggcaagaagcgaagatggaggaaagaactggagcaagccggagcttccattccactatgaggattatgaagataatacattagaaattccggtaggaacgcagacgagagtaaatcaaagtgcatcatttatcgatccggttcttttgcaggacgaagagacagaacgtgtatttttgatatcggacgctatggcggctggatatggttctccgcaggcagttacaggaagcggatataaagaaattcaagggaaaaaatacttgaaactgcaaaaggcaggagaaacagattataattatacagtgagggagaatggtgttatctataatgatacaacgaatcagccgacagagtattctctgaacagtaattttgaaattttgaaggataatgtattgcagacagtcaaacaaaaatcgtcaagattcgatcctacgaacggttcgggacagcttgtaacaggtgagacagacaaagacgttccgatgaacattatgtatgcagatgcagtattcaaagcattgcctacgacatggctgtatatgaagtacagtgatgatgacggaaaaacatggtctgatccgatacttttaaacggaatggtcaaagcagaagattcaagagtgcttgtcacaggtccgggaagaggcatgcagattaaaaacggagaatataaggggcggttgatcgtaccggtttatgatacggcacagtcgggaattatttacagcgacgatcatggagcaacatggaattatgcaaaaggaccgtctacgaagaaagcggcgatgtcagaatcacagatcgtagaaatgccggatggaacgcttcgtgtttatgcgagatcaacaggttctaagatagcggaagcagtgagcctggacggaggaaaaacatggacagaagcggcgtatgtaccgggaatgacccagccgggatggggatcgcagttatccgtgatccgctatggcggtctgatagaaggaaagccggcgctgatcatgtccactcctgccggtgtgggaaattatcgaagagacggaagagtcaagatcggtttgatcacagataccggaaaagaaggaagtgaaaaatataaaattgattggacttacgattattcggtagacagtaagaatgcagggtttgcatattcctgcctgagcgaacttccgaatcaccaaatcggtctgatgtatgaaaagtatgattcttacaatccggcagaattacattcacaggatattatgaaatatgaagaactgtccttatcagaattaatgggaaaagaagttgtggaaatcataccgcagacagaaggaaagggaactgtttcccaaagaaatactgtgaaaaagggaagcaagattacaatcgaagcatatccggaagaaggatatcaatttgtccgttgggaagatgaaaaaggaaacccggtaagcgaacaggaaaaatatacgtttgatgcaaaagaaagcgccgcttttacggctgtatttgaacaggaaaaagaagaagtcgataagtctcatcttaaagaggcaatccggcatgcagaagaacagatgcaagatgaaaaatatcaggatgtaattccggttgtgcgcgaagagtatgaggaagcgtataaaaatgcaaaagcgattgatgagaagccggatgcaacaagcgaagaagtggagacagcgtataagacactgatagaagtcgggaaaaggctgactatgtataaaggagatcttacagaacttcaggcggcatatgacttatatgcaggcaaagatttgagtatttatacacaagacagtaaaacggttctggaagaagctttaaaagaggcggaaaaagtcttaaagcttggagaaaatgcagtaaaagaagatgtgaatgaggcattggaaaaactgcaaaaagcgatagaaggtctggaaaaatcggagccgaatccaccgacagatccggaattcccgacagatccggattccggtaatacagatattgtgaatccagataattcactgtcgccggacgatacaccgtcaacgaatggaacaccatcggcaagcgatgaaaaggctgttgcgacaggagataaggaaacgccggtcggatggacgaccttaggatttgcggcaatgcttgcggcggcaggcagattcttaggcagaaagaaaaggcggtaagcctgactgacagaataaaaacataattttacctccctgcacttctgataataaagtcggaagtggaaggaggagaagatcaagtataagtcttgacaatttcttcggcaatggatcgctttggaatacagcgatccattgcctgtttttctatgtagcggtgagcttccggttcactcatagaaagttcactgatcaaaaaccatttcgctttgttgaccagacggatttccgccattttttcctcgatggataaagatttcttttcaagctgccttaaacgctcgcgggaactttccatccagcttaacgcctgaaggagggtcggttttgaagttggctttggaagtgtaaacactccatattcggcaaccttgtcatgaatatcagagtgaatatcccgttttactaaaagcagaacggcgatctgtctggaggaacaaaggtcgatcgcaaaacgaacgccgatatcatcagacagaggagaattgataatgacaaaatcgaaagacttttcttttaacattcgtttcgctgcgctgacacttgaagccgtaagaacaggataataccggatttcaggaagagagccgataaaggcagaggcaaaactgtctgtcgaagatacaacaagaatactgtatgtacgctcttttagactcattttatgctctcctttctttggaactcgtataaattactgtttgcaataaatgtttaagatcgcgtcaggtatatatttcttgataaaagaactgtttgcggcaagaaaacaggctgttttaaagtctttcggaagttggccaaagcgcgcaagcgtatctttatcagcccgatacagattgatatcggcaggagcggggagctctgttttattacggattccgtcgaggaccgcgtaaatgatcaaggcaaacgccaggtaggtgttggtggacggatcaggagaacgaagctctacgcgctgatattcgcccagcgccgcgggaacacggacgagctgggaacggttctcttttgaccaagagatgtagagcggcgctttattttgtccaaaacgttcataggaattttcaagcggattcaaaaaaagagtcatctccgagattttatccagaataccggcaattacagcgtccatataattaaattcgcgatcggatttgacggaaatgttaatatgaaaaccattgccgggctgatcacgaaggggttttggggaaaaatcggcacagagaccgtttcttaacgcaacagctttaactacagtctgaaaagtcaaggcgttatcggccgccgtcatagggtcggagtagcgaaaatcgatctcattttgccccggtccttgttcgtggtgggaactttcgggatgaatgcccatttgttcaagagtcagacagatctctcgtctgatattttcacctttgtcttccggagcgatatccatatatccggcatgatcatatgggatcatggtaggttcgccaaagtcgtctgaccggaaaagatagaattcctgttccgtaccaaaagaaaattgcaatccctcttcagaggctgctttaatggctttttccagaagcgcacgggaatcatactcaaaaggcgtgccgtcttgatgcgtgatatgacagaacatccgaactacactgccttcttccggtctccagggaagaggcatcaaagtatccggttctggatgaagaaatagatctgaatgagtctcatcaccaaatccatcgatggcggacgcgtcaatggcgataccgtaagaaaaggctctttgaagctcatcaggcatgatggatatgtttttctgttttccgaaaacgtcgcagaaagccagacggataaacttaacgtcctcttcctgaacatactgtataatttcttgctgggaatatttcatagtcttccacctctttcacgttaatttgctacatacatctgtttatacggattcttgctgttcggggtgacaagagtaaaaggagaggagagaatggttttcaggtcatagtgaaaatcgctgcaatattccttcagatcatccatgattccctgcaagtcttcaaaagaagcaatatctgccgtcacctgcggaggaaatttcagattcctgcagtcgccccgcagaaacagctttccgccgtgcataccggtacaggggaaattgccgatgatcggatgatgatcttcctgtaatcctaatacaatcagaatccctccggcctgatattcccccagaaaactgccggcgcatcctccgataatcattatcggaactttctttttatattctttcatatgaatgcccgcccggtagccggcatggtcgcgaacataaattttaccgcctctcatagcgtatccggccgcatctccggcgctgccatgaatcaaaatctttcctgcgttcatcgtatcgcctacggcgtcctgcgcatttgcgtttacggtaatagaggcgttatttaggtaggcgccgagagcattgccggaaattccattgacggtaatattccggtcagacattccggcgccgataaagcgctgtccgcagcagccttcgatcacataatcgtgttccggctgccgaaggacttcgtttaaagttttataatctagtgcagcagcatctatcactttcatagtataacacatctccttgataaaatgatattgtttttattctccggcatgggaaatgccaagtatttcaagttctttttcgtttagcccgattccgcggagcataagacggttgccccggagagcttcgatggagttaattcccatacctcccataagttctttgatttcatgtttccaggcagtcatcagattgataagccgacggcttcccgtctgcggatcaagtctttccacaagttcaggattctgcgtggcgatcccccagttacacttgccgctttgacacgtgcggcagagatgacacccaagagccagaagcgcggctgttgcaacataacaggcgtccgctccaagggctactgcttttaccacatcggaagcgctgcggatactgccgcctgctacgagcgaaacgtgatttcggattccttcatcacgaagcctctgatccactgccgccagagcgagctctacagggattcccacattgtcgcgtattctggtaggagcggcgccggtgcctccgcggaagccgtcgatagcgataatgtccgcgccgctgcgtgcaattccgctggcgatggctgcgatattatggacagccgccacttttacgataatcggttttttgtattccgtagcctctttcagagaacagaccagctgccgcagatcttcaatagaatagatatcatgatgaggcgcgggggagatggcgtcagagccttcagggatcattctggtgcgggacacgtctcctacaattttagttcccggaagatgccctccgattcccggttttgcgccctgtcccattttgatctcaatgccggcgccggcgtttaaatatttttcatgaacgccaaagcgtcctgacgctacctgtacaatggtgttttctccatagcaataaaaatcttcatggagaccaccttctcctgtattatataaaatcccaagctcttttgcagcgagagccagtgatttgtgcgcattataactgatagagccatagctcatggcggagaacatgaccggcatagagagttccagctgcgggggaagctcacagtctaaagaaccgtccgccatccgatgcacttgttccggtttctttccaagataaatccgggtttccataggctctcttagagggtcgatgggagggttggttacttgcgaagcattgattaagatgcgatcccaataaacgggaagaggatttgggtttcccatggaagagagcaggactccgccgctgtttgcctgtttataaatttctttcatcatattttccaaccagttggcattttcgcgtagagaacagtcgctctttacgatttttaaagctctggtgggacaaaaggaaacacatctttggcagtttacacagttgctttcgtcacataccatctgtttggtttcactattgtaggaatgtacgccattggcgcattgctgctggcagatacggcaggtaatgcagcggttttcatttcggatcacttcaaactcagggtagataaattcaatgctcataataaaacaccttcctttactgttacgataaccggttctccgccggcgggagcccagatattttcggcatccggttccatggctcggatggctgtttcttcactggcaatataaaccatatcttttttttctcctacgaccatggagcggagcttcagccggtcattgagcgccataagccctccgttgaaaccgaaaacaatggagaaaggtccggtgatcagaaggctggggaacagagttcgtaagtaagtgtgctttttctgatctgcaagatctgtttttgctgcaatggtgctccaaaagggggcggcaattacgctggcagcttctccaagagtcagattctgcctgcggagcagatagtctaaaatatacgtgatgacttccgtatccgtctgaagggtacacttatatccaaacatttccataaaacggcggttggcatcataggaagaaatttcaccgttatgtacaacggaagaatccagaagagcaaaggggtgagctccgccccaccagcccggagtattggtaggatagcggccgtgggcagtccaggaatatccctcgtattcgtctaatttatagaaaataccgatgtcttccgggtatcccactgctttgaaagttcccatgtttttgccgctggaaaagacataagctcccggcatctccgtattgatcttcatgactgtacgtaccacatattccttttcatccagctgcatagacgtcagaagagacttcaaaggagctacaaagtatctccagatgataggctcatctgtgatcagaggcgtttttcttgtggggataatttctgactgtacgatctcaaaccgttcttttaaaaacgcctcgcatccttttctggcagctctgctgtcaaaaaacatatgaaaggcataaaagtctttatattccggatagattccataaccggcaaatccgccgccaagaccattggatcggtcatgcatgggtttcatagcatttgtgatcgtttccccggacattttattcccgtctctggaaatcatagctgcgatggcacatcctgaaggaatccttacctgaccttctgttttcattttccatttcattcctttctttttgatcttatacaataaaaacaaagacgctcattttgaaagcagaaaaattctgattcctaaatgaacgcctttgctcatatgcatacttatacaacgattaggaatgtttgtcaatcataatttgattgagtttttgcagaacgatgcgcggattcctttatctttcttatttcatatgtgtttccgtaagtggttttcgcaggctgaacggttataattgtacttgtaaaaatacaaaaaaaggaattgacaaagaggtttgtccggtgttatcatgcaacacgtaaaggcaagggcgtctttgagaacacaatctcagagacgctttttccgttgttgcaaagaaacagatagaaaaaggcaagggcgtctttcatgtggatagcaggaaaggcatccttgtcttttttcgtgcgaaaggagtgtcgttatgaagaagaaaaatgtttccaaatattttggctgtatggtgtttgatgacagggttatgaaggcaagtttatcttcaaaagtatatcagtcattgagaaaaaccattgatgaaggtgaacaattagacagcagcgtagcagacgttgtggcagaagctatgaaagaatgggctgtatcgaaaggcgcaacacattacacacactggtttcagccgctgaccggaatcacagcagaaaaacatgacagctttatttctccttctccaaacggaggcgttatcatggaattttcgggtaaggaactgatcaaaggagagccggatgcctcttccttcccttccggaggtttaagagctacctttgaggcaagaggatataccacatgggatccgacttcctatgcgtttattaaaggaaaaaccttatgtattcccacagctttttgttcttatggaggagaagcgttggacaagaaaacgccgctgcttcgttccatgaaggcattgaataagcaggcgcttcggattctccgtctgttcggcaatgaaaaggtatcatacgttattacttctgtaggaccggaacaagaatacttcctgattacaaaagaaatgtatgatcaaagaaaagatcttcaatttacaggacgcactttatttggagcaagacctccgaaaggacaggagatggatgaccattatttcggtgtgatcaagccaagagtagaggcttacatggcggacttaaatgaggaactctggaagcttggaatccttgcaaagacacagcacaatgaagtggctccggcacagcatgagctggcgccgatctacacaacgaccaacattgctacggatcacaaccagctgacgatggaaatcatgcaaaaagtagccgcacggcatggattggtttgtcttcttcatgagaaaccgtttgcaggagtgaatggaagcggaaaacataataactggtccatctccactgatacaggcgtaaacctgctgtcgccgggagaaacaccttatgagaatgcgcagtttttactgtttctgtgcgcagtgatcaaagcggtggatgattatcaggatctgctgaggctgtctgttgcaaccgcaggaaacgatcatcgtctgggagcaaatgaagcgccgccggctgttgtgtccatgtttctgggcgatgagctgaacggagtcttagaggcgattgaaaaagatattccttatgaaggagcggaaaaaacacagatgaagctgggtgtggatgtccttccgaaattcaatcgggatactacggacagaaaccgtacttcaccttttgctttcacaggaaataagtttgaattccgtatgttgggatcttccaacagtatcgcatgcgccaacatgatgcttaacagcgcagtggcggaaagcctgaagatctatgcggacagactggaaaaagcagagaattttgaagaaacccttcatgccatgatccgcaagacgatcaaagatcacaagaggattattttcaatggaaacggttatgacgatgcatggataaaagaagcaacggaaaagcgcggactgatgaactatccgtcaacgccggactgtatgccgcatctgctggatgaaaaaaatgtcaggatgcttacttcacataaagtattctccaaggcggaactggaatcaagatgcgagattatgctggaaaactactgtaagacgatcgtaatagaagcaaatactatggtggatatggttaaaagagagatcattccggctgtggaagcctacgcaatggaactggcaaggacagcttctgcgaagaaacgtgtcgatgagacattggcatgccgttatgaaagcggcctgataaaaaaactctctacacttacagaccagatggcagtcaggacggatgcattggaaacagctctgatagaacttcaggacgtgaaggatattgtggcgcagtcttatcagatccgggatacagtattgaccagaatgcaggagttacgaattgcctgtgatgaagcggaaaccgttacagcaaaaaaatactggccgttcccaacctacggggatctgcttttcagcgtaaaatagcaaagataacaaaaagggaggggttatcatgtacagttctgtaaatacaatctgggtattatttggcacagctctggtcttctttatgcaggcaggtttttccttgtgtgaagcgggatttacaagagcgaaaaacaccggaaatattctgatgaaaaacctgatggatttctgcattggaacaccggcattctggctggtaggattcggactgatgtttggaaaaggttccggaatcattggcagctttgacccgctgatccggggcgagtacagccaggcgcttccttcaggcgttcctctgtgggcgtttgcgatcttccagactgtcttttgtgcgacatccgccacgattgtgtcaggagcaatggcagagagaacaaaattcagcgcttactgtatttattctgcagcgatctcacttctgatctatccggtttctggccactggatctggggaggaggatggctttcccagatgggattccatgattttgcaggatctacagccgtacatatggtaggaggcatctgcgctatgatcggtgcgaaaatcttaggtccgcgtattggaaaatacgataaaaacggaaaaccgcaggcgattttagggcataaccttacatttgcagcgcttggcgtctttatcctctggttctgctggtttggatttaacggagcttctacggtaggtatggacagtgatgccctgatagaaacagcgggaagggtattctttaatactaacctggcagctgctgtcgcctgctgcgcggctttgattttcacctggatacgttacaagaaaccggatgtctctatgacttacaatgcagcattggcaggtctggtaggcattacagcgggctgcgatgcggtagatgcggtcggcgcggcggtcattggagttgtctgtggaatcctgattgtactggcgatagaattttttgataaaattgcaaaaatagacgaccctgtaggcgctgtttccgtacactgtgtctgcggcgctgcaggaacggttctgaccggtctgtttgccacaggggagactacagaggcaggacttttctatggaggcggcgcgcactttctgggaatccaggtattaggcgtgcttgctgtagcagcgtatgttgcggtggttatcaccattgtatttttagcaattaaacataccatcgggctgcgtgtaaaaccggaagaagagcttgccggattggatgtttcggaacatggactgtttaccgcatatgccggattttctatgctgccggacaccattgcggaggatgtggacaccaatacggtctttgccatgggagatgtgccggaagctgaagctgtaccggtgaagacggttcctgcatttgaagaaggaacgccgaaattcacgaaggtggaaattgtctgcaaggaatcaaagcttgaggcattaaaagcggcaatgatgaatctgggaattacaggcatgaccgtatcgcacgttcttggatgcggcgtacagaaaggaaaaccggagtattaccgcggcgtacagattgaggcaaacctgcttccgaaaatccaggtagaaatcgtggtgagcaaagttcctgtccgcagtgttatcgaaacggctaagaaagtgctttatacaggacatatcggagacggtaagattttcgtttatgatgtggaaaatgttgtaaaaatcagaaccggtgaagagggctttgatgctctgcaggatgtagaataaatttaaaataagggaactgtttacagcgcgcatggaacagttcccgaaaaatggaggtaaaatgtatgtgttcgattatgggatattgcggaccggtagtcgatttagataaatttaaagaaggtttccaaagaaccatttccagaggtccggatgacagccggatcgttgatacgggaaatggtcttcttggatttcacagactggccattatgggattaacaccgtccggaatgcagcctttccaattggatggaagttacgtggtctgcaacggagaaatttatggatttgaaaagatcaaagaagaattgtctgaccgatatagctttgcaagcgattcagactgtgagatccttctgcccttgtataaagaatatggcacagatatgtttgctatgctggatgcagaattcgcatgtattctctatgacggcgatacaggtgaatatattgcggcaagagatcccattggaatccgtcctctctattacggatatgatgaaaaaggtgtgatcctgtttgcaagtgaagcgaaaaacctggtagggcttactgacaaaatcatgccttttcctccgggatattattataaaaacggcagttttacctgctattgcgatataacaaaatcagaacacatatgccgggatgatttagaaaccgtatgccggaatatctacgacctgctgatcgaaggagtaaagaaacggcttgtagcggatgcgaaggtaggttttctgctttcgggcgggctggattcctcgctcgtctgtgcgatcgccgctaaagagagccggaaacctatccgtacgtttgccatcgggatgcgtgaagacgccattgatttaaagtatgcgaagcagacagcagagtacatcggaagcgaacatacggaaatatatatgacgccggaggaagtgatcgatacgctggaagaggtgattcatgttctggggacttacgatattactacgatacgtgcatctgtgggtatgtatctggtatgtagggcaattcatgagcagacagatatccgcgtacttctcaccggtgaaatatcggatgaattatttggatataaatatactgatttcgcccccggtccggaggcgttccaagaagaatccgtgaaaagaatccgtgaacttcatatgtatgatgtactaagggcagaccgctgtatctcttccaattctcttgaggcaagagttccgttcggagatctggattttgtgacttacgttatggcagtcgatccggaactgaaaatgaatcattacggaaaagggaaatatcttctccgtcatgcatttcaggaggattcgtaccttccgcaagaaatcctgtggagagaaaaagcagcgttttcagacgcagtaggtcattccatggtggattatctgaaagaatacgcagaatccgtttacacagatcaggagatggaaacattatcagaaaagtatacctatgcacgtccgtttacgaaagaatctttgttgtacagggaaatctttgaaaaatattatccggggcaggcggaaatgatcgccggattctggatgccgaacaaagagtgggaggggtgtgacgtcaatgacccttcagccagagtgctttcaaactatggagaaagcggaaaataatagaaagaggaatgacaatttatgacaaagtatatttttgtgaccggaggcgtggtatccgggcttggaaaaggaattacggcagcctcccttgggcggcttttaaaagccagaggttataaggtggccgctcagaagttagatccttatattaatgtagatccgggaactatgagcccgtatcagcatggagaggtgtttgtcacggaagacggcgcggagacagatctggatctgggacattatgagagatttattgatgaaaacctgaataaatattccaatctgacgacaggaaaagtctattggaatgtgttgaataaggaaagaaggggagaatatctgggctctactgttcaggtgatcccgcatatcaccaatgaaatcaaagaatttgtctatcgcgtagggaaacagacggatgcagacgtggtaattacggaaatcggaggaacaataggagatattgaatcccagccttttttagaagcagtccgccagatttctctggaagtgggacgggaaaacagcctgtttattcatgtgacactcgtcccttatttaagcggctcggacgaacacaaatcaaagcctacgcagcactctgtacgggaactgcagggaatgggaatccacccgaatctcattgtacttcggtgcgataaacctttggaggaatctatttttcagaagatttctcttttctgcaatgtgaagccggactgcgtgatcgaaaaccgcacgctgtcaaatttatatgaagcgccccttatgttggagcagtccggcttttcttctgtagtttgcagagagcttcatttagaggcaaaggaagcccggcttgaagactggaaaaaaatggtggaacagataaaaaatcgtacccgggaagtacatatcggactggtcgggaaatatgtaaagcttcatgacgcctatctgtccgtagtggaagctttaaatcatgcaggctatgcgcagaatgcttatatccgtattcattggatcgattcagagaatattacgaaagaaaacgtagctcagattttccggggaatacacgggatcatcgttcccggcggttttggaaacagaggaattgaaggaatgatcactgcagctgaatatgccagaaagaatcggattccttatttcgggatctgtcttggcatgcagattgccgtcattgaatatgccaggaatgaggctggacttccggaagcacattccggggaatttgatgagcagtgcagggacaaggttattgattttatgccgggacaaagtgatgatattgataagggaggcacactccgacttggaaattacccttgtgtgattcagccgggaacacaaatggagcattgctatcagcgctcggtcattcaagagcgccatcgtcaccgctacgaattaaataatcagtaccgcgaactgcttaccgatgcaggtctggtgatcagcggaacttcccctgatggccgtttggcagaaaccatcgagcttgcggatcatccgttttatatcggagtgcagtttcatccggaatttacaagccgccccaaccggccgcatccgctgtttcaaggatttatttcagcggctttccatgaaaatacgaaacaagaggagtgaacagatatggcgattcatgaagaatgcggcgtgttcggaattttaagcagaaaaagagaacgtcttgggaaactggtttattatggactctatgcacttcagcacagagggcaggaaagctgcggcattgttgtaaatgacgatggcgtcttttcgtcgtataaggatttggggcttgtaagcgaagtattttctgaggatactctggcacatctttcggaaggaaatatggccgtgggacatgtgcggtacggaacgacaggaagaaataatcgaaagaattgtcagcctatagaggtgaaccatcagaaagggaaaatggcgctggcacataatggaaatttaagcaatgcgttagagcttcgtgataaattggaattatcaggagcaattttccatacaaccagcgatacagaaacgattgcgtatatgattacaagagaaaggcttactgcgcctagtatcgaggaggcggtaagccgcgccatgacttctttggaaggagcatattctcttatattaatgtcttctgctaaaatgatcgcagtgagagatccgtatggattccgtcccctttgttacgggaaaatgccggacggctcctatgtgattgcctcggaaagctgcgccctgacatctgtaggcgcggaactgatcagggatcttcttccgggagagatcctggtatttagcgaagaaggcgtcgagtcgcgccgggaacactgcggcacgcagaaacagaagacctgtatatttgaatatatttattttgcaagaccggactctgtcattgataagatctctgtatcagcagcaagaattcaggctgggaaactattagcacagacaaaaccggtcaaggcggatattgtaatcggcgttccggacagcggtctggacgcggcgcttggattttctgaagtttcaggaattccttatggaatcggacttgtcaagaacaaatacattggaagaacttttatatctcccggtcaaaaagaacggatcgatctggtgcggatgaagttgagtccgatcccatcggttattcagggaaaacgagtagttttaattgatgattccattgtaagaggaactacaagcagacagcttgtaagtcttttaagagaggcaggcgcaaaagagatccatctaagaatctctgcacctccgtttctgcatccgtgttattatggtacagacatcgattcggaagaaaatcttattgcatcccaccatggagaaaaagaggtcgccacgctcatcggggcggattcacttggctatcttccgttggaatgccttcatgaactgacaggaacgcattcatattgtgacgcttgttttagcgggaaatacgcgactgaaattcccacagatgtccgaaaggaccgatttgaacaaaaattatccgagaggtgaaacaaatggaaaaatggaataagaagcttcttctggaagacggaagtcaattttatggctatgggtttggcagtcaggaagagaaaataacggaaatagtatttaatacggcgccggttgggtatcaggagatcctttctgatccatcctacacatatcagaccgttgttatggcatatccgttgatcggaaattacgggattgcaaaagaagactttgagacaaaacaaccttccatcggcgggcttgccgtgagagattataatgatattccttccaatttccgcagcgccgccacgctggacgaggtgatgaaacagtatcatattcccggtatttacggcattgatacgagaaaactggtaagaaagatccgggatttcggaagttgtaaggcgctgcttacagatgcgcagacatcgccggaagaaggattgaaaaaactggcaggatttgagattccgaaagatgccgtagaaaaggtcagttctaaagaaataagatactgtgccgccaaacaggaaaattatcttgtggcggccattgattgcggaataaaagaaaatattatacgaagtttaaatgcaagaggctgcagcgtcatggtatatccatggaacacttcttatgaagaaattcaaaaacaaaacccggacggcgtctttttgtctaatggaccgggcaatccgaaggatgtaaagccggttctggaactggtacggaaaataagaggaaactttccattatttggaatatgccttggacatcagatgatcgggcttgcctatggcgcggggacttataagttgaaattcggacaccggggaggaaaccatccggtaaaaaacttaaaaaccgggaaaatagaaatcacgtcccagaatcattcttatgctgtagattatgccagtctgaaaaataccgatctggagatgacccatatcaatctgctggatcatacagtagaaggaattgcctgcagaaaagatcatgttttcagcgtccagtatcatccggaaagcgctcccggacctcaggacagcgggtatttgtttgatcaatttatacagatgatggaggaaaacaaacatggcaaagcgaactgatataaagaaaatactggttattggttctggtcctattgtaatcggacaggcagcggaatttgattatgcgggaacacaggcatgtcttgcgctgaaagaagaggggtatgaagtaatcctgtgcaattccaatccggcgactataatgacagaccctgccattgcagataaagtttatatggagcctcttacattggaatatatggcaaaaatcgtccgccatgagcgtccggacgccatagtacccggaatcggagggcagacaggactgaatcttgcaatgcagctcgagaaaaaaggagttttgaaagaatgtcagacagaactgcttggaactggaagtgaaagcatccggcaggcagaagacagagaactgtttaaagaattgtgcgaaaaattaggagaaccggtactgccgtcccttgtcgccaatacagcagaagaagcccttcaggcggcaaagaccatcggttatccggtagttctgcgtccggcttttactctgggcggaaccgggggagggtttgcagacgatgaacaggaatttctggggcttattcataatgcgcttgccttgtcgccggttcatcaggtattggttgaaaaaagcattaaaggttttaaagaaattgaatatgaagtcattcgtgattctaatgatacggcaattacggtgtgcaacatggaaaatctggatccggtaggaatccatacaggagattcgatcgtagtctgcccatcccaaaccttgacgaataaggaataccagatgctgcgagacagtgcgctaaggctgatccgggctcttagggtggaagggggatgcaatgtacagttcgcactggatcctcattctttccggtactacgttatcgaagtgaacccacgtgtttcccgttcttctgcactggcgtcaaaagcaagcggatatcccattgccagagtgtctgcaaaaatcagcgtaggtatgactctggacgagatcccccttgtaaacacccctgcttcctttgagcctgccttagattatgtagtaacgaaaatgcctcgttttccgtttgataagtttgcagatgccaatcaaaagttaggcacgcagatgaaagcgaccggagaggtgatgagcattggacgaacatttgaagaaagtctgttaaaggcgatccgttccctggaaacgggagtatttcatctatatatggagaaattcgatgaaaagacaagggaagagcttctttcctatataaaagcaggaacggacgacaggatctttgccgttgcacaattattaagacttggctgcaatgttcagcaaattgcttttgaaacaaagattgacggctttttcctggaaaaaatgaagaaaatcatagaaatggaaaatatgttaaaagcaaatccatggaacagggacgtcctgcatgaggcaaaaagaggaggattttccgatcgcgctgtggcatggctctggaatacagacgaagatactgtctttcgcattagaaaagaaatgcatctgttcccggtttataaaatgatcgacacctgcgcttctgaatttgacagttatgtcccttatttttattctacttacgaagaagaaaacgaatcgatagcagaggacagaaaaaaaattctggtgcttggatcaggtcctatccgaatcggtcagggcgtagagtttgattattcgacagttcatgccgtaaaaacaatacgcaatgccggatatgaggccattgtgatcaacaataatccggaaacagtttctacggattatacgacttccgataagctgtattttgaacctctctgtgtcgaagacgtgatgaacgtaattgaactggagcggccggatggcgtaatcgcctcgctgggagggcagactgccgtgaatctggcagagcctctggaatccagaggcgtaacgatcatcggaacagactgcgaggcgatcgaaaaggcagagaacagggagtcctttgagaagcttttggccgcgctttctattccgcagcccaaaggtcaggctgtaacgaatattgaagatggtgtaaaggcggcagctgcaataggctatcctgtgctggtacgtccgagctttgtattaggcggaagagccatgcagatcgtggcaaaagaagaacaactgcggcaatatctgaaaacggcggtggagatcaatgaagaaaaaccggtattagtggatcattatatcagaggaaaagaagtggagatcgacggaatctgcgacggtcaggatgtatttgtgcccggcatcatggaactggtggagagaaccggcgtacattccggcgattccatcagtgtgtatccgagttacagcatttcagaccatgtaaaagaagtgattctggattatacaagaagattaggtcttggaatcggaatcagaggattgtttaatattcagtttattgtggatcaggaggaaaacgtgtatattatagaagtaaatccacgctcatccagaaccgttccgtttttatcaaaagccacaggttattctctggcggatattgcgacaagagtgattcttggcatcagcctgaaagagcagggcatcgacacatgttatccggaagaaaagagtttctggtatgtaaaagcgcccgcgttttcttttgctaagttaaatggaatggatgcgtatctgtcccctgagatgaaatcaacaggagaagccataggatacgatcgaaaatttcctcgagccatgtataaagccttaatcgcttccggtgtgaaaatgcagaactacggaacggtcatggtaactctggctgatgaagataaagaagaggcgctgcctcttattcgacggttttatgaaatgggattcaatatagaggcaacagtcggaaccggagagtttctgaaagcgcatgggattcgcactcgtatccgcagaaagcttagtgaaaacagcaccgaaattctggaagcgataagatccggctatgtaagctatgtcattaacacaagagccattttatccggcgttcattatgaagacggactggcgatcagaaggacagccatcgaaaacaacgtaacgatgtttacctctttggataccgtaaaggtacttctggacgtgctggaagaaattaccataggtgtttcgcctctttacgcataaaaacaaaaaaaggagaactgcagaatgataccaaatatgaattatcaaaatttaaaagaatcttatttgttttataatatcgcccagaaaacaaaagcttatctggaagcacatccgggagcgcatctctatagaatgggaattggcgacgtttctctgccgctttgcgatgccgttatccaaaaacttcatgaggcagtagaagatcaggctcataaaacaacctttcatggatatatgccggaatgcggagatacggaacttcggacaaccattgcggcatactatcaaaaaagaggagtaaaattaagccatgaggaagtctttgtctccagcggggcaagtgatgagctgggagatattttggatttgttcggaaaagaaaagacagtgctgatcatggaaccggcttatcctgcttatgtggatgcgaacgtgattgccggaaacacgattatccatattccggcgggagaagagaacggatttgttcctgtgccggatccggacattgcggcagacgtgatctacatctgctctccgaataatccaaccggcgctgtatttgaccgggaggcattacaggcatgggtggattatgccaacaaaatgaatgccatcatcctgtttgatgccgcatatgaggcatttattgaagaagatgacatcccccacagtatttttgaaatcccggaagcgagaacctgtgccattgaaatttgctctttgtctaagaccgcgggctttacaggaacacgctgcggatatacagtcattccaaaagaactgtttcgcggcggaatgagtctgaaccagatgtgggtaagaaaccggacgacgaaaacaaacggtgtatcttatcttatccaaaaaggagcttcggctgtatttacggaagaaggacagcggcagattcgggaggggattcaaatctataaaaagaatggaagatgtctgacggaagtactggatcggctcggcatctggtactgcggagggaaaaacgctccttatatttggatgaaatgcccgaatggaatgggaagctgggagttttttgattacctgcttaatgaaatccaggtagtgggaacgcccggagaagggtttggagcgtgcggcgagggatatttccgtttctctactttcgggtcgccggaagatacgaaagaggcggctggaaggctggaactgcttcttcagaaactgctttgatttcgggccgtcatgaacctgcctgtaagggagcgcggttttaatcttataaattttactttgatttaacaatgaagcgctagtcgattttacatgttttttatacaatgatatcacagcggtaaaatgtaatgttgtgaaaatgaagaaaagatgatatgccgtacatccggtatttacaatgagatgaggaaattttgcctaaaacgtaggacgagcggacatcggctctcttttcggtcttcatatcaaagactgaagagcttgcgatggagctgaaaaaagattatactattgccatagttacatataatatgcagcaggcagtgcgcatgtctgccaatacggcgtttttccttctcggagaagtgtggaatgcaacaatacagaaaaactgttttcaataccgtcagataaaagaacggaagactatatcacagggaggtttggttaagctatgcgtaacagatttgacagacagcttcatttattggacgagcagcttacccatatgggcgagttgtgcgagactgcgattgcaaaagcaacgcaggcattgaaggacggaagcattgaacaggcaaaagtgatcattgccgaggatgaggagattgatcagattgaaaaagatattgaacgtctctgtctgaaacttctccttcagcagcagcccgtggcaaaggatcttcgcaggatttctgcggctctgaaaatgatcacagatatggaacgtatcggagatcagacatcggatattgcagagatcattttgtcgtcaaaaggagttgcggctacagatgagatccatgtaatcggtacgatggcatctgaggtgagcaagatggtccgcaccagcgtcacggcatatgttgagaaagatttagagcttgcacgcagcgtgatgaaggcggacgatgagatcgatcagtatttcgaggaagtgcgggatgagatgatcgagtttataagagaagaaaaaggcgagaacgggaaacgcatttttgatctgatcatggtgacaaaatatctggaacgtatcggagatcatgcgacgaatattgccgaatgggtagaattttccattacgggagtgcataaggatcatgcgatcatacatgcggaataatgaacaaaacaagtaaaggagaactggaagaatgatatattgcgtggaagatgacgacaatatcagagaactggtcatatatacattggagacaacggggcttaaagccagagggtttgcggatggttcggcctttacggaggctctggcgtttgaaacgccggagcttattttgcttgatatcatgcttccgggagaagacggtctggagatattaaaaaaattaaaatgttcgtccaagacgaaaagtattccggtgattatggtaactgcaaaaggatcggaatatgataaagtgatcggtctggattcgggagcggacgattatgtgacaaaaccgtttgggatgatggagcttgtttcccgcatcaaggcggttcttcgcagaagcaaaggatcgcaggaaagggaaaatccggaaatacaaggagttcatattgatgtgaagaaacatgaagtgaccgtagatggacggacagtacctcttacattaaaagaatttgaactgcttgaaaagctgatgagaaacgaaggaattgttttgacaagagatcagttgcttacagaaatatggggatatgattttgacggagaaacaagaactgttgatgtacatatcaggacgcttagacaaaagctgggtgaaaagggagaaatcattcagacagtacgcggagtcgggtatcgcataggaggaagcgcatgagtataaagaaaaaaatccagcaaagcatgactgtgattttgacggtaactcttgtgcttgcttatgtgatcctttcggttatcctttataatcggaatatgaatctgcttcagacagaagtaaaacaggaagcggcatatattcgtgaagcgatcaatttgtctgacagcgattatatgaaacagatggataatgttgtggaaagcacaagggtgacgcagatcaaagcagacggaacggttctctatgattcacgcagagatgcagacatccttaaaaaccacggaaaccgaaaagaagtcagagaagctctttctaaaggagaaggggcagacgtaagaaagtcagaaacggtagggaaggatatgtattattatgctcttcttctcaacgacggaacggtgctgcgcgtatccaagtcgattgataatctggcaagtaccgcagtcagtctaatgccggtgatgggaattcttgccgtactgacaatattgttcgctttcgctttggcaagatggcagacaaatcgattgatcaaaccgatcaatgaacttgatctggaacgtccattggacagtgatatttatgaggaattaagtcctttgctggaggcgatggaccggcagaacagagaaaaagaagcggttgcgaatatgaggaaagagttttccgcaaatgtatctcacgaactgaaaacgccgcttacgtcgatttccggctatgcggaaatcatgaaaaacggattggtccgtccggaagatatttccggtttttcggaacgcatctacaaagaggcgcgcagactgatcaccctgatcgaagatattattaaattatcaaagcttgatgaagaatctgtggaattggaaaaagaagatgtggatctgtatgaactgacgagggagattgtcagtcgtctttcgccgcaggcggcacagaaaaatattcggatcgaactttcgggagaatctgttcattatcatggaatccggcagatattagatgaaatggtttataatgtctgcgaaaatgcagtaaaatataactatgaaaacggaaaagtttcggtttgggcgggaaatacgttgaatggaccgaaaatcagtgtgtcagatacaggtataggaattccgaaagaacatcaggaacgcatatttgagcggttttaccgagtcgataaaagtcattcaaaagagcgcggaggaacgggactcggactttcgatcgtcaagcacggagcgcttctgcatggggcgaaggtcagtgtggaaagtgaagaaggaagaggaacgaagatcagtatgcagtttccgcgaatttgtcagaaataaataggaacaccgataaaacataaagggtctggtatcaggctcttttttgttctcttaagaagcttgaaaaatccatcagaaaaagtttaattaaaagtttgaaaaattataagattgtgctattatacatataacaaattccgaaaggagaaagatatgatcatagaagttgattttaacagtgatgaagcgatttatattcagctttgtaatcagatcatcatggggatcgctacatcggtcattcatgaaggagattcacttccgtcggtgcggcgtcttgcggatacgatcggcgtcaacatgcacacggtaaacaaagcatatagtgtactgaagcgggaaggctatatcagtcttgacaagcgaagaggagctgtaatttctcttgatattgataagttagaggaactgcaggtgatgaaaagacagcttcagatcgttcttgcaagaggctgttgtaaaaatatttcgaggcaggaagtgcatgaactggtagatgagatattcgatgattatgaataatttgttttagcagatttgaaagcaaaataaccgacaggaggaacttatgcatatttcatatacaaaacaggcggcaaatgcagtcagatatgctgcgaagaaagcaaaggagatgaagcatccttacataggtacggaacatctgcttctcggactgcgggaggagttttcgggggttgcgggacaggtgcttgcgcaaaacggcgttgagacagaaaagatcatgcagcttatggatgaactgatcgctccccgggaggagatgcccgcatcgcagaaaccgaaagaaagtccaaggcttcgctatatcctcgcgaacagtgagaaggaagcgcatcgtctccgtacagccgaggtcggaacggagcacttgcttttgtcgatgatacgggatgtggactgcgtcgccgcaagaattttgatcacgctgaatatcagccttcaaaaacttttaaaagatattttaaatgcatcgggagtcgatccgaaagattatcaggatgaacttcaggacgagtcgagaggaagcggctctgtgatcgagcagtattgtacagatatgacggctcgggcagaggagggaaaacaagatcccgttgtaggcagggaagaggagatgtatcgccttatgcaggtgttaagccgcaggacgaaaaacaatccctgtctgatcggagagccgggagtaggaaaaacggcggttgtggaaggtctggcgcagcgtatcgcggcaggcgttgttccggaaaaaatgaaagataagcggatttatacgcttgatcttccgggaatgatcgcagggtctaaataccggggtgaatttgaagaacgtatgaaaggtctgatctcggaagtagagtccaacggaaatattattttgtttcttgacgagatccacacaatgatcggagcgggaggagcagaaggggcgatcgatgcatccggcatcttaaaaccgtctcttgcaagaggggaacttcagttgatcggagcgacgacgatcacggaataccggaaatatatcgagaaagatgcggctctggagcggcgttttcagccggtatcggtagaagaaccttcgaaagaacagtgtcttgagatattgaaagggttgaaaggaagatacgaatcgcatcataaggtgctgattagagacgaggcgctggaagcggcagtttcgatgtccgagcggtacattacggatcgtaaccttcccgataaagcaatagatgtgcttgacgagtcatgttcaaaagtcagtctgaaaggatataaagtaccggaaaacctgacggctttggatcttcgcctgaaagaactggaaaagcaaaaagaagagagtattaaaaacggttgttttgaagaggcttcgcttttacagaaagagcaggaggaggcagagaaaaaatcggagcagctaaaaaaacgttttcagaaaaaaacatcttcttctcagccggaagtgacagaagaagatatagcggaagttgtttccgcatggacaaagatcccggttcaaaaacttgcggaaagcgatacggatcgtcttaagaaactggaaagtgtcctccaccagagggtcatcggtcaggaggaagctgtgaaagcagttgcccgtgcggtaaagagggggcgtgtaggattgaaagacccgaaacgcccgatcggttcgtttctgtttttaggacctacaggcgtcggaaaaacagagttgtcgaaagcgcttgccgaagcgatgttcggcaatgaagaatcgatgatccgtgttgatatgtccgaatatatggagaaacattccgtctctaaaatgatcggatctccgccgggatatgtcggacatgaagaaggcggtcagctcagcgatcaggtgcgtacacatccttattcggtacttttgtttgatgagatcgaaaaggcgcatcccgatgtgtttaatattcttttgcaagtattggacgacggacatattacggactccaaagggcggaagatagatttttccaataccgttatcattatgacatcaaacgcgggagcaaaagcgatcatagaacctaagaagcttggatttgcggcaaaagatgatcctgcaggcgattataagcgtatgaaacaaaacgtgatggatgaagtaaaacagatctttagaccggagtttttaaaccgtattgatgagatcatcgtattccatgctctcgagaaaacgcatatgaaaaagattgttacgcttatgtgccgggattttacaaaaaggatcgaagatcagatggatatccgcctgactttacgggagtcggcaaaagcgcttattgcggaaaaaggaacggatgcaaaatatggcgcaagacctcttcgccgcgctctgcagacagaattggaagacaaacttgcggaagcgatcctgaacggagaagtgaagcggggagactgcattgaggcgggaactgtgaaaaaagagattcgcttcattcggaaagaagatcgtttataggagtagaaaaatcaaatattttatattataatggtacaaaggtcaaaggaatgcgaaagacaatgatttacacaaaacatatcctgtgatcacattgtgaaatacttaggaggaaaatgaagatggcagcagtgaaggaattattgcgcgcggagaatgacggaagtctcagtttcggagactacactctttcggaaaaaacgaagaaagataattatgaatttgaaggtgatatttataaagtaaaaaccttttcggaaattacaaaacttgagaggaacggaatgttcgtttatgaatctgttccgggaagcgcagtggaaggttttaaagagacggattcagaagttgcgttttctgtttccgcaaagggagacgttcagtttactttggaattagagccggaatgtgagtatgaagtatttattgacggcgagtccgcaggaaagatgcgtacgaatttaagtggaaaactcagtgtcagcgtggaactttcagaaggacaggaagcgacaatgagagttgtaaaatgttaatatattaactgaaaagtttacaaatacttaaattgatttcggggtggatgctatatccaccccgtttgtctgtaggcagatcttatgctgagaggcgtttagaatctgtcttttaagatggatgtgtcagatctgattgtttaatgagtgtttgattttgagaaggagaatgaatggcaaaaggaaagaaaagtgtgtttttctgtcagaattgcgggcatgaagaggcaaaatggctcggtcagtgtccgggatgcggggagtggaatacatttgtagaggaaaagatcggcagcggtgtgacgaaaggcagtacacagggagcaaaagctgttcgcgagcttgtcagagaagcgaaagtgatcccgcttaacgatgtaacggctgaagatgacgtgcggtgcgctacaggcatcaaagaattagaccgcgtgctcggaggagggatcgttccgggatcgcttgtgcttgtcggcggcgatcccggtatcggaaagtctactttgctgcttcaagtgtgcaggattctggccgataaaaagaaagttttatacatttcgggagaagaatcgcagacgcagatcaaactaagggcaaaccgtatgggaaactttgcggacggattgtttcttttatgtgagacgaatctggagatcataagaggaattcttgaaaaagagcgtcccgaacttgttgtcattgactctattcagacgatgtacagcgaagaagtttcatccgctcccggaagtgtgtcgcaagtaagagaatcgacgaatgtatttatgcagcttgcaaaaggattatgtattccgattttcattgtcggacatgtgacgaaagaaggaacggtagcaggtccgcgtgtcttggaacatatggttgatacagtgctttattttgaaggagacagacacgcttcttacagaattttacgcgctgtgaagaatcgtttcggatcgacgaatgagatcggcgtgtttgagatgcggcagagcggacttgaggaagtggaaaatccttcggaatatatgttgagcggcagaccggaacagtctgcgggatcggtcgttgcatgttctatggaaggaactcggcctattttgatcgagatacaggcgcttgtatgcaggagtaatttcgggatgccgaggcgtacggctgccggaacggattataacagagtgaatcttcttatggcagtgttggaaaaacgtctcggaatggcgctgtctaattcggatgcgtatgtcaatatcgccggaggaatcagaatgaacgagccggcgatcgatcttggtattgttatggcgcttgtttcaagttacagaaaccgcccggttgatgaaaagacgatcgtgttcggggaagtcggactaagcggagaagtccgcgcggtcaatatgcccgaacaaagagtcgcagaggcgaaaaagctgggattcgagacgtgtattcttccgcaggtgtgcatgaaaatggtaaaagatatcaaaggaattcgactcatcggggtaaaaagcgtaaacgaggcggtcgggatgatataagcgcctgttcatgagtaaaccgctgacgttagctgcgataagcacgcagcgcggttttaggaatggcgcgggctgaactgttatggcctgaattttttgaatggaaaaaatatgcggttgtaaaaatagtataagtagagtataatagcagtaagttaaaagagaaataacctgagatgtgcgataaccttgttattttgaacctacattagtttaaacgggattcctatatttctgtaatatgtcaggcctccgacagcagtggacgacagaaaagcagatgcggttgcccacctagccgtggctaggactcaaaatacagggaacggcattttggggagttacaaaagataaaggcggccgtcctgtacgaccgctttttgcaatggcgataagccgaagtttgggtttgtcccggagcttggcagccgtttacaatcccggtacgagcctttggtgattccggtgattcaaatgaaattaaatggaattatgatgtgaatatgaaaaaaaagtgggaaaagataaaaagtcagatatttaaagttattataacgataaattctcatcacacaggcgcttatgcagcacaggcggcttatttttttgtgctgtctttgatccccatatttttgcttctcttgacgatggttcgctttacgccgataacgatgagcgaagttatgacagcggttttgaaagtatttccggaaagtgttgcgcccatgatacgttcgatcgtatctcaagtatattttcagtcaggaacgatcgttccggttacgattgttgtagcgctttggtcagcggggaaaggcgttctgtctgtcacatcgggattaaacagcatctgtgagaatatggagacgcgtaattatttttatctgaggataagagcatcgttttatacagttatattcctattggctatcgtaagctcccttgtattatctgtattcggaaacaggatcagcgtgatgatatatgagcacattccgtttttaagcaaagttgtcgaatttattattcggatcaggacgtttgttacatttgtcgtgttgactgttttttgggatcttgtgtaccgttttcttccgaacaggagaaatatggcaaagacaactcttcgcaaacagcttccgggagcggtgtttacggcatgcggatggctgcttttgtcgttctttttttcggtataccttgatgtgtttaaaggctttacaagtatgtacggaagtttgacgacgattattttgatcatgctttggctgtatggatgtatgtacattatattgctgggcggagagatcaatgcgcttctggaaaaatttttgcagaaacgggcaggcaatttgaaaaagaagaaagagaaagaagtataatccctcgggcaaaagcatagtcttttgttacgggggtgatttattattgatctatgttgtggaaaaaggagatacgttgtccggcattgcggtaaaatttggcgtgcccgtttggaagatcgtttatgataatcagctaaaagacaaaaatcagatcgtgcccgggcaggcgcttcttttgttggaagttgatgaggggcaggcagaggaaagtacacagcctgaattggcaaaagggaaaacgatcggcggatatgcttatccttttatagataaagaaattttagaacagtcgtttcctgcgttaaaagaacttcttgtattttcttatggttttacatttgaagggaatctggttccgcctttgcaagacgatctttggatgatagagaccgcatggcgtcacggagcaaaaccgatcatggttcttacgccgttttcggaaggagcttttaataatcagcttgtaaaagtgcttacggaaaatgtcgaggtacaggaaaggcttttggaacagttgactgctgaagtaagaaggcggggctttgcgggagtcaatattgattttgaatatgttttgcctgaaaataaagttcagtatgctgcgtttatcgggaaaatgagagaacttttaagaccggaaggatatacggtatctgtggcagttccgccgaaggtgtcaaacgaacagagagggcttcttgtagaaggggcggattacagactgatcggggagaacgcggattacgtttttttaatgacttacgagtgggggtatacgtacggacctccgatggctgtcgcaccgcttgataaagtacgtcaagttgtcgagtatgctcttagccagatcccggcggaaaaattgattttggggataccaaactatggatatgactggcagcttccttatgagagaggagttacaagggctcagacgatcggaaatgtgcaggcagtggatcttgctgttgaaaacggcgcgttgatccggtatgcgcagactgcccaaagtccgtggtttacatataagaaaagcggcatggatcatgttgtctggtttgaagacgtcagaagtattcaggcaaaatggaaactcgttcaagagttagatctggcaggagcctggtattggaatttgatgaggaaatttcggggcaactggctgatgttagagtccccggatgcaggaagaaacacttgacatgaagcagggggaaaggagtatgatatcaagagaagataatgagataaatgaaaaggagacgatgtgatatgaacggaaattttgtttactgcaatcctacgaagctttatttcggagaagattcccttgattttttgaatgaggagcttcctaaatacgggaaaaatgttgtacttgtttacggtgcgggttctattaaagaaaacggaatctatgataaagtaataaatatattaaaaaagaatgaaaaaaatatcgctgagattgccggggttatgccgaatccgactttggcaaaattatatgaaggaattaagattgccagaaatcataatgcagatctgctgcttgcggtaggcggcggatcggtatgtgattattctaaggcggtgtctgtatcagtgaactgcacggaagatccgtgggagaaatattttgtgcggtttgatgagcctgattgtgagatcgttccggtcggctgtgttctgactatggttggaacaggatcggagatgaatgcgggatcggttattacgaacgaaaagacgaagcagaagatcgggcatgtgtttgaagatgagaagattatgcccagattttcgattttgaatccacgttttacaatgacactgccacattatcagatgactgccggaatttatgatatttttaatcatatttgcgaacaatatttttcagatacagatgataatacgagcgattatatcagtgaaggcttgatgcgttctctgattcattcaagtaagatcgcaaataaagacccgcaggattatgaagcgagaagcaatattatgtggacggcaacatgggcgcttaacacgcttgtcgcatgcggaaaatcgacagactggatggttcatatgctcggacaggcagtaggcggatatacaaacgcgacgcatgggatgacattggcggcagtttcacttccgtattatcgtcatattatgccgtatggtcttgaaaaattcaaacggtttgcggtaaatgtatggggcgtggatgcttcggaaaaagaagatcgggaaattgcggaagaaggtctggcagctatggaaagctggatgaaagagctggggcttgttatgaatctgtcagaacttggggtgacagaagagatgatagaagggattgcggatgtgacgatcgtattcgataccgggtacaagaaactggatcgaacagaaattatcgatattttcagggaaagtctcatatagtaacagttcagtctgcgtcattcgtaaaaccgcactgcatgcttatggcggctgatgccactgttttactcataaacgggcggccatctgtatggctgaacttgttaccttatataacgagaagttgaacagtctgttccgattatgctatacttgacagagagctgccgaaaggttcggcaaagaatcatctgtactattttataaaagtcaggcagaagatcgggaggttgtgatgacgggcggtattgcgaaagtagtcatattcagttttacagaaagaggaacgaagcagaatcgatacatatataggaaattaaagatgcaggggtatatctgtgaaggatatgcccctgcaaagtatgttatgggagaagaaggcggggtgaagcaacttccgaaaaaaaaggaagatttgattcgggaacgctggggaaagtgggcatttttatttatcggtgcggcagggatcgcagttcggtatattgcgccttatgtgaaagataaatttacggattcggctgtcgtcgtggcggatgaagccgggcagtatgtgatccctttgttgtccggtcatgtgggaggagcggcagagctcgcggatcagatagcaaatctgctaggcgctgtcagtgtgcatacgactgctacagatgtgagaaaaaagtttgcggctgatgtatttgcaaaaaaaaatgcattgtatattacggacagagaggcggcaaaaagaatttccgcagcggtgcttgacggcgaattgatcggaatttatgcgcaaggcgatcatgcagaaaatgccgtaaaaaattcaaaagagatgttttcggatgaagtttgcatatgtaatacgatagaagaagtaatgaagtatcggtatcgggtcattcttgcagattcgtttcctgcgatagatgaaaatacacttcttttaaagccgaaaaatattattgtcggacttggatgcaggaaaggaatttcagaagaacttttagaaaaaggtcttttagaaattttgaaaaagaatcatctggatatgaatcagattgaagcgcttgtaagtattgatctaaagaaagaagaacctgccgttgtttcgctggcggaaaagtataaagttccgtttttgacatattcggcggaaatgctcaacgaggtggaagaagtctcatctgcatcttcttttgtcaaaaaaataacaggaatagataatgtgtgcgagcgtgctgcggtgacatattgtaagaaacactgcgagtattttgaactgattgccgggaaaagcatcgagacagcgatgactgcggcaatcgcaagacgaaatatataaagacagaagagtgaaaggaaaaaggcacggaggaagaaacaaatggtatttgaattacaatttttagattggctgcagacgctgcagacgacgattttaaacgaaattatgaaagcggtcacacatcttggagacgcgggcgctctgtggattatactggcggctgttctgctggcatttccgaagacgagaaaaagcggggcgatcgttgcggctgcgcttattgtcgatcttgtgttatgcaacgggatcttgaaaaatatatttgcccgcacgcgcccgtttgatgtaaaagaagggatttcgctgctgatcacggcgccgaaagatttttcttttccttcgggacatacggcggcatcgtttacagcggttgcggcgctgtattttgcaggagagaagaaactttggaaaataagctgtgctgtggctgttttgattgcgttttccagaatgtatctgtacgttcattatccgacggatattttgggcgggatcatcgtcggaatcgtatcaggacttgtcggggcgtatataataaaacgggtacagaaaagaggcgtagttccgaattagataaaaagacttgatgaatatgcaaaaatgaacgagaagaaataacagggaattgttatgataatttaaagctgttcatttgcagggagacagacattatgaaaaatgaaaatcagcatttctcagcagacagacggaaattcggcagacatttttggatcggcgcggcagtggccggagcgctttcggcggcggttatatttacggcggcgagtgcggtttaccgaaagaatcgtttcgatctgaaaatcggagaagaaaaagttggatcaaaggaatatcagctttgtatggatcttgtaaaatatgatgtgaagatggagatccaaaagcggtatgacgctttgtacggtgaagatttttgggagcaaagctatgaaggacaatatggatatgagattttagcggatcacacggtggaaaagatcaagtatattcatgcggtgtatgatctggcggaagaatacggcgatgtatccgacggaagctttgcggcgattgaaaaacggtggaagcaggaaaatgcaaaaaggcagaaaaaggtagaagacggagaagtcatctacggtctgaaagaatacacgtttgacctttatatgcagtatgagatcagtatgtataaagaaatttactgtaatgatactgacagaaaaggaatggatctgaccgaagaagaagtagccgaatattacagtcagggagaatgggtttttcaagacgacggggaaaaggctgatttggaaactgcgcgcattgcggttgagagagaactgcgtgagaaaaaatatgatgccatgatcgctcagatgacagaagatttagaagtaagcggtgatttggaagcagttgatcgttttactttggatcatttaaaacgataacagtcaaggcggcgccggcatatgaccgggaatataaagaggcgctttggagattgtatcaggtgggaaggagaaaagtatgaagaagaaatgggtgagcggaatgctcgcgctcttgcttgtcggaacgactgtcggatcgatgatgccgacagaggcggtgcaggcagaagaaaacagtcagggaaagacgtattatgtcgattctgaaaacggaaaagatacaaacgacggactttctgaaggaaaagcatttcagacactgaacaaagtaaatgatcttacgctcggagcgggagaccgagttcttttgaaaaacggatcggtgtttgaggatcaggcgcttcatattaaaggaagcggaagtgaaaacgctcctattaaaatttctacatatggggatgagaaagacggacgtcctcagatcaatacaaacggtcatggacaatgggaattaaattacgggcacaaacttgacaatcagaaccataagtggcacggaacagtatcttcgtctattttgctgaaagatgtagaatatatcgaaatcgaaggactggagattacaaatgaccgggattccgcaacagatgcagagaaagataaaaattataaatacaatgacgcggaatgcatggacaggacaggcgttgccggagttgcaaaaaacaaaggaacggttgaccatatcgtattgaacgatctgtatatccatgatgtgacaggcaatgtttacaataaacatatgacaaacggcggtatttattttattgttgaaaagccggagaacgagagcgcgacgggaattgccagatataatgatgtgacgatacaaaactgctatcttgatacggtaaaccgttggggaattgcggtcggatatacatatgaatgggcaaaattcaacggcggcgctttaagtgatgagacgatgaaaacatacgcgtcctcagacgttgtgatccagaacaattatttgaataatgtcggcggagacgcgatcacgacaatgtatatcgacagaccggtcatccagtataatgtatcggaaaatgcggcggctcagattaatacgacagattatacagatccgcagccacagcttgacgcaaacggaaatccaaacggaaagacgcatacaggaggaagagtcgcggcaggtatctggccgtggaaatgtaaaaatgcggtgttccaatataatgaatgttttaagacgttaaatgcctcaaaaggaaacggagacggacagccgtgggatgcagattatggagacggtacaaattatcaatataattacagccacggaaatacggcaagtacgattatgttctgcggaggcgaatcgatcaataatacgttccgttataacatcagcgtacatgaagatatgggaccgcttgatccggcaggaaacgcaggaaatacacaggtgtacaataacacatttgtgatcaaagaaggaatccggtcgatctggtacagagattccggcccggttacgatggaaaacaatattttctattttgacggagagcagccggcgcagattacaaactggaatccgcgtaataataaagtttattccaacaatctgttttataatgtaagttcttatccggatgataaggctgctgtgaaagtggaaaaaggaactccggttcttgcagacgcagcgtcaggtccggtaaaagctgcagaagacaaacaggcaagacggcatgaagatccgacggaaataaccgtttttgatggatttaaactggcggaaaattcgccggcgatcaataaaggaaaagtagtgattgaccgtaacggttattcaatcgatcacgatttcttcggacatgcagttacggcgacgccggaaatcggagctgcggaaagcgatgtgatcggagatctcgttcttcgttccgtagtttatcaaatcgatcaggaatcaaagacgatcagcgatataccgaaaaatacaacagtagaacagttttgcaaagattcgattgtagatacgggagtgacgatcactgttaagtcaaaagacggcaagccgttggaaaatgcagatatcattaaaggcggcatgacagtaaccgtttcctgtgaaggaaaagaggctgttgtatatacggtagttgcaagttcggataataaactgaagtctgcatattatgaagtgaaagacaaaacgatctatgtgccgtttacagagaagaatccgacaacggcaggcgagctgaaaggaaatgttcaagcggctgaaacagcggaagtatctgtagtaagcggtgaaaaaacgttgaaagatcaggaaaatatcgcagatgccatgacaatgaggatcacggcggaagacggtaagacgaacgattacacgatcaagcagaaaaatacatataactgggcgttggattatgcaggaccgcagcagggaaatgtatggtttggtcagaagaaagcggcatcaggagagtggacggagataaaagagtatgacagtcagtatccgaactggatggtaaatacatactacggtccgggaatcgacgagcaaagccattccgcaaaaccgacagaagcaacgcacggtcttctttccgctccaccgagcacaggaatttctactgctatggcgtatagagtgccgaaagacggaatagtatcattccatgtaaaagatgacgagccgtatttgagacaaaacggaaacagcggcggaacagtaacattaaaactgttagtaaatgatgaagaaaagcaaagtgttattcttgaacagagtaaagttcaggcaaaagactggaaagcgtttgataagattgaagtgaaacgcggagattatatccgtgttgcggcaatttcaaacggaaatcctacaaagccgtctgttcatgtgacaccgatcattacttatcttaacgaaggcggaacacctgcacctgaaccgactccggaattgaaagctccggttgacgtgaaagtttcggaagttaccgagacaagcgcaaaagtatcatggaagaatgcggcggacggaaaagaagcggcaggatacaacgtatatgttgacggaacaaaagtgaatgaagaacttattgcagagacaacatataacgtaagcagcttgaaagacggaacgacttactctgtagaagtgacggcggtagacgcagacggagaagagtcggcaaaatcagaaaaagttgaatttacaacagtaaagaaagttgttgttgacaaagaagcgctgaaggcgaatattgaaagagcatccgctcttttgaacgagacagacaagtatacggaagagtctttaaaagcgcttgaagaagctttggcagccgcacagaaagtaaacagtgatccgaaagcagatcagacaaaagtaaatgatgcgaacaaagcgcttgaaaaagcaatcaaagacttgaaagagcaggagaaaccggatcccgaaccgactccggaattgaaagctccggtcgacgtaaaagtttcggaaattaccgagacaagcgcaaaagcatcatggaagaacgcggcggacggaaaagaagcggcaggatacaacgtatatgttgacggtgtaaaattgaacaaagaacttcttacagaagcatcttgcggattgacaaatctgaaagcagagactacatattttgtagaagtgacggcggtagacgcagccggaaatgaatctgttaaatcagaaaaagtgacgtttaagacattgaaagctgaagaacagaaggaagattcgacaccggaaaataatgaaaaaccgggtgcggtacagacgggagatcatgcaaacgtatttgtatggatgatcggacttcttatatcagcgtcggcggctgtggctgtaatgttcaaaaggaataaaaatcgttaaaaagatatcatatttataatatgaatgcagggagcggttaaaaatgaaccactccctgttttgtatttcaaaacatgccttttgggcatatgaggatctatatagacttgcgatattgtgacggcgttgtatttacacagtcacgaaatactttagaatagtgctgggaatttgtaaatccggactgcagcgctatttcggtcagtgacagttttgtattttgcatcaggctgatcgaatgattgattcggtatacgttaatatagctggagagagtgattccgatatgcgccttgaacagtttgcttaaatagcgaacagaaatatgaagctgtgacgcaatatcttcctgtatgatcttctcggtataatgctccgcaatataattcagcgtgtaagcaacataactgttctggagctgcgggtttgaaaaatgatgggccggttttgtgtgatccaatatgtacagcattaagttgatcagagaaatgttaatattggctgccggaaacagaccgtcagagtcggtataaaggctgatcagcttgtctaatgtactgtcgattacgtcgtctgccgagaaacggtaataaaaatgcgaagaaaataaaactgcatgcattaatgtgatcggataaacgccttcgttttctaaaataatatttgaaaacatgttgggatcaaagtggacgtgtttaaacgtacagtcagattttttgttcagataaaaagagtgaacgatattcggcagtatcataataaaatcgccttttgtgcagtgaagtgtttccgactggacatccataagacattcgcctgatatgatacgataaatctctattgtagagtgcagatgatgcggaaatgtgtatcctgccggctgtgatgtgatagttgcgcctgataagatcgaatcggacaaagacagtgatccgatcgaatcggtattgttttttttgtatgttttcatgaaacgttcctcttgatcattgcataaacttatatgttggttatatacggttatatatagattaattataccagaagtttattaaaaagtgacaaaaaatataaaaatatgtagataaaatgagaacttattccgaattatataatttgaaaaaaatctcgcaatttaaggtttttctgttataatgttagttgacgcttactaaaagatgaggagtgaagattatgacattgaaagaacttggcatcggacagaaaggaattatcttatctgtcggaggaagcggagcactcagacaacattttctggatatgggattgatacggggcgcagaagtgacagtcgtaaaatatgcgcctatgggcgatccgatcgagttgaaaatacatgggtatgagctgacgatccgtttggatgatgcagagaaaatagaagtaaaagaaataaagtcagaagaaaaagagaaagaaagacggaacaaggtgaaacgttctgcacatcccggatacggtgaaggcggaaagtaccataagaaagaaacagaaaatccgcttaaggatgatgagacgttgacgtttgccctggtaggaaaccaaaattgcggaaagacgacgttgtttaatcagttgacaggggcttcgcagcatgtcggaaattttccgggcgttaccgtagaccgcaaggacggcgtgatcaaagggtacaaaaatacattaatcacagaccttccgggaatttattctatgtctccttacagcagtgaggagattgttacacgagaatttttgttaaatgaaaagccgaaaggaatcattaatatcgtcgatgcgacgaatatggagaggaatctctatttaacgatgcagttgatggagttagatatgcctatggtcgttgcattgaacatgatggatgaattgagggaaaacgggggaagcgttcatgtaaatgaaatggaagagtttctcggtgttccggttgtaccgatctccgctgccaaaggagagggaatcgaagagcttgtgaaacatgcggtgcatgtggcaaagtatcaggaaagtcctcaaaaacaggatttttgtgcggatacggaaagcgggatccacagaggacttcatgcagtcatgcatttgatcgatgatcacgcacaaaaagccggaatccctcttcggtttgcggcaagcaagatcatggaaggcgataaaaagattaccgagaaattggatttaagccggaatgaaaaagaaatgctcgagcacatcgttgttcagacggaagaggagagcggttttgacagagcttcagccgttgccgatatgcgattctcttacataacggaagtgtgtgagacggcggttgtaaaaccgcatgagagtaaagagcgtctcaggagtaaacggatcgaccgcatactgacgggaaaatatacgggaatcccggcctttatcgcgattatgggaattgtattctggctgacatttaacgtgatcggagcgggattacagtcgcttttggaaacgggaatcggatacttgacagaaatcacagatcaggcgatgacatccgcgggagtcaatacggcggttcattccctcgttattgacgggatttttaacggtgtgggaggagtccttagtttcctgccgatcatcgttacattgtttttcttcttatctttgctggaagacagcggatatatggcaagagtagcttttattatggataagctgcttcgtaagcttggattgtcgggaagaagtatcgtgccgatgctggtcgggttcggatgtaccgttcccggggtgatggcgagcagaacgcttccgtcggaaagagacaggaaaatgacgattttgctgactccgtttatgagctgtacggcaaagcttccgatctatgcattcttttcggctgtattttttccggactatgccgcgcttgtgatgatcggattgtatgttcttggtattgttatgggaattatcatggcccttttgtttaaaggaacgatgtttaaaggggagcctgttccgtttgttatggaacttccgaattaccgtcttccgggaatgaaaaatgtcggacagttattgtgggaaaaagcgaaagattttcttcagagagcttttacggttattttcgcggcgacgatcgtgatctggttcttgcaaagctttgatacaagcctgaatatggtgacagattcaaaggacagtattttggcaatgatcgcgggagctctttcaccggttttcgcaccgcttgggtttggggactggcgtatatcgacggctcttgtaaccggatttatggcaaaagaaagtgttgtctcgacgctgacggtgttgttcggcactacggaagcgcttcttggaacgatcacggcggcaggagctgcggcgcttctcgtattttgcctgttgtatactccctgtgtggctgcggttgcatcgatcaagcgggagcttggcggaaaatgggcgttttttgttgtcatcggccaatgtgtgatcgcatggcttgcggcattcgcagttcatacagttgcgatgcttttttaaacctgcttggacccggcagagggaacggaacatgaatcgggataggtaatggagtggaggagaagtcctgccggattgcagcgtacttctttatccactcccttttttatgagaaattcaatgatgtgctccggcatcaggtacagaaaatcatttgcacagattttgatcgtaagaagcgaaaagctgtcgttttcggtttctttggagtgggaaacggaaatgtcaaatatttctttgactgttccttttttcttttttactcctgaaagggaacgaaaatcatggactccgacgagagaatcagccgcctttcttatggcggcaacttctgattccgagatgatttccggtatatttgccgtgtaggctcttgtgaatatgttttggacaggggcggtacagatgcggtacaaataagttctggagactgcgtttaaatctgatcggaaacgatcagaaacaatttcggaacttaagatgtgaatatctttcggaagatattcgttaagctttgataaaaaatatgtatcggaaaaaggagactctgtgtgaaagttgactgtctgacagagtgcgtggactccgggcgctgttttagcgccggcaaaaagagtgatgtcttcaccggtcattttctgtaaaacagaagaaatgcgatatgaaatcgttttcgcgtatccgtctgcggcaggacgtgtccatcctaaatagcgtgttccgtcgtattgaagggttagttttatgttgggcataaggtactcctttgtgcggttatttgtatatcatatgtctgtataatagtgtatcgggtatcggatgtcaaacggaatatacaggggtgattttctaaaatgattatgatatactggctacgtgaaatcagagtaaataagaaaaacagtttaagattcattttgttgcacaatgaaaaaagcaataaaaaaatataaaagaaaacaaaaaagtgtaaaagaaggagaaaaggatgatagaagaaaaaagagtagaagattccagagtggagacggttcacattatcagaccaaatcatctcaatgcagccggccggcttttcggcgggatgttaatgcagtggcttgatgaagtagcgggaatggtggcaaagagacatacgagagcgaacgtcataactgcgtcagtagataatcttcggtttatccatggcgcatataaaggcgagatggttgttatagtcggaaaagtaacatatgtcggcacgacatctatggaagtgcgtgtagatacttatgtggaacatatggaagatgggatgcgccgtcccatcaaccgcgcgtattttacgatggttgcgttagatgaagacgacaaaccaaagcaagtgccccgtctgattttagagacagaagcgcagcgcgcggaatggaaagcggcagagaaacggcgtgagatgaggatgagacgaaaagaagaaggtttttaataaaatatagagtctactttccgttgtgttttcggaagagcgaggaggccatattgatcgttcgatcgatctgctcccgctcttctttgctttttccgtcttttaaaatgtcaaggatcaaggtcatttcctccggtgtaaaacggattccctgtttgttagctccgctgatgagagccatcataataggagccaactcttttccggattttccggaagttttggaggcggctgttttgatcagttctaattttatagggtcgatatttttcattgcgggattattcatccagtcgttcatattggtaattcctttctataaatgattttaaatattttttaaagttcgttttctttcttttgctgtgcatctgtctcatcgtgctcttgattttgcgaaacggatgaaaacaggtcgctgtacatatggaactgttcttgaagatctgcgggaaatatgcccgagaacaggtcggcaggattaaaagaatcgtttccctgaccgtcttgcggctgcatcatttccataaaagacatcatttcttttaattgaatcaaagtatcgagcatttcggcatcttttttgttcagataaggccggaaactgtcaataagatcgaaaggagaacttatgttttgatcgctgtttccggtggaaaaaggatctgccaggctgcgttgtccgaaaagccggatcgttctttgaagttcaataaacttgataaatgaggcgagcatccggcgtccggaaaatggggtgtaagggatgagaagcttcatgatctgaagtgtaggcgatgtgacaagttcatcaaaaggcgtcattcgttccgtttggtcttgatccatttccaaaatgctccactgtatagagttgtaaatatatatgtgactttgtatagaaatatgtattttgggaatgttactttttagaaaatatttcataaaatagtaaagaatgggtacaagaaaggaaatgaatatgtcaagaaaattaattatcgatgggaatgcagtgtatgagattgatgaacagtgtatgttgagacgaaaattggaagaaaatgccgaggcgacaaaaggcagcagtgagaacaaaaaagggacggcaaataaagatatgaaaaaggattaaataaaatataaacagaaacaggaaaagatgcgcggaagagaccgcgcatctttttgagacagaggtggaattcagattagcatccgcatccgcagttggatccgcatccgccgccgaagctgttgccgccgcagaagagaagaagaaggatgatccaaagacaactgtcattgccgcatccgtttccgcatccgctgttcatattgccgcatccgccgcagcaggcgagaagaaggatgatccaaaggcaagaagacattccgtttccgttttcgcaaccgcatccgcagttagtagctgttaaatcactcatgttaaatcctccgaattgattattgtttacagttttatattatgccggcagatgaaaagtgttccttaggggcaaaagtttcgtgtcgggaatattctgaataaaaaaggatttcttatgaaatgggtaaaacaatcagtcggatactggtgtgatgacataaaacagggaagatgcatagggcagggagtgtgcgtggcgctgttggataccgggatagcaagacatcctgatctgaaaggcagcgtagtgaagttttgcgattttacaaaagaaggtagcctgccgggagagaaatgttatgacgacagcggacatggaacgcacgtggctgggattttgtgcggaagcggaaaagtgtcagcgggagcatacgcaggcatggcgccgaaagcaaagcttgttgtcggaaaagtacttgataaagacggaaacggggatgtttctcatgtgatgaaagggattgagtggattttaaaggaaagaaagaagtatgggatccgaattgtgaatatttctgtcggtacgaatcccggacttgcaaaaaaacaaaaagaactgctgcttgatgcagtggaactgctctgggataccggtcttaccgttgttgtctctgccggaaactacggaccggaggagggaacggtggcagttccgggaaacagcagaaaagtgattacggtaggcgtgcctgacagcaatcttccgtattcgagaaaaagcaggaagagtctgaattattcgggaagaggaccgacgggagaatgcgttgtaaaaccggatgtttttgcacctggaacaggagttgtaagctgtaacagtatgtatggaatgtcgggagaacatccttatataatgaagacgggaacgtctatggcggctccggttgtctcgggagccgctgcctgtctgttgtcaaagtaccctgatatgacaaatgtggaaataaaattaaagttaagagagtcatgtgtgaaaatgaaagggacagaatcaggatggggaatgcttcatgtagggagattgttaggctgtgataaagtgtaaagaaaaaacacttgacacctgaatctgtttcgtgtatgatggcataggtgacaagaatggataagattttagagcaggcattattatatgatttttacggtgaacttttgaccgcgcatcagaaagaaatttacgaacagtttgtattagacgatctttcgcttggggagatcgcggcagatgcgggcatcagccgtcagggcgtccacgatattgtgaagcgctgtgcaagatcactggaagaatatgaacgaaaacttcatcttgtagaaaaatttcttgctgtaaaggagaaggtttcctgcatcgatgagatattgcaagaatgggaagaagagaaagaaaaccccgaagaaattatagagcgtctccgtaaattgtcggcaacgatcatcgaagaattgtaaatatagttgtttatgatggcaagaaaaaagatgatcatggcagatgcaaaagtaaaatgtagaggagtcagacaatggcatttgacagcttaacagagaaattacaaaatgtattcagaaaccttcgcagtaaaggccgtcttacagaagacgatgtgaaggctgcgcttagggaagttaagatggcgcttcttgaggcggatgtcaattttaaagtcgtaaaaaaattcgtaaaagatgttcaggaaagagcagtcggtcaggatgttatgaacggactgaatccgggacagatggttatcaagatcgtaaatgaagaacttgtaaagctgatgggatctgagactacagagatcaaacttcagccgggaagcgcgatcacagtgatcatgatggcaggtcttcagggagcaggtaagacgacaacgacggcaaaactggcaggaaaatacaaattaaaaggaaagaaacctcttcttgttgcgtgtgatgtttaccgtccggcagcgatcaagcagcttcagatcaacggtgaaaagcagggcgtggaagttttttcaatgggagataaaaaccgtcctgcggatattgcgaaagcggctcttgctcacgcacagaaaaacggaaataatatcgtgatccttgacacggcgggacgacttcatattgatgaagatatgatggcagaacttcagcagatcaaggaggcagtagaagttcatcagacgattttggtcgtagatgcaatgacaggtcaggatgcggttaatgtggctgaatcctttcataataaaataggaatagacggtgtgatcgtcacaaaattagacggtgatacaagaggcggtgcggcgctgtcgatcaaggcggtaacaggaagaccgattctctatgtcggtatgggtgagaagctttctgatctggaacagttttatccggacaggatggcatcccgtattctcggaatgggagacgtactgacactgatcgagaaagccggagcggagcttgacgaagagaaagcgatgcagatggcagataagatgaaaaaagctcagttcgactttgaagattatctgatgagtatggaacagatgcgtaagatgggcggtctgtcaagcattatgagcatgatgcccggattaggcggattaggcgggaaaaataaactgccggatcttgattctccggaaaatgacaagaagatggctcgcatggaagcgatcatatattcgatgactccggaggaaagaaaaaatccggatctgttaaatccttccagaaaacatcgtatcgcaaaaggtgcgggagtggatatttccgaagtgaaccgcatggtaaaacagttcaacgagtcgcggaagatgatgaaaaaacttccgggtatgatgggcggtaaaggtggtaagaagggcagattcagacttcccttttaacacatagataacaaaacaaattaaaagaaaaacagaggtggaaaaaatggcagtaaagatcagattaagaagaatgggacagaagaaagctcctttttatagaatcgtggtagctgattcaagatccccgagagacggaagatttatcgaggagatcggaacatatgatccgacaaaagatccgagcgagtttaaagtagatgaagaacttgctaaaaaatggcttaacaacggagcacagccgacagaagtagtaggaaagatcttcaaagcggcaggtattgagaaataagatgtccgcggaggtgcgtacagatgaaagaattagttgaagtcatagcaaaagcgcttgtagatcatccggaagaagtttctgttaatgaaaaaaatgaaggacgtacgatagtgcttgagcttcatgtcgcagaaggcgatatgggaaaagtgatcggcaaacaaggccgtatcgcaaaagcaatccgttctgttgtgaaagcggcagcggcaaaagaagacaaaaaagtagttgtcgatattatgtaatatataataagaaagtaagggggacagcgttcggtaagaacagcctgccccttttcttatgcaacagtctgattttgcagaatcgatacgatggcagaaagagagaaaattgattggaacaagggagaagtggaatggaacagtttttgcaggtaggagcgattacttccacgcacggaattcggggagaagtaaaagtatttccgacgacagacgatccggcgcggtttaaaaagctgaaaaaagtgattttggatacaggaaaacgtcagatcgatatggagattcaatcggttcgtttttttaaacagtttgtgattgttaaatttaaaggaatcgataatattaacgatgtagaacaatataaaggaagttccctttttgtttcaagggaaaacgcggtaagtctggaagaaaatgaatattatattgccgatctgatcggcatggaagtgtttacagaggaaggacatttcggaattgtaaaagatgtgatggagaccggtgcgaacgaagtatatattatagattcggacgttcatggggaagtgctcgttccggcgatcaagcaatgtattgaaaatgtagacgtagaaaacggaaaaatgcagatccgtctgttagagggtctgatcggatagattttaatgttaggagaagcaaaaagaatgaactttcatatacttacgttgtttcccgaaatggttgaaaacggactgaaaacaagtattatcgggagagcggtcgccgggggactgctttcgatcgaggctgtcaatatacgggattttgcatttaacaagcatcaaagtgtagatgattatccgtatggaggaggagcgggaatgctgatgcaggctgagcctgtgtatttggcatataaagatatcgaggaacggatccaaaagcggatacagaatgcaaaaatgcagaatgcagaaacggaagaacaagatgcggaagtgaaagtgcagaatgcagggatacaagatgcagaaactgtaagtccggataaaaaactccgtgttgtctatctttctcctcaggggaagacttttgaccagaaaatggcagaagaactggcagaggaagaagatcttgttttgctgtgcgggcattatgaagggattgatgaacgtgttttggaggagatcgtgacggattacgtctctataggagactatgtgctcacaggaggggaacttccggctatggtcatggtagatacgatctcaaggcttgtgccgggcgtactgcacaatgacgtctcggcagagtttgaatcatttcaggataatctgctggaatatcctcagtattccagaccggaagagtggcacgggaaaaaagttccgccggtgcttttgtcgggacatcatgcaaacatagaaaaatggagaagagaacagtcgattctgcggacttacgagagaagaccggatcttcttgaaaaaagctcgttaacgtggaaagaaaaaaagtggctggaagagacggttaaggaaaaaacagttcacgaagagccggaagatgtgacagagtgcacgaattgacattattacactttttagcttgaatttcccgaaaacttgaaagtataagaataaaaggagtagaatatttcgttggagaggttgccggatatgggaatctctttatcaaatatatcttttatataataatagggaggaagagaaaatgaagaaaaacattttcaaaaaagctggcagagtgtttacatcactggctcttgcagtgtctatttgtctgacgatgtcggtttctgttttcgctaaaaacggtaacgacttggaaaacaaaaacatcaattatcgcgattatctttattttgtgatcgatggaaaagattacaagatgacagatcttacaacagagccgggcgtagatctttcgggaagcaatgtgtctgccgaagtttacgcaaaagttgatatggatggtttgaatgcggcgatgaaggcgtcaggttccaaagatacatttgtcctgcacaagaatacatatatgtcacgttatgaaaaatcgacagagccgattgtgtataatttccaggatgccggaaacggtacatatgcgatcgtagataagtcgggagcacatatgacattggataaccttgcgcatgtagctactgtgggattgtatatcggaaaaacagcggacagctccagctattatttcggtatggacgcagttgtaacaaatcttttcaaactgaatattcttggaaaagtgacagcgaaggcaactgtaaactataaaaacgcagaaggaacgattttaaaacagctctagtatgagacggaaacaacaggatattggggcgagaatgttcttgtagaatatgcgaatcttccgttgatcggaacatcttataatcttgcgggagatacaacaggcgcatggatcagttacggatatgaaaatgagatcaacgtaacagttgaaagaattgagccggtctttactggtctggaaactaaagttgcagaagtagaggagttccttaacaaaacagaagacaaatacacagaagaatcaatgacggctcttacaaacgcacttgaagcggcaaaaaatattcttgcaaacaaagacaatgcaatccaggcagatgtggatgacgctttgacggtgttgacagatgcgaaagacaagcttgttttggttcaggaagaaacagttaatctgaaggcgttgcaagacaaagttgcagaagtagaaaaattccttgcagagacaaagacagaatatacaaaagagtctatgaaagctttgaaagacgcgctcgcagatgcaaaagcaattcttgcagatccgaaaaatgcaaaacaggcggatgtagataacgcgttgaaaactttgacaaaagcaaaagaaggtcttgtaccggtaacaagcgactcgaaaggaacggaagctgcaaagcaggaagcaaaagctccggttacaggagatcattcgtttgcgggaatcacgcttttggcatctatgctttgtcttgcggcaggaacgatcgtgtttgtaaagagaaaacacatttaggacttgtcaatcggcacaaaatatgatagactacagaagttgtgaaaagaagagcgatggtcctctgacacatttttagtgttaagaacgtcaaatatgaaggaggtcacacaaaatgaacgatatcattaagaaaatcgaagcagaacagttgaaagaaaacgcaccggaatttaatgtcggcgatacagtaaaagtatacgcgaagattaaagagggaaaccgcgaaagaatccaggtttttgaaggaacagttctgaaaagacagggcggcggagcaagagagactttcacagtaagaaagacatctaacggaatcggagttgagaagacatggccgatccactcgccacatgttgaaaaagtagaagttatccgcagaggtaaagtaagaagagcgaaactgaactacttgagaaaacgtgtaggaaaagctgcaaaagtaaaagaattagtaaaatagtaaccagtgagagggacaattacagatttgtatattgtcccttttttgtaattgcggcgagcgaaagcccgggcttgccgagatcttggcgtccgcttacgatcttaaattttccggaagagggaaaagaaagatggcagaggcgggcagtcggcagaagcgattagagcggaggggttatgggagagttagactttcggaagaaacgtaaaaatacaaacatacggggcacggcaagaaagcagggaaagaattccagacaacgcgaactgagatttgaaaacgaaaaaagagagaaacggtcttccggtaaacgctggggaaaaaataaaaaaaatacaaaagggatcgttttgtgggcagtggaacttttgctcgtatgtatgacggcggtttttctcgtagcagctttcggacagagagtgaatgttatcggagattcgatgtcgcctgttttaaaaaacggaaatgttgtgatgataaatcactttatttataatataaaagatccttcgagaggagatatagcggcgtttcaaaaagacggagacgagcggtattttgtaaaacggatcgtaggactcccgggagagacggtgcagatcaaagaaggaaaactgcttatcgacggaaaaccgctgaaagcagagtatgtgtcggatatcggatatgcgggaacagcgtccgaaccggtccatctgggaaaagatgaatatttccttttgggagataatgagactgccagtgatgacagtcgtgaagaaaaaatcggcaatattaagaaaaaagagatttatggtgaagtttggtttgttataaaaccgtggtcagacatcggttttgtttcagactgattttaggagggagattcatgcactttcaatggtatcccgggcatatgacgaaagcccgcagaatgatgcaggaaaatataaaactgatcgatctgatcatagagcttgtagatgcgcgcgttccgcttagcagccgtaatcctgatattgatgagctcgggaaaaataaggcgcgtctgatcctgctgaacaaatcagatcttgcagaggaacggatcaatgacgaatggatcgactactttaaagacagaggatattctgccgtaaaggtgaactcaaaaaaaggcggcggtatgaatcagatccgttctgcgattcaggaggcgtgtaaggaaaaaacagagcgcgaccgtaaaagaggaattttaaatcgccctgtccgcgcgatggttgtcggcattccgaatgtcgggaagtctacgtttatcaattccctcgcggggaaggcatgtgcgaagactgggaataagccgggcgttacaaaagggaaacagtggatccggcttaataaaaatgtagaattacttgacaccccgggaattctctggccgaagtttgaagatcaggaagtcggaaaaaaactggcgtttatcggttcaatcaaagatgagattcttcagacagaagaactttccgcagaactgatcaagtttttaaatgcagaatatgcgggagtgctggaagaaaaatacagtatcgaacatttggaagatgtatatgaatgtcttacggagattgcaaaaagcagacattgcatcgtgcgcggaagcgaacttgacacggaaaaagccgcagcgatccttcttgatgattttcgcagcggaaagctggggagaatctcattggaacgtccacagtaattataaaaagaaattcacaaagcgggaagagaagatcgtgaacgtcagatagaaaaaaagactgcgggcggaaaatgtgaagaaaaagagcagaagcagcaaaaagaatgactgcaaaaagatgtgcatatagcagaggttgacttgaatgaaagatgtaataaaagaacttgtaggatggatcgtatcgattctgctgatcgtggcggtatcttatctgatcgttacatttgtcggacagagaacgcaggtaagcggttcatctatggagacaactttgtcggacggagatcaccttatcgtagataagatttcgtaccggttccgggagccgcagcgttacgagatcgttgtatttccgtaccgatatgaaaaaaatacttactatattaaacggatcatcggacttccgggggaaacggttcagattgtagacggatatatttatataaacggaaaacagcttgatgagcattacggaaatgaaataatagaagaagcgggaatggcggcagaaccggttactctcggagaagacgagtattttgtgatgggagataatcgaaataacagtcaggacagcagggtgtccgatgtgggcgcgatccatagagatgaattgatggggcgcgcgtggatacggatctggccgcttgatcagttcggggtgataaaacatgagtaaaagtattgcacagatcaaagaagaattcggaaaagcggatgagaaggaacgagaagcgctgtacagtatgtatgatgctgatgcccgcagcggcgttcagaaactgatcgcttcctaccgaaaaaaagaagaggcgcttcgcttagagcgggagcgcctttctctcatgaaaagttatgagagaaaatacaaagatgcagaaatgatatgcggaatcgatgaagcgggaagaggaccgctggcagggccggttgtggcaggcgcggttattttgccgaaagattgtgaaatcttatatctgaacgattctaagaagctttcggcatcgagaagagaagcgctctacgatgaaattatggagaaagcagttgctgtcggcgtcggaatggcaagtcccgcaaggatagacgagatcaatattctgcaggctacatatgaggcgatgcgtaaagcggtagagcagctttcggttgtaccggatcttcttttaaacgatgcggttacgattccggagatgccctatcgtcaagtgccgatcgtgaaaggagatgcaaaaagtgtttccattgcggcggcaagcgttatcgcgaaagtgacaagagacagactgatgatgcagtatgataagatccttccggagtatggatttgcacaaaataaagggtacgggtcgcaaagtcatattgaagcgttgaaacgtgtcggagcaagtccgatccacagacgttcgtttatcaaaaattttatttcagaagaataaagacagaaaaaacatttaaaacagaatttcaaaaattatgaaaaagaatgtggtaaaatgaagcgaaacgtaaagcaaaacaacagatctgtcggagctgtatacgagcaggcggcaggatattatctggaacaaaacggttatgaactgatcgagtataattacagatgccgtgacggcgagattgatattattgcaaaagacggagactgttatgtgttttgcgaagtgaaatatcgttccggcagacaggcgggcaatccgctggaggcggtcgatcaaagaaagcaaaaaaagatttttcggtgtgcgctgtactatacggtacagcatggaattgaagatgcgcagtgccgctttgatgtgatcggggtggaaggtacagagattacgcatataaagaatgcatttgtggggtgacggtatgagtttagggttagtttataaaaatggagaacatatttttgacgaagtgtgcggagaagttccgtttttgacatatccgctatttgaaaagacgggagttgtaaaaagcgctttttcgacaaggatcggcggagtgagcaaaggctgttatgagtcgatgaaccttagttttgacagaggggatgacaaagatgccgtcatggaaaattttcagaggatcgcatctgcaatcggaacaaactgtcacgatatggtcttgtcacgccaaacacatacggcaaatgtgcgtgttgtcacggaagaagataaaggaaaagggattgttcgcgaacgggactatacagacgtagatggtcttgtgacaaacgtgccggggatttgtcttgtcacttcttatgcagattgtgttccgctttattttgtagatccgataaaaaaagtcatcggtcttagtcattcgggatggaggggaactgtcggaaagataggaaaagagacggttcgtgttatgaaagaacatttcgggtgtgatccggcggatatattggcggcagtcggaccttcgatctgtcaggattgctatgaagtaagcggcgatgtgattgaaaaattcaaagaagctttcgatgaaaaagattgggataatctgttttacagaaaaaacaatggaaaatatcagcttgatctatggaaagcaaacgaatcggtttttcgggaatcgggaatctgcaaggaacatattgcggtcacgaatgtctgtacgcattgcaatagcaagatcttatattcacatcgggagacaggtgataagcggggaaatttgtgcgcgtttcttgcattaaaataaaatttcttttagaaaaacacggaacaggaaaaacagagaaaagcagatcttatcgaattgtaaaaaataaaagatgaaaggaaaaatatagaatgcaggggtatcttatcagtgtgcttggcaaagcgcaaatgtttttcggcagacactttcttatggctgcggcaggcagcaaaaatgtgtcgcagtcagatgcgaataatgttcttgaaacagccggagaagtgacggctgaggcaacggaagaagtgaaccggtttatcgagttttttcatgacaatataccgaatctgatcagcttcggagtgaaagttgttctggcgcttatctttttctttatcgggagtaaagtgatcaagtggattagaaaggtgatcagaaaatcgtttgagagaagcaatgttgatgcaggtgtgaaacagtttgtcgattctatgatcaaatttagtttgtacgttatattgatcttcatgatcgcaacaaacttcggggtagagtcatcgtctgtagcggcattgatcgcttcggcaggtgttgcgatcggtctggcggttcagggaagtctgtctaattttgcgggaggtattttaatacttgttttaaaaccttttaccgtaggcgattatattatcgtgacacaggaaaatatcgaaggaactgtaaaagagatacagatcttttatacaaagctggcgacgatcgacaaccagacggtagttgttccgaacagtatactgacaaataacagtcttacaaatgtaaccgcaagaccggagcggaaactggatttgaaagtcggcatttcttacgaagcggatcttcgcaaagcgaaacagatcgtagaagaaaaactgcgtgacgatccgtctgtcattcaggatgaggagaaaagagtatttgtagattcgcttggagacagcgctgtcgtgatcggacttcgggcgtgggtcaagacggatgagtattggacgacaagatggcgtatacttgaggagatcaagctgacttttgatgaagaaggtatagagattccgtataatcagctgacagttcatatgaaaacggatgaagaaactacaaaaggaaatggaaataccctcggggaaaattagcggcgggaaaatccacggggaaaacgtttggaaaaaactaaaaaatgtaggtttgtcaaacatatgttacaccccgatcaat

SEQ ID NO: 7619 - DNA, 10212 bp, Unknown
  gut microbiota DNA sequence
tctataaaatgaatttaaaaagataaatttatgaatgtcatatattgataagctatttctctaagagcggttttactatttcaataaattcatccgatttttccacatgaggaagcattttagcatgatctattccgatgatttctatctccggaatttgattttgatattggtttgcggaaagaatattttcaggattatcatttcctataataattgtaattttattttttaatttgcccagacaaaaagaaatatttgcatttgtataacccaatttctgacaggcgtatacatattttgaatgagatttatttctgtgcgatgattcaaaacatcctaatatatctttttcatttactttgttttgattgtagaaatatgcggaagtaaatctctcgtatataatggattttcttgtttttatgttatatataaaagtacctataacaggcatatatagtatgttttttaataatttgctctgcttagaaggaacttttgcaagtgaaactaagctttgaggatttatcattataatacgatcgattaaggtgtcgtcatttgcacatgtcattaaaacaaaaggagaggagtcccgcgaaacaatgacgtctgttttttcacctattacatttttgataaaatcggtaagcagctgcacatataaaaagttagtatatgttaagatcggacgttcagaacaaccacatccaagcaaatcaatagaatatacagtgtttgttgctgaaaagtgatctatgatcttattccattcatgagaagatgagaaaacattaaaattgtgtataagaagaagaggcgttcctgcccctttctttttataagaaatttttccgtatttccaatcatagacgttataatcatctgcaccaagaagattatcagcagtagcaatatatgtagagattctgttaaaaacatgcattgccgttaaagaaacacctgtaaaaacagcaattctctttaataacttattcttatccataggatttcaccatctttcaatactttatttaattattatactacactgaatttatcaattcaagaatgaaagaaataataagaatattttaagagataatagaaatgatttataaaatgtttcacgtgaaacattttattgtaataaaaagcagaagcagaaataaaaaagtcaaaaatagaaaatgattttttgttagtaatggtagatataaaaggttattttaaaagataaaaacgtgaaaagttaataaaatgtttcacgtgaaacattcaaaagttatagattaataatttgaaaagtggtataatataaaatacgcgaacataaggaatttagattgtgaaaacatcagtgttcttattgcgagcgtcttggaatatgaagcaatattatataaaatatgttaaaagaacgcatatgaggaggcaaaaatggggagaataatagctattgccaaccaaaaaggcggggtaggtaagacaacaacttctataaatctatcggctgctcttgcaagtaaagggaaaaaagttcttgctcttgatatggatccacaaggaaatatgacaagtggtttaggtgttgataaagacgaagctgaaaaaacagtttatgatctgataataggaaatgcgggaattgaagagtgtatatgtaaagatgcacttgaaaatcttgacgttcttccttctaatataaacctttcggcggcagagattgaattgatcggtgttgaaaataaggaatatatattaaaaactgaagtggaaaaagtaaaagatgaatatgattttgttgtaattgattgtccgcctgcattgagcatgcttacaataaatgcaatgacaacggctgattctataatagtgcctatacaatgcgaatattatgcattggaaggactgagtcagttgatacatacgattgaacttgtacaggagagattgaatccgaatcttgagatagaaggcgtcgtatttacaatgtatgatgcaagaacgaatctttccctacaagttgtggaaaacgttaaggataatttgaatcagaatatttataagacaattattccgagaaatattagattagcggaagctcctagttatggaatgccgatcaatctttatgatccgaagtcaacaggagctacgagttatatgctgttggcagaagaagttattcataaaggagaagagtgattatggcagggaaaagaaatggtcttggaaaaggattggatagtcttatcccgaataagactgtgaaggaagaatcagcatctcagcagaaagtaagtaaagaaaaacaagaaaaaaatgttggatccggggaaatattagtaaaaataaatgaagttgaaccgaacagagaacagccaagaaaagaatttgatgaagattcgcttatggaattggcagattctatcaggcaatttggaatattacagccgcttcttgttcaaaaaaagaaagattattatgaaatcatagcgggtgagagaagatggagagctgcaaagcttgcgggaattaaagatgttccgattattgtgaaaaactatacggatcaggagattgttgaaatttctcttattgaaaatattcagagggaaaatttgaatccgatcgaggaagcaatggcatataaacgtctgctagaggaatttgatttaaaacaagatgaagttgcagagcgggtttcaaaaagccggacagcggtaacgaattccatgcggctgcttaaactaagtgagcgtgtacagcagatgatagttgatgatatgatcagtacaggacatgcaagagctttgttggcgcttgacgatgaagaacagcagtatatattggcaaacaagatatttgatgaaaaattaagcgttcgggaaactgaaaaacttgtaaaagctttaaaaaatcccaaaaaagaagtaaaagtacaaaaacaagaacacatgtttgtgtacgataatctcgaagaacacttgaaaaatataataggaacaaaagtgagtgttaacccaaaagcgaatggaaagggaaagattgagatagaatattattcagaggaagaacttgaaagaatctatgatttgatcatgtctattcaatcaaaatagaagaaatagaaatgtgaaaaggaagaacgtatagaaaaaagatgaagcaaaagtcataaaatatggggagatgaaaagaaatgaaaggtatattggatagttggggagtagatccgttttatctgtttgtcgttatgtttatcatacagattgtaatgatcgtattgtatgtgatgctgaatacaaaatatagacgtttacagaaaagttatgtaacatttatgcgtggaaaaaacggaaaaaatcttgaaaaaagtattttcggcaaatttgatgaactggatgaaatcgcagaacttgtgagagcaaatgaaaaagaagtaaaagaaatttcggaaaaaatgaaaacacattatcagaaggtcggaattgtcaaatacgatgcttttcacgaaatgggcggagaattgagttttgcacttacaatgctggatgaaaacaataacggatggatcttcaatgcaatgcacagcagagaaggctgttacacttatataaaagaagttgtaaacggtgaaagctatattgagttatcatccgaagaaaaagaatgtctggaaaaagcggtgtatcaagaaaaatatgatttgagagatatggaagaataaccgtatagaaaagtgtgatcataaagaaaagatataagttttagcaataataaaatgtgaattttaattaggaaaagagtaaagaagaaaaaggagtatatgttatgttagatattaaatttttaagaagtaacccagaaatcgtaaaacaaaatattaaaaataaatttcaggatgaaaaacttcctcttgttgatgaagtaattgaattagacttaagaaacagagagataaagcaggaagtagaagctcttcgtgcagaaaagaataaatcttcaaaagaaatcggagcaatgatggctcagaaaaaatttgaagaagcagaagttcttaagaaaaaagtaagtgaaagcgcaggaagaatcgaggagttgtctgtagaagaaaaagaagttgaagaaaaaatcaagaaaatcatgatgaccattccgaatattatcgatccgtctgttccgattggaaaagatgacagtgagaatgtagaactcgagcgttttggagagccggtagttcctgattttgaaattccgtatcacacagagattatggaagcgtttaacggcattgatcttgacagtgcgagaaaagttgcaggaaacggtttttattatcttatgggagatatagcaagactgcattcggcagtgatatcttatgcccgcgattttatgatcaacagaggttttacatattgtatacctccgtttatgattagaagtaatgttgttacaggcgtaatgagttttgcggaaatggatgcgatgatgtataagattgaaggagaagatctttatcttatcggaacaagcgagcattctatgatcggaaagtttattaatacacagcttacggaagaggaacttccacagacactgacaagttattcaccttgtttcagaaaagaaaaaggagctcacggaatcgaagaaagaggagtataccgtattcatcagtttgaaaaacaggaaatgatcgttgtctgcaaaccggaagaaagtatggagtggtatgaaaaattgtggaaaaatacagttgatctgttccgttctatggatattccggtaagaacacttgagtgttgttcgggagatcttgcagatttgaaagtgaagtctgtagatgtagaagcgtggtctccgcgtcagaaaaaatattttgaggtaggaagttgttcaaatctcggagatgcacaggcgagacgtctcggtattcgcgtgaaaggtaaagacggaagctattttgcacatacactgaataatacagttgtcgctccgccgagaatgctgattgcatttttggaaaataatcttcaggctgacggatcggtaaaaattcctgaagttctcagaccgtatatgggcggaaatgagaaaatagaagtcaagaaaaaataagagtaaaaagatctgaaaacaatcaagacagaaagatgaaaaatagatgcataagtatttaaaagcgttaggatttgataatattcaaacaagatcagacttaaaaaagctgttggaagaagttgaagagcagtgtactcatcagacaatagtttcttataagccgggagaagatttctgtgagctgaaaaaagaatacggacaaagtatgggaattgcactgtgcggcggattagatgaaagagaatattttgatccttattattattttccgtattttgaaggaagcggtataagcacatatgcagaaattgccgtagagagaaaaattgaaaaagaacaatatctcggaatgtgtgaagattctaagatcggaataagtctgatatttacggtgcagaacggaatcgaatatatgagagagcgtcaggccggattcccggcagatccgacgacgtcagttactttatccgggcttgctttatcaggaatgatattgcttccggtaagcaaagacgagaaaagcgtaaggtcggaaaaagaagcttcggataaccggaagatgctcattaatgcagcaagaaacggagatcagagcgcgatagaaacactgacattagacgatatagatatgtattctcaagtttcaaaaagacttgcaaatgaggatatattttctatagtggatacgtattttatgccgtatggaatagagtgcgatctttattctatcatgggagagatactggcagtccgcagacgaaaaaacatcgtcacgaacagggaagtttatcagatgaagcttaatgtaaatgaacttcaatttgatatatgtgttcccgtatccgagacgatgggagaacctgagatcggaaggcgctttaaaggaacgatatggctgcaaggatacattaacttttaagagaagtaaatggaatcaccgaaagcgataaaggcgcgttcaggtgatcgtaaatggcgctgatgatgttcgacaggcatgcaaatctgaagtataaatttggaaatcgtcatttctggtcggaaggatattatgtgagcacagtgggactaaatgaagccacaataaagaaatacatccaagatcaggaaaagtatgacataatgcaagataaattaagcgtaaaagaatacgaggactcttttaagggttaaaggctaagtagtacaaatgccatttaggagcggcgatgagtcaagagtatagtggattgaacacagtgaaaggcagcgtctggagacgctggcctagtaataaaggcttatagtcgttctgctagacctcgtttttacgggtgggcgactattatgatggtcggacggatgattcagaaaacagcagagcttttgttgacaaacgtcaggagttttttgcaagtgcggagttatgtctaaggataaaaggaacaacagataaagtaaaaaacaatatgctggtgagacggaaaaaagatagaaaaagcaggtggagagcgggatcagatgaagaaaagagggaaaacgcgctggggttctgcagtttttagccgggattttcctcgggagtctcgtataggtaatgtaacaaattttgtgtaaacctctcagattgatgaaaaaatctcaggtttaattagaatcgtatatgattagatggggcagaatggcagcttgagccgttctgcccttgtttattttctagcatggatcattttgcatgtcaagggcgcccgttaaaaacgggcgttttatctatccttgatatgtaggatgttttatgctagtcaatatcctctggtctgatccggtcctcaaagtaaatgcatagttgatccagggtcaagccccaatcccaggcctttccggtccatttttttgtagcatccatcatggtcagataaagactcttaaacagagcatcgtctgttgggaaaatcgccttcgcttttgttacctttcggagctgacgattgaaattttcaatggaattcgttgtatatatcagtttccggatttctgacggatatttgaaatacgtggacagctgtgaccagttatttctccaggaagctatagaggcggatatttctttccccactctgcttctagatcatctagtgcggaaagtgccaaatcttcagtatctgccttgtatactaactttagatcagccataaaaggctttaaatctttgtaggaaataaatttagtcgagtagcggatctgatgaacgatgcagcgctgtatctctgcttttggaaatacagcatgaatcgcatctccaaatccagttaacccatcaacagacactatcatgatgtcttccacaccacggtttttgatctcgttaagcacaccaagccagtatttcgcactttcattaccaccgatccacatatcaagaacctcacgtttaccattcaactttatcctgatggcaacgtaaacagcttttttgactgttctattatcctcgcgaacattgaagtggacggcatccataaaaacaatcgcatatttgcgctctaatggtcgattttgccattcttttgccagcggaaggatacggtctgtcatccgggaaatcatttcagcagaagcttctacaccgtacacgtcacgcaaatgggttgagatatctctagttgtcattccttttgcatacatggaaagtacttggtcttcgatattggaaatgtctgtctggttctttttgacaatctgtggttcgaactcaccttttcggtctcttggaatatccagatcaatcgttcccattgatgaagttactgttttaggactgtaaccatttctgctgtcatcggtttctttgtttttgtaatcatacttggaatatcctaaatgatcatccatttctgcttcaagcattccctgcagagtttctcccagcagatccttcaacatttcttgtatatcctgtgcatctttcggttgataatgctccagtaagctattgatgaacgctttacgttctggatccatttttcttcttcgtgccataaaaatatcctcctagattaatatttattttaacatcaatccaagaggatatatatcatatctttagtttacacagaatttgttacagtctcttcgtatattattttaccgcctgcagatttgttggcagacggtaaaatagtagtatttaatcgacacgaatccattttccaatccattttcttaatgtgtaatcatatttacgtttatataagacaccattgacagatttatatctccatccaatatcagaagcccttgtttctatgcttaagatatcattatcagtgtcagaaacagaaacggaagtttcaaaaggtgaagcatctgctggtaaacacgggatcatgcataaaagtaataaaaaaataataaaggtctgaaaagtatgtttataaatagtgttattctttctcatggtaatctcctttcatataaagtggtatatttttcagttctttcggtatggaatgaatagtcgcaaaatattttccgtccacataaacgtgatagtcagtttctgtttttaaaatgaatgcgttatctttagttatttctgaaatatcagcttctgcagaagattgtatttggcgataagatacttcaggtacaaaaagaaaagaaaaaacaatggcaaagccaataatgagaattccgcccagagagtgcagcgtttctttaaaagttttttttgtcccatagtttagtatgtaattgattcttgttgttaaaatcagtttatttcttacgacaaaatttgctggactacagaaatgagacagatttccgatagtaatttgttttgctgtttttataatcagttcggcataatgtatagtattaaaattaggagatgattgaataaggtgcaagtcattagaaagctctaaaaaaagcatataatctcttttcaaatattttattacaggattccaccagtgaatgcagcatataatctccatcaataacgatatccataaatgccgttgtttaaaatgagatatttcatgcatacatatatattccatctcttcgttagtaaaatatttggtgtccggcagaattaaaactgggttaaacaagccaataactgctggggaaattcttttatctataatggcaatttttatcggttttgtaaaatgtttgctgcaaatattaaataaccatttccattcgttagtattctgaatataaaataaagatagatactgatgcacttttctatattgaaataaaaatcgtatcagaagtaagatgcttataatgctccaaattcctactaaaagaccttgaactgttaaattgctgctcatcaatggttcagtggtaaattccatgagtttcggtaatatatgatatgaataaatggaatgtgtaaatggaaagttgagcgggaacagcatcctaataagtataaccagaattcccataaacagtaaattcattgtatttcgtggaaaatacatactcctatataatataaagtgcaaaaagcaactcagtaaacaggtaataaaaaagcataaaaaaaatggtccaaacgtaagggtcatattacatctagttgttcctttctgataattctttctttttttgcgctattattttttcaagattttctaattctgttatatcagtttgcgtatctattagtgagcgaagcagtaggttctctttctttgtaccaagaatatcattataaagatcgccaaaatattcttcactggtaattacaggaacataacttcgtgttaatacagttccgctataaacaatatcatctaccttgattgcgcctttatcagacagactacgcagacatgcgtgtactgtgttgaggtttaatgcgttattcgcctttgcaatttcagaggcaatcatgggggcagcactattccataatgttttcaggatttcaagttctttttttgtaaatcgctttttcataactttctccctccttcgccgtaaagtcgttaatattatttcataaaataggttatttgtaaatatataaataaaaaaaaagtaataagatattgtaaaaacaatttaaaa

SEQ ID NO: 7620 - DNA, 49444 bp, Unknown
  gut microbiota DNA sequence
atggacatgtatgaaatcggcctcgtaataacaatacctagtttcatttttatctttacctgtctaaaaaccctgcaattttgcgggttttcgcctttctctatatttttaagtatcagagtcttaatgtcgttctatataatactataataaggctcatatgtctacatcacaactctaaagtattatctaaaagtttcccgggaaaagccatatttcccttcactgacttaaaacgacaacaaaaggcggtatttaccgccttttgcttccggatcagctctgcttattattttgtatttgtaatggtatttttagatctgcgatatttcagtattacaatgattgcagacaatgcaagaaccattcctattcccgttcctataaccggggcatgatctcccgttttcagcgcatttgtcttactttcttgattgtttaaatcttccgtatcggcgccgccgtgaccacttccgttgtgatcgatattattatcgtgattattatctgtgttatcgtcatccgaagaatcaatattttgcgatatcagtttgtaagcagcaactgttcctgacacttcgcaggatgcaagcagataagcatttccgtctgcgctttcagatgcggaaatcatgcacagtccttccggagatacgtcgcctgctatatctttactaaaatctcgggagttaatataatttgcgaaaagaatcttgtcagggtttgtaatgtcataagccataacgcctccgatcctctcaagaccgataaacgcataagttttctctcctaccgttccgattgttacgctttctgcttctacgccctttttccctgaacggtcatctatttctgcggagtcattggaacaattaaagtactgcgggaaatatgccgctgtttttgcttctaactcgtttccgctcgtatacacttctttcattccggatccatctacacaataaacagtgaaggaacgtcctccgaacaggtaatcatattctgaatttaaaccttcataatcgttctgatcgaagaatacaacctttccggttagtccactgttttcagccgtaattttcccggaaggtgatgtttgccctttcccaaaattacattctgcttcattaagatattcgttccactctctggaatccccctcatttgcagttacaatataagttttgccgttcgactcaaacagagaaattccgtccggcatacggattccgcgaagcgacggataagataccggcctgtatgccgcatcttttttatcaatatcgatcggatatttttcgtaatcttcatatcctgcggaacagatattttctatagaaagtgtttgcagatctacgatggcaatggcgtttgcttcctgaagtgtaacataggctgttttatcatttgctgcaatatactccggttctaaatcaacagacggagccgttccttttttcaaaatcactccattttgtacaagctccgctcttttcgcttcactgtcaaaaacggtaaagtcaagatgtgatacattctgatttgtcagatcaattacagtgaccgttcccttagggtcaatacttcccgcttcatagccgtttcttggttcgccttcatctgccgaaagaatttttttactatcgggtgtaaatgtcaccatatccggctgtacacctgcctcataaatctgatcaaatgacaatgtcccatctgcgccgcaaaggaatactgcgaggcatccggcagccgaataatcagatgactggattgccactgcaagcttttctccatttggagaaacggcaacagaagtcatatcaccgtaggagaaacctttgtaattgttctcaacgatttctttgatatttatattctttccatctaacaaagcgatcttatcaactgcatttttatttttcatcggaattgccgttaagttcccggttacaccattcacagcatacgcccagcctgtaactgtattgtaatctataatttccataacgccgccgtccgggttttgcatgccggaattatattgagcagtctgtgtcatggcaatagaagcctttttattctctaatccgtttttcagctctccgccgttcgcatttttggtaacactgaatgaatcaattaatttactttccggggcattgctgtctcccgaaaggttatatacgttgacagagattttattatccgccacgtcaaagacagcgtaacttggactgtactcctggttccattcctgatttccaattggaagatttcccgccaaatatgcctcagaaccggtttgtccgtttgccagcaccggataatctgcattattggccttgtctactttctcaaaaggagtatagtattgcatgtcagaacagcaattacccgtcagataaatcactccgtcaggatcatggaaatcatccagtctttctgcatttctctgaccgtttttcagcacatagcttcgagaatacacatgatcgtgaccgcctaatacaaagtcaacgtcaaattcatccatcacctgctcaaatcctgcatctacatagttctcaatatccgaatcggcagcatgctttgccactgtctgcgtagatttatgatgtgtaacaactaaccattgatactgacctgaatattctgccgtcgccgcatttaaagttgttctgaagttagaaacgatggcttccgcttcggaattgtcctttgaagcgcttggaacatttacatttcccgcattttcattatcgtttccgcccggataagctcctgtgtttaatgttacgaagagaacgttattatataaatagtaatagtttccttttgtctccatttctcttcgttccacaaaatcatattgcccgtctttattcggtgtaacaccatttgactctgcagattgtgcgatttcatccgcagttgcctgaatatagttgccatggctttgactcgttccactgttctgtccgcggaatgttgtctttacctgattaagagacgctgcgtttccatctacactcatttcattcggaagattaaaatgatcatcaaacatgtaatgacgatcatgatttcctactgccggggcatacagaagagatgtcatttcttccggagcaaaaaatgccgcatactcactggattttccccagctttgatcctccacctggtctcccgcggaaacaatgaggttcacatcttcctctttcatcttgtccagcataactgcccatccggtctgattttttccgtcagaaggattccatcccccgttatttgtttctccgttttctttaatctggggatcgcttgtaaaaccaaatcgaaattcacctgcatttggtgtttcataagaatacttctttgaccaagtatttccattatcatatgaaatctgataactatattctgtgccttttgaaagtcctgatacagtagcctgacatactattttcccggtatctgtatattttccttcaactacttttgtaggagtatgaagagctcttacagatgcttctactgtcttatcccccatacggacaatcgcattttgagtaccttccggggcataccagttcaggtttaccgaatcgtctctttcacctggttgtaaagtaaggtattcgattgaaactgcattgttttcctgtgctgccacctcctctgctcccgctgcaaagacatcacttactgtactttgagcgcatacgatcgaaacagctgctaaaagcgccattgtttttctccgttttactctcatatcgtttcctccgttaacccattgaattcaagtaacgataggattttaatggtcttttgttaaggtattttgttgtatatgtaaaataggagttaaatttttccttttacaaaatgacaatggcataaactgtaagttgtttatttcttctttttcggttttggagttggcagttcatcatacattgcatgaaacaagcctgtcaaaaattccttattatcgacttcatctaccaacaacatctcttttgctccctcatagggtaattcacatgaaactatcggcatataactaattgctgattttactggtttaacaagtaatctatcatcatagataccgcctacaatcttgccacgataataaataataaattctcccatcatagctcgataagtaatttcttctaactcagatagctgccctaaaataaactctaagtattccttgcttgatgccatatttccacctcaaattctgatttgtttaactcttttcatattaacaaactgaaagtttattttttagatttatctttgaaaaagccgattaaaattaaagcaataccgagaattgctaccggaatataaataatattaggtatctgataaacaaatctatcaattccagacataacaatataaataatacttcccacactgattaaaatgcttttatctttcatagttggtctcctttgtaacttacagtttcccggttcatcaaactgacttttatttgtgtcttacttttaaatccgactttaattactatttctacattattcatgacctttaaccaaataaagtaaatcagcatatcctgactgcttgagtaattgttcaaacccagaaaacacttcttcttttgtataattattgctctctaaaaactcactgtctttttcgctaaggtgctgataaaaaagagcggcagctattacctcatctctgttggaataatcaatgccatctaaaagtatattctcagcttcattgatttgtcctacatcaatcatatccagaaaatctttcaaattttttccagatacttcatacttgttttctttttctaattcaacagaaacatactttttcccaaatgctaaagaaaataatactcttaccatttcttttatcattcgcataatgtaatctttttcatctgtaaaattcaatgttttcatccccccgatttgcttaactcttttcacctcaacaaactgagcgttatcgctttctttattatctaatctgttagcaatctattcagcaacatctgcctattgtttataaacatctctgttatctgataactttctgtctcttcatattcgcataaatgtatgcttccattatcaaaacaataaatatctgcatccggtatacctaacagaatgggcgaatgtgtaactataaaaaactgtgccccttccttcgcaaatcggtatatttgcattaacaatgtaagctgtctctgaggtgataatgcagcttctggttcgtcaaaaagatacaggccgtttggatgtaaattatcctgagctaatgcaaggaagctctctccatgtgacttttcatgatactttgcagagggatgcttcagatctgcataattttcttcctgcgtggcaacattataaaaactttcggctctaagaaaatatccccacttttccttccggtagccttttgaaatttttattgcatcacataattctgaatgcgtatcatgagtagaaaaaacataattctttgttccaccctcaggattaaaaccatgtgctatagcaatcgcctccaacaaagttgatttaccactgccattttctccgacaaaaaaggtaattgatttattgaaatcaagtttttcaactccattaaaagcttctatttcttttaaataactatcattatcaattctattccaatcaaatattactccttgtatgaattgatcattcatcaaatcaccgcttaactccaaacctattgatatagctcttttcgtctcaacaaatttgaattcacataaatctacttatcaaattatatgcagtgactacatagacaaaaattgctacacctgcaaatatcatagcgtctttctttgcacctttatcataacattcttttgcactcgtcaaaaaggttaatcccataaaaacaaacataagaggcaatgttatatcagtagacactatgtttataagtccaagagaaccgaaaacaatcgttaaaacactaaagattgctttcaaaacacgcatacatattcctcctttagcaaattcaaattttacttaacctttttttatcttaacaacctaagattgatcgatatacttgttcatctttttcatctcaatctctatgtcctattagcttacaaatcattcttttaattcttacaacaattcctccaactcctcccagccttgataataaaatgccgagagcaaaaaatatcactataacaggaaccatgtccaaataattttctcccatagtcgatctcctttacagattctaatgtgttttttcagtatactataattataatcattctatcagacaaaagcttttatttctacggaattttctgcaaagcatatatctacgtattgttaaactgtatcatagaatataactaaaaggtaacctgcctcagcaagttaccttttttcaacgccttacaaaaaattttctcttttctcataaaatcctgatatgctttctcatttactataccgggactttgagaaaaacatccgggaattagtggggcacaaagtgaaccatctttcaaaaacttatcgaaatctaatctctcgtctccatcaagatcaccttaccgtacacgaacgatatttccacttcatcttcaacaaattcattacttacgcacaggctgtcgctcggcttaaggaaatgatttgtcagcggatattttgcccctgtaatgttgaacgcatctacaggctgttctaatggaaacaatgaaaagtacggtccgaatgcctcttcttttttcaatgtaacagttttatcgagaagccgtatcttattgtgagcgtccataatgcaagcgtccgctcctgcttccagcgcaatttgtaaacattgcacatttgcccacaggtgatcgatccggttgccggttgcccccaggatgacgatctttttgcgattcagaccaaggcaaaggcgcaaagcgatctctgtgtctgatgcatcttttaccggattaaattctctcacgggcacatcaagttcttctctgtaatattcaacgagcttcctcggaacgctgtcaaaatctcccacgatataatcgggttttatctcgttgtcatacaaaaacacaagacctctgtctaccccgataacaaattcagtttcttcgctttttaaaatcgagagagcaaaatctttttccaccatcccgccgctcacgatcacagtctgcttactcatgacgtttcaatatctccataaatctctttgtattttctgtaatattgcctttgaaaactcccgaaccggaaacaataatattcgctcccgcatccaataccgcttccacattttcacaataaattccgccgtcaacttcgatatccgtcttaagacctctctcgtcaagcagggtgcgaagttcttttatcttgtcaagcgattccggaatgaacgcctgtccgccgaatcccggctcaacgctcatgatgagaaacatatccgcaagctccagatacgggatcaattctttcacaggagttgccggtttgatcgtgatgcctgctttcactccgcttgcctttatttcatccactgtcgcctttacatcttcacacgcctctaagtgaacagtaatgatatccgctccgcattttgcgaactctttcacatacctgatcggctcagtcaccataagatgtacgtcaagcgcctgttttaccgcgccttttaacgcggacaataccggcatgccaaacgaaatgctcggtacgaaaattccgtccatcacatcaaaatgtatatattttgcgcctgctttttctgtctgttcgatctgttctcccagaattttaaaatcagccgaaagaatcgacggggcaagaatattttccatcttcaatatctccttttttcctgtaattcacggtacatcgcaacataatcgttgtaccggatctcatgtatctttccttcttctgccgcctgcttcaccgcacagtccggctcatgcacatgatcgcaccccgaaaaacggcacaatccttcatacggaccgaattccgggaaataatattttaattgttctttttcaaaatcattgacataaagggaactaaatcccggagtatctacaatatatgagccgcagtcttccaccttttcatcttcttccaaaactaaaagttcggaatgtctcgtcgtatgctttcctctgtcgatcttcctgctgatactccctgtttccatcattacttccgactgcagaagattgataagcgacgacttccctacacccgacgggcctgcaagaacagtcgttttcccgtgcagaatctttttcacttcttcgatcttccatccttctttcgcactcgtaaaaaagaccggatacccgcatgatctgtatatttcttccatcttggaaatatcgctttcttttgcaatgtcagatttgttaaaacataagattaccgggatcttcttttgctccatcatcacaagaaaacgatcaagaagattaaaatgaggtttaggcttcgtcaccgcaaatacaacgagcgcctgatcgatattcgccaccgccggacggatcagttcgttctttctcgtaaggatttccctgatatttccctttttttcctcttcatctaaaacttctatctctacattatctcctacaagaggcttcacaccgtcttttcggaagatcccttttgctttacattcataaacaccggattctactacatgaacgtagtagaatccggcaatcccttttacaattttaccttgcatattttataaattccctgtcggtaccgcctattcattgtctccgccgttttccggatcggtctgtcctgacgatgatcctttgctgacaaaataatatacttgtgtccctttttccacttttgtacctgccgacggagtcacactgtaaatcgttccgaccggagtatcactgtagtcttcaccgccgtataccggaacaaaccctgcctcagtcagcactttaaccgccgtgtttttctccattccgatcacatcactcggaatagtagaccattctgtttttgatccaagcgttaccgtatactttattgttgtgcctttctttactttagttcccgcttctgtttcctgtgtgacaaccgttcctgccgttccgccggcatattcttccttaggacttcctttcagtccaagttcttctaaggcggcggcagcctgatccgccgtcatattcagaagcgacggcacttctactttatctttttcgggatcttttcctttactgataataagctgaacgcttgtgccctcgtctacctgctctcccgaacccggagtagagctgactacatttcccatctcgatcgtatcatcataaactgcctcgccttttgtcactttcagaccagcatcctgaagcattctctctgcttccgcctccgatctgttcacaacattcggcacagttacttttttcgcagcttctccgctgctgatcacaaccgtaaccgtagaatttttctttactttcttcccttttcccggattctggctcttaatctcgcctttttcgtattcattggaagcttcttctttatccgcttttttaataccgagatcttttttcttaagttctgcctgtgcgttttcaaatgtcattccgcgcacatccggtactgttaccatcttttctgtctttgaagaaagaccggctcctttgaaaaatcccgccgcatttccgacaagaaacagaatcagcagcgcgatcacgactcccgacacgatcatcagtattttcatgatccgcttcgtatcgggatttacatcattcttcttccgcctgtctttttgactgcgccttctgttatcataatcattatcgtcgtcgtagtcataatcgtcgtcatcatcgtactcatcatcgtcatcgtactcatcatcataacgactgccctgaatccgttccagttcttctgtcgacataaccatcgtgcggtctgtctccgctcctgttcccgctcccaaaacaacaaaatcgccgtccggctctacaagcgatcttttcagatccataagaagagacgcacagtccggataacggcgtcccggatttttctgtgtacacttcatgataatgcactcaagactgtacgggatattcggaacttcttctgccggagacgtaatctcttcctgaagatgcttcaacgcgaccgacaccgtggaatctccgtcgaacggtacgtgcccggtgatcatctcgtacatcgtaataccgatggaataaagatcgctcttctgatctacgactccgcccctcgcctgctccggagatgtgtaatgaaccgatcccataacgcttgtgctgatcgtctgtgtagacgtggtcgcacgggcaatgccgaaatccgtcacttttacttttccgtcttttgaaatgataatattctgaggcttaatatctctgtggataatatgatgattgtgtgccgcctgaagccctgtcaccatctgaatggaaatactgatcgtctcttttgccgaaagtcttccctttttctttatataatctttcagagtgatcccttcgacaagctccattaccatatagtacagacctctgtcctgaccgacgtcatacacattgacaacgttcggatgcatcagtcctgccgcagcctgcgcctcactcaaaaatttctttataaatacctgatccgaacgataatcgctttttaatactttgatcgcgacatagcggtttaatttacgatcctttcccttgtaaacatccgccataccacccgatccgatccgtccgagtatctcatatctttttcctaagcaaactccctctttaatcataatacactcacctcatctgcaaacggttctataaggacaacccctatattatctgtaccgccgttttcttttgccgcttctataagagcctgaccggactctacgatatctcttcctccctgaacaatatgaaaaagttcctcatcttctaccatattgctcaaaccgtccgtacacatcaatatgatgtctccccttttcagacggtgctcgtaaaagtctacctctacatccgctttcgcgccgatcgctctcgtaataatatttttatccggatgatgttttgcttcttccggttttatcccgccaagccttaccatctcttctaccagggaatgatctttcgtaagctgctgaatgccctgattgatcaaatacaaacggctgtctcctacattcgcgaaatacatcatctgatttgagatcgtcgccgcaacaaccgtcgttcccattcctttgagatgttcgtctcttgaagcttcttttatgatctccctgtttgccgtttttatagcgcctacaagacatctttcaatatcttcgccttcgcttagcgccaattccctgttgagcacttcaaccgtatacttagaagcataatctcccgcctggtgacctcccataccgtctgccaccacaaagaggttctgaagaattccgagaggtctgtcagtcacataaacataatcctgatttacttgtcttaccattcctacatctgttatcgaaaatgttctcatatgcttctccttaattctcattcattgtctcttcctcgtagcgccgtctaagctgaccgcacgccccgtcgatatccgagcccatttctcttcttatagtaacattaattccgcttttttcaagtttatttttgaaattcaaagcacttttgcggcttggacgctgaaaagaacgctcctttaccggatttaccggaatcaggttcagatgacagttacgcggcgcgagaagctcggaaagctcctttgcatcctcgtccgtatcgttcacctcatgtacaagactatactcaaacgtcactctgcgtcctgtctttttaaaataagtatcgcaggcggaaagtacctcgcctaattcgtacttatttgcgacaggcatcagtttccttctcttttcctgcgtagatccgtgaagagaaagcgccagtgtgatctgcagacgttcctctgccagttccagtattttcggtacgatcccgcatgtagaaacagtcacattccgctgactgatattcagtccgtgttcatctgtcagtatgtgaatgaatttcagaaaattattataattatcaagcggctctcctgttcccatgataacgacgttggaaaccctctctccgataattttctggatctggtagatctgaccgagcatttcggatgcagacagattccgttttaatcccccgatcgtcgaagcgcagaatacacatcccatgcggcatcccgcctgcgaggaaatacataccgaattaccgtgcttataccgcataagaacgctttccaccatgtttccgtcatacagacggaacaaaaacttgttcgttccgtccagtttcgactgctgccgctctgccatctgtaccggaaagatatcatattcttccgcaagcttttcccgaagtttcacagacaggttcgtcatctcgtcgaaacgatctgcaagcttcacatgcagccattcatatatctgttttgcccgaaacggtttttctccgagacgttccagctctttttgtaattcttcatattcatatgcccgaatatctttcttcattctcatactttcctttttcatttttcgtatcctgccatttcacccttttgcgcgtcctgccatttcatcctttttcggcgttccggcattttcagacttcttttttccgcaatcgcgcaataaaaaatccgtcgcttttatgaactcccggaagaagctggatacagccgttctctgtcacgctttccctcaattcaaggcaaagatcttcccttatatcgtctgcgtaaaattcaggaaattctttcaaaaaccaatgtacgttttcgatattttctttcgggttcacagtacacgtactgtacagaagttctcctcccggcttcacataagaagccgcgcaggaaaggatttttcgctgaagctttacgagacttacgattccttccggcgacgctttatatttcagatctgttttcttcccaagcactcccagaccggaacaaggcagatcggcgatcacaatatccgctttacccgctgatttttcatcatacacagacgcatcctgacaaaccgcggttacattgcaaagtcccatacgttctatattttcctcgatcaaagacactttatattctgtcagatcacgggcttccacatgaccggaacatccggcttgaccttccatcaaaatgcgttccgccacatcaagcgcctttccgcccggcgccgcacacagatcgatcacctgcgctcccgcctgcacatgcgccagttctcctacaagcatcgaactgatatcctgcacgacgaacagaccttcccgaaatgtttccagagactctaaataatcatattttgaaatgagaagcgcatcctttaaatacggatgattttccactaaaacatgttcttcctcaagccgctttttcagctgctccatcgtaatccggcttctgcagcgtctgatcgttgtcggcttttctgtctggaaatctttcagcatcgtttcgatcaaagaaagatcatacgtttctttccataatcggatgatccattccggacaggaatatcgtaccgaaagccgtttgatcggatctgacggatactccacctcatcgattcctttgacaacacttctcagcacgccgttgacatagcctctcagaccggaaaaccctttcttcactgccagttttaccgattcactgcaaactgcatgatcgggaatactgtccatatattttatctgatagaccgcgcttcttaaaattgcccgaattaacggcttcatcttttttacttttactttggagaaacaatccagaatataatcgatctctgtcatatgttccagcgttccttccgtaacgcgggtgataaatgctctttcccttttctcaagatattgatattttgtcaaaacttctcttaatacaatatgactgtatctgccgttttccgttacttccataaggattgcggctacgatttctctttcattgatcgcctttgccattattctctcccaaacaccattccttcttccactttatatccgcgcagaaacgagcctgtatccattcgtttcttgccgggcatctgtacttctaaaatacgaagcacgccgtctcccgtctgtatgcaaaacgaatcttttgctacggacactaccgttcccggcatggcgttcttcccggttttctgcgctgtatgttcctcgcttcccagttcggtttgctctgcacattcttcctgtggctttgccaacgctttccatatcttcatcacttttccgtcccggtgtgtatatgcgcttggccatgaattcaatccacgcacgagacgctcgatctgcactgccgatttcgcccagtcgatattgccaagatctttcgtgagcattttcgcataagcagtcgggctttccggctgcttttcaaacactgctgttttattttctattgcatgcaatgtttttacgcagagagcggcgcctgcttctgccagtttgtcatgaagcgactctcctgtctcgtcttctgcgatcgggatctcggtctttaaaatcatatctcctgtatcaagtccttcatccatctgcatcgttgtaacgcccgtcacgctctctccttctatgatcgcccactggatcggtgcagccccacgatatttcggaagaagagatgcatggacattaatacatccgtaaggcgtcatctcaagaatctccttcggaaggatctgaccgaaagcaacaacgaccatcacgtcggcattgtattttctcaattcttccacacactcaggatcgcgcactcttttcggctgatacaccaaaatcccatgcttaaccgccgcttcctttacaggcgtaaactgcatttcttttcctctgccttttggcttatcaggctgtgtgacggcgagacacacatcatgccccgcttccacaagcgcttccagtgttccgaccgaaaaatcgggtgttcccataaatatgattctcattcttcccctccttgcgcatcgtcttgatcttcttcatcataagacacttcatgaagtccgtcttctgccagttcaacatacagttttccgtccaaatgatcaagttcatggcaaaacgcccttgcaagcaagccttcgccttccatttcgaactcgttcatattttcatcaaacgcccgcacttttacacggtccggtcttgtaacgattccgaattttcccggtacgcttagacatccttcttctcctgtctgttcgcctgaagattcgatgatctgcggattgatcaaaacaatcggaccttcccctacatcgatcactacgattcttttcaaaacgccgacctgcggagccgcaagaccgacaccgttgctttcatacattgtctcaagcatatctccgatcagtattttcgtgcgaagcgtcatcttcggcactgctttacactgtttttctaatatatcgtctcctatttctctaattactctgattgccatttttctccttctttctatccgctacatcggattaaaatcaaattgtattctcattttatcaaatcccgaattaatctcaatatatttttccgtccggtctttcagcacgacaagatcatgatagtccgcggtttttacatagatcactttccgataaacatcgttgatcttttcgatccccggacttgccgggccgatcacggacgcttcgatatccttcttcgcttttatcatatattctttcaaataacggcagcctgtttccaataacgcctcatcggcgcttgatataaacactgccagaagattttctgccgggggataccccatcatcgttctgtatcggatctcttcctcatagaacgcctcataatcctgcgccgcagacgttgcgatcgcataatgatcgggactgtatgtctgaatcaccgcttctccttttttatctccgcgccccgctcttccgaccgcctgagtcaaaagctggaacgttctctcgcccgatctgtaatcatctgtatacaacgacatatccgcagccagaatcccgactaatgttacatttgggaaatcatgaccttttacgatcatctgcgtaccgacaagtacgtccgcctcttcatttgcaaatgcagacagtattttctcatgggaatctttctgtcgtgtcgtatccatatccatccgcagcactcttgcctgcggaaataccgtcttcacaatctcttcgatctgctgtgttcccgccctgaattctccgatatggtccgagccgcattcaggacatattttcacacgcgtctgttcgtatccgcagtaatgacatctcatctttccgtcccgatggaccgaaagcgacacatcgcaatgcggacactttataacatgcccgcattcccggcacgaaacaaacccggaataccctctccggttcaaaaaaagcatcgtctgttctttcttttcaagccgctctttcatcagtctttgcagttgttcgctgagtatcgaacgatttccgttcttcaattctttccgcatatccaccgtataaacctctgccggatcctgcattttagaacggttcttcatttccatcagaacatactcgccgttttttgcccgatacatggcttccatcgacggagtcgcgcttcccagaacaacgctcgcgccttctgtctgcgctcttcttagcgccgtttcccgcgcgtgatacctcggcgtctgttcacttttataagtcggctcatgttcttcatcgatcacgatcagtcccagattcggaaaaggagtaaaaagcgccgatctcggtccgatcatcacatccacttccccggctttcgccctcatcatctgatcgtatcgttctcctgcggacagccgggaattcataacagatacccggtctttaaatcttctgtaaaatctcatcacagtctggtaagttaacgcgatctcgggaatcagaacgattgcctgcttccccttatctacaacagactgtatcatttccatataaacttctgtttttccgctgcccgtaactccatggagcaaatatgtttttcggattccgttttcataatccttacagaaacgcataatcgcacgtttctgctcctgcgtataaataatctccttcttttgaatattttccgcatgaaccggattacgatacacctgctctgattctacggcgagaacatgctgttcttccaacgcgcgtatcaccgtggcagtaatattaagcttctttctgacaagttcataatctaaaagcggatcgtcaagaagcgccgccatcagacgcgccctcgctttctgattcttttccagataataatgaagctgtttttcccccgtctcccggtcgatcagcagtctgagccgcttttttacctttatattttctttttctttgataggaagaaccgttttcaaagactgcagcatcgttccgccataattcgacttcatccatgccgccagcgcgatcagcttcgtctcgatttccacgccgcttcgcgatatatcagcgatctctttcacttttgaaatatcataatcacatgtctttgacaatgcggttacatatccttttgtcttacggtttccttttccgaaaggtacgaccaccgccatccccgcttccacttcatgttccagccgctcggggatccggtattgaaagatcttatccagtttttcatgttgaatatctatgattacatccgcaaacaatctctgtccccttgtctttcctaattttccctgatttcctcaagtacctctgcgatcagcgttctttcatccatcgggtatttgactcctttgatctcctgataatcttcatgaccttttccggccaatacgatcacatctcccgactgaccatgttcgatggcatatttgatcgcttcttttctgtcgcagatctccacatatgccccgtcagtctttgcgattccgactttgatatcattgataatctcctgtggttcttcaaaacgcggattatccgaagtaatgatcgtaagatccgccagacgtcccgacacttcgcccatctcatatcttctgtcttttgaacggtttccgccacatccgaacacacatacaagacgtttcggttcatattctttcagtgttgtcagcaggctctccagactcatcgcattatgtgcataatcgatcatcagcgtaaaatcatccgatacttttatcatctcaatacgccctttgacatgcgctgttttaagcgcttctgttattttctcagacggaacaccgaaatgacggcacaccgcgatcgcagtcagcgaattatacacgctgaattttccggggatatcgatctccacatcaaaatcagccttccccgccacatgatacgaaacgcctaaatatcccggcttcgatacgagatttacattctccgctctcagatccgctttcggagaaaaaccgaaagtttccactttacatgtcgcgccgcggaaaatatcttcataataaggatcgtctatattggcaatgccaagtttgcactgttgaaacagcattgctttgcaccgtttataatcttcaaagtctttatgttcattcggaccgatatgatcttttccgagattcgtaaaaataccgatctcaaacggaattcccgccgttctgtgaagcataagtccctgagaggaaacttccataacaacactgtcgcagccttcttcaaccatctgtgcaaagtactgctggatcgtaaacgattccggcgtcgtatttgccgcagggatcttccgatctccgatgatcgcttcgatcgtaccgataagtcctactttatgtccgacaccttctaagatagaccggatcagatatgttgtcgtcgtctttcctttcgttccggtaattccgatcactttcagcttctctgccggatatccgaaatacgccgcagacatcagcgccagcgcatatctcgtattttccgctttgatcaccgtcacccctttcggcgcctcgatatcccgttctgctataatcgccgccgcgcctttttttgccacatccgaaacatattgatgcccgtcaaaaaccgctccgctgatacagacaaaaacagatccgctttctacttttctcgagtcattggcaagcgttgtcacttctgtttcgacactgccttgaacaacctcatattctaaccgttctaataatttgcttaatttcatactcagccctcccgattttattttccttttgaaaatcgaccttttgacacctttatagaataacacaagaagcgttttgttgcaaaacaaacgtttttactatataattaaccggtatgtatgcattttcggtgacatcagtcccgctttgtcgttctcacaccgaaatgtatctaaactgtctgcattcgcagtacgcgatcgtcaatcatataagcgatattgacacagcaaacatgactttaggaaagagagggaaaactattgttcacagattttattacaaacatgatcaactcgctgagcgagctgctctacagccacattttgatcatactgcttctcggagcgggaatcttctttacgatcaaaacaaaattcgtacagatccgtatgtttatcgaatctctccgcgttgtcgcacagccgggcagcgataagaacggactttcttcctttcaggctcttatggtatcaaccgcttccagagtcggaacaggaaacatcgccggaatctcaacagcgatctgtcttggcggatcaggcgcagtgttctggatgtggcttacggctattctcggaagcgcatctgcatttatcgaaagtacgcttgctcaaatttacaaacacaaagcaaaggacggaagttcttacggaggacctgcatattatattcaggccgctttgaagaagcgttggatcggcgtccttttcgcagttgttttgatcctgacttatatgggcggattcaaccttgtagcttcatttaatattgcggattccttccgtgtctattctttcttcaatccggaatggactccgctcattgtcggagcgatccttgcggttgtatttgctttggctgtattcggaggaagtaaaaagatctcacagattacggaagtgcttgttccggttatgggtatcttttaccttgcagtttctttattcatcatcctgaaacattatcagcttgttcctgtaatgttcacaagcattttcaataatgcatttgacgtacaggccatcttcggagggtttgccggatcctgcgttatgcacggtatcaaaagaggactgttctccaacgaagccggtgtcggttctgctccgaatgcagcggcaagcgcggcagtttcccatccggtaaaacaaggacttgtgcagatgctttctgtattcatcgacactatcctgatctgctccgcaacagcgttcatgcttctttgttccggcgtagagccgacttctaaattggcaggaatgccgtgggttcaggcagcggcttccagctcgcttggcggtttcggtacgatctttattacgatcgcactttgcctgtttgcctttacaacgctgatcggaaacttctactatgcggaaatggggctgaaattcctctgcggcagaaaaccgccgaaagcagtgatcaatacatttcgtattatcgccgccgccatcgtacttgcaggcgcgacaatggaattcagcatcgtatggaacacagcggacgtactgatgggattgatggctttaatcaaccttcctgtcatcctcatcttatgcaaaccggcaattcaggctatgaacgactatacaaagcagaaaaaagccggaaaagatccagtctttaaagctgccgatatccagttaaaagacaaaacagatttttggaattaaagagaaaccgggacagtcgatctgactttcccggtttttgaatattgaacactttttatttatatcgttgctttcttattttataactctgttattttcttgcatacatatcttaagatctttcttaagtcttcgatcgttactttttcgtctcctgtcacatctccggctttcatctgtgtttccgtcaaattggtctttttacagatatatctcaacgcagtgcggacgtctccgacatcgactttactgttggcatccacatcgcctctgatatagtcctgcggctgagtcatctcatcgatttttgcaagaagtgtttcacactttgtttttacttctgcaagaattgtcttctcttcttccgctgcattttcaactgctgttaccgcgtctttcaatgtgttttgcactaacgctctgtctgtaacctttactgtgtccacagacagatgcgagatccttttctgaaggtcggaacaaggattgatcgttattttgcagcttgtactgtttcctctgcgatcctctgctatgatcgtgtactctttcttccgattattttgattatctgcggaaagagaaatttccgttcctgcttcttgtttcccgtttacagtcacagatgcaagatcgttgtcagcgtctcttaccgttatcttttgtgtagcgtaataatttccaccgttttccactccctcaataaccggagctgtccccttcggctcttcatactctgctgaagcgatcttcaaaacagagttatctcctgttccatacaaatctttcgtccgtccgtcataggcaaaagtaatagcatcatcataataaacagtattaaatacataaccgttttcaacgcttccgttgttcttatcccatgccatgaacagtccgccgcgctctcccgctgtcccgtcatcgctgttcgtcacatccacaagataatttccgtctccgatcgtcacgatattccacatatgcggtccttctcccgtaccgcctctcatcatgccggttacgctgcagcaattatatcccggatcaagaaaatcgctcatatcgcataaatactgaaatgcttttgcatatccctcgcatacaacattcgtactttcatctccgtcaaatacatagatcatctgccacggatctccgtaagcgacacccggtttcacagcatcataattatacgatgtcagatcacagatttcttctttataagattccatcttctcataatctttttcggctttatgcttctctatgatttttcgcgcattctccgccgccgaactggctgcccctgtcttcttgctgtcaaccgtacacttcgtcttgtattgctgttcgatttccggtcccgcataagcatccgcagccgggaaatttatatcaatctccacaacttcccgtcccgaaattctgccgttaaaccatgtggacgccgttttattataccagtacaaatcatacggacagtccgcaagaagcgccgcaatcactttacttaaactaaatcctttaaatgcgccgccttcatatgtaatcccctgccccgcaacggaaagcgtaaatttcgtagatacatactgtcctgacggttcgcttccgtccgccgcttttccgtccgcgatattagcggctatttttttcagttcattatatacatatttgtccgctccggttaaaacattctgcccgatattgccgtaaactgcaggcgtacgatagctttcgctctcttcaccgtaaaatgtctgttctacatactgagcaaacaactcctcgtttccgggaacttgatccgctctcggaatgatgctctctccttgaatctgagcaactttactatctactgtaagttcctctgcctgaactgtttccgtcattcctgccgccatcggcgatgccacaagcattgccgatgcaagaacaagactgaccccgcctcgtacttcctttttcattttccgcctccataaacttcttccatctttttccgtctgcctgtaaaacactttacatgattatgcaattttatcacaaattcagttcacttaaaagatgatcgacacatcattttattttttgtacattatttaaacatttcttttgttttcataattttttcaagaaacttttctccggcttatgtgcaatataacgaatcatccccatatcatctctatcacccgctcaagatcttccgcttgtttccataggaattgttttacttcttccggaggctgcacaagatcgggaacaacgatcacgcgcatacctgccgcatgtgccgatattgctcctgaaggcgcgtcttccaaagcgaccgcatcttccggctcaatcccgatacttttacacgctttcagataaatctccggcgaaggctttccttccttcactgtatccccgaacactttgccgtcaaaataatcgtacaatcccgctcttttcaaagactgctctgcgtgtatctgccgcgaagacgttgcaagtccgatcatacatccatgactttttgcggcattcagcaattccggagcgccttttttcaccgctattccttctttatccgcaatcttataataatattcccgtgtcatttgcgcaaatcgatccatcggaaaatccaaatcaacgttcgtcttgaaatattctgtccgcctcttcaagttaaatccgactgtattatagatgtgatctccgaagttttcatatccaagttcttttcccgcataatcccaagaccgttttacaactttttccgagtcaagaagaagtccgtccatgtcaaaaaccagccccttcacagagaccggttttttcttaatcaagagtcgcactcctgcactgttcacatttttctgcgggctgctccgcctctttttgctcttcctggctgcgaaacgtcaccgttcccgccgcagcatccattccgtcaacgattgccagagactcaagctgaaaaccgaggttgcggatgatccttcctcccgactgaaagcctttttcaatcgcgatcccgattccttctactgtcgcgcctgcggactgaacgatctggatcaatccctgaagagcgcatccgttcgcaagaaaatcgtcgataataagaacatgatcttccggcgtcaggaatttttgagatacgatcacatgatttctgcatttgtgtgtaaatgactccacttccgctacatacatttctccgtcaagattgatactctgcgatttctttgcaaacacaaccggcacatcaaaatgctgtgccgccacgcaggcaataccgatccccgacgcttcgatcgttaaaattttattaatcggctttttcgcaaaacgtctcttaaattcagcccccatctgatccaacagcttaatgtccatctgatgattcaggaagctgtctactttcaatacgtttccttctttcacaaccccgtcttttacaatgcgttcttctaaaaaattcatcttctgctcctctcgttttcctgcctgtgcagattatttttccatcttattcttccatatcggttctttcttcgtcgccgccttccgccttttcatcaaatacacggaacactcttcttaatatacaggaattaataaaagcaagaatacctgttcccgccaagatccagaccgggatcgtaagcataaggattcccgtattccaccacgacaaaacaaccgctccgactgtcagcgctgtcatcaaaattgtataaggtaattttgccaccgttaaaaggagcgcatttttcagcgtagcccctatcgtattttcatatcttgcagtcagcgcaaatgaataaatcgttactgaaatcaaaaaaaatgcaagcagtaaaaaaacacttttaaacaccattcccagtgtccccggcatcatttccgatattctgtaatcaacaaaacaaacgcctccgcacaaaagcaatataagccatatgattgtactttgcttaaaattcaacttaaatgcatgaagaaaccctttaaatatataaccttcttcattttttacaagtttcagcattactgtatacaacgctgttgtcgatgctccgatcgtaatgatcggcagtgagcaaacaagccacaaaacattcagacacacgatatcgcaaatctttgaaagcacacgcataataccgctgtcagtaacatcaccccgcatgatccgcctcccgttttttctattgtaaactacagtatagcacagaaaagcctgtatagcacaggcttttcacatcttctttcggataatcaccggaagcgataaaagatgcgttccggaatcgcaagcagccgtcaagttcccaggcaagtccgggattcggctcttcgccgttacaaaaaaacagtccaaccacaacggctgaaaccggctgaactgttacgataaaaaaatagagcgggtgatgggaatcgaacccacgtatccagcttggaaggctggtgttctaccattgaactacacccgcgtcatctctgacacaagtagtatactaccacatgataaagatgattgcaagaacttttttactttttttattttatttttttatttgcttttttattgaatctttgttataagattaaatagattttcacaaatcgaaatcatataaaggaaaatattccgaataaccaaaaaggagttgtgttacttgaatttatcacaaatcgcacgtttacaagctttaaaaaaacatctggaaacttttcgtaaaaatcacccgaaatttccttcttttttgaacgcggtgtctcataacgctttggaagaaggcacagtgatcgaaatcagcgtcacatcgccttccgataaaaattatgttacaaacataaaattgaggcaagatgatctggactttcttcgcgaactgcagtctctgaattccaaatcataatttcccggcgaagggccgcacatcagcaaaaaccggaagcgccaaaaggcacattccggttttttgttttatctgttttatttatttcgctattttcagattttcataccgtttctcgataaactgatccgggaaatactcatctaacttttcagcgataatcccgtttccttcttttccttcctgacgttctccgtaacgcgccaaagcggcaaatgacagcgccatatccgccgtcagaacaacaagcagcaaggagcagatgatacgtcccgcctttttcggcaatcgttcgatctgtcttgacaaaaacgggtaaaccgctttcatccagataacggcggcaaatccccagaagaaacaatacaacaggttaattcttcctcccagattaaacgggatcttactataatcccagaacactgttccaaaggcaatctccgtaaaaacactgcatatgtattcatatgcgcccccgagtattgttccgaaaaggaatataaaccaattactcttatcacggtatctatataaaatccatgtcagaagcgcacatgcaattccccacacgatactgaactgaccaaacacaagactgctgcggctcataagacgcccggttgtaataaggcagaatatcgtctctactatatccccgataaatgctccgatgataaacagactcgccagtttaaaaaatccgcatccttccgcaaatttttcttcctgttcagcatctttttcagtctcaatattcggaaatgcctttaccagtcttttctggatccgttttgtcagagcgttttcaagaaatttagacgttttctgcagctcttccgtaatctgctcgatccgacctttctttcttttcaattcaagaaccgcaattcccgaaccgagaccatccgcaataagcaggcctaaaagcacccataagatcacttctccgatcaaacggggtatcatattgacaagaccgcaaaaaaacggattcaggaagtagatcatcagtacactgcacacgccccataaagcagatacccgcagacaaatgtaaccgtccagatgaaatttctgatctgaataatcccaccactttttatgcagtatcttttccatcagccttcccgtaatatattctacgaacgaagtaacgatcattccgccgataaaaagaaagatcagattttcttttaattccggcaaaaacaccgccaccgccaccgctcccgttccgtagatcgggcagagcggtcccgcgataaatcccctgttgacaaacttgtgcctgttaaccgccgcaacgatgacctcgccgcaccatccgataaatgaataaataaaaaagatccatgccagttcatatattgtgtttaccatattttctcttttgaattcctttcccgcacatcttttttgcaaagacgcagtttcagatgcaccttcgataaaaataatccccccggacacggttttatacgagacactcactcctgcccgggaggcgccgctttatgtgatgcgttcttttctatccgagcacatctttatacagggcatgtttttccaatgcctccgtgattttgaccatatcggacagatctccgatcatgataacgcctgcaaggcggttgtttaaaaagtaatatttactgtatcttccttttcccatatctttaaattctgccgtcttataaagcagattcggatttttcccgttatctccggctgcgaaaagagccgtgttcatcccatggaatgtcaatgtcggagctgtcgccgcatactcaatctgatcccctgccgcatttgcgcccgcgatacgtccctgttcggaagcctccggccaaacagcatagtttgccccgttaaattccgcacagtcaccgcatgcatatacgttcggaacactcgtttccatccgttcgttcactttaacggcacggtccgcatcaagtccgatctccttagccaatgctgtatttgcacgcactcccgccgatacaacgacaacttccgcaggaatcacctgaccgtcagacaagcggactcccgatacatgtccgtctccttccactgcttccacggaaacgcccgtactgatcttcacaccgctcttttcggcgaacatcctcaaaatgtccgaagcgttctcgtcaagctgacgtcccataagaatcggagcagcttctaacacttgtacatcaatccccgcttttttcagttcccaggcagcttccagaccaagcacaccgcctccgatcacaaccgctttcgccgcatgttccatcattttttccagtttttccacatctgcaaggcggcggatcgcaactacttccggcaaagaacttccttcgatcggaggtataaagcactcgcttccaagtgcatagatcagtctcgtgaaatgcactttctctccgctttcaagaatcacttctttttcatttacatcgacagacgccactttctttcctaacatttggaacactttgttttcttcataccatgacggatctacgatcgcgatctgatccgcgctcaatcctgccacgatcgactttgtcagcatcggacggttgtatgccggatactcttcatcagaaatgatcgtaacagctcccgttttatcacgttcccttatcgccttggcagcgttaaatcctgccgttccgtttccgaggataacataatattcttctgtattattcaaaacggcgctttcttctgcttcaacttctataaaattctcttttccgactccgcacaccggacatatctcgagcgaagaatcgaaaatttctccgcagacaagacatttcacaagcgttctggcgccttttttcttcggctttacaggttctttgttctgcacgatgcacccgaactgatatccgtactcataagcgctcacaagatccgcttccgatggtttaaaccgaacgcggaatccttccgatactttcattttcagttgtttcagacgctgcgtaatattcggcactccttctccgctccaaccgtagcttccgaatgcgccggcatattttcctccgtgagtagccggaaacattgcaagtgtaagatcccatatcggcttgagcgcttctccgacaatcgtaggagttccaagcaatattccgtccgcaaacaaaagttcttcgttcactttctctgcgtctgcctcaaccatgtcataagacctgacgtcgatatcgccgctgtctttgactccttccgcgattttttccgcaagcatcttcgtgtagccatatgcgctcacatacgggataataactgtttttttctcattcggattgaccactgtcgaccattctctgtattgcttcataacctgtctgatccgatctcctacgagaaccggtccatgccccgtacagatcatggaaatatccattgtttcaacacggtcgagagctttaagcataaaaggtttgaacggtccgataatgcagtcataataatatttcaaagcactttgataatccgcctcatttttaatctcacttgatacgacttccgggagacagtaatgtgcaccgaaagaatcacatgttacaagaatctgttcttcctcaataaaagtgtacatcgtatccggccaatgaagattcggaacaaacaaaaactcaagcgtcttatttccgatcgtcatcttctctttatcccttgccggaatgccgacaaaatcccggtttacgatctctttcaggaaaccgagcgcacatcccgtagcgatcaccttcatctgcggactataatcgagaaggcgttctacgcttccggcatgatccggctctgtatgacttacaacaagataatcgattttccgaatgtcgatcacttcttgaagatgttccaaatattcgtcaaaaaacttcgcttttgcagtctcgaaaagaactgttttgtcccccgccttcatcacataagaattataagttgtaccgaattccgtatacatgataatatcaaatactctgagttgatcgtcaataatacctgtccaataaaaatcatctcttaatttcaaacttttcattttctgcctcctctttttcttttttatgaaactccgtttttcttgcaaatatccgccagacagcacttctcgcagtacggctttgtccttgccgtacacacatcccgcccgtggaagacaagcctgtgacagaaatcgcttccctcctgaggaggaatgatcttccacaatgccatctcgacctttttcggttcttttatcccatctacgagtccgatccggtttacaagccggatacaatgcgtatctgtcacaatcgcaggtttcccgaacacatcacccatgataaggtttgcgctttttcttccgactcccggaagtttcatcagcgcgtcaaaatcatccggcactttcccttcatactcatcccggatcatcttcatacagccgctgatatcgcgcgccttgcttctgccaagaccgcacggacgcacaattttctcaatctcatctacatccgcttccgccaaagcttccactgtcggatatttttcatataacccttccaccactacattgacacgggcatctgtacactgtgccgcaagccgcacactgacaagcagtttccatgcctgatcataatcaagcgtacagccggcggacggatattcttttttcagccgctcgatcacctgtaacgcacgctgcttttttgtcatctttggtatccctccgctatcacttctcatccatatgttttctcagttcggcaagagcttctgaaaatctttttgacacagccgtcggattgcctttcaaatgtcttgctgcacggatatagcttctgtctgttctgtcgtgcatcttcgtcatctcccgggaaatatttttcttgatcttcgcatattcttcccgtttatcttcgccgatcaattcgtcaacctttgatgtaaattcttccttcatcaacagttccgccctctccgacaatcttgcaagaagacgctgtctctcttcgcgccttgcatgaacacgcgccagatattcttctttgcgtgaattgatttgttcgcggcgtttcttcttttgaactttgatctcttctttgtatccctctaccatttcttctgcgcgctgacggtaactgtccatatgctcttctgccagttttttgtaatcttccgccatttcttccgcacgtccgcggtaatcctctacatgttcttctacacgcctgcgataatcttctacaaactcacctgcgcgctgtcgataatcttccacaaactcacctgcgcgctgtcgataatcttccacaaattcttcagaagcgacttttaatttctcctgtatcttcctgatctgttttttgctttcttcaagctgtgcaagaatccgcttcagatccatcgcatcattaaacgactgcgtcacatcgaccgccgccgcaacagtcagcacaaatgcgataccctccgcaataatcgtcggaatcttcagcaccgctccctcgatcggtacatgaacaaacttaacaagtaaaacggaaaacaatccccaccccaaagacgaggtaagacaaatatatccgttcagattaaatttctgattgctgtaatcccagtatttcacattgaaaagtctctccataaccgcccctgtaacgtattccaacagcgttgctccaaccatgccgaataaaaagatcaacggaatactgtctctgactctgatcgtactgatcaagaccgcaagcgctccgaatccatagatcggcagcatcggcccgtacataaatccgcggtttacccagcggcgtttccgcacagaaacaaagcagcattcccatacccagccgataaaactgtaaatgaaaaagaacaatacccattgtgtcagatgatatgactgcatgtttatttctcctcaatcgctgtaatcaggtcaactcttctttgatgacgtcctccttcaaactcagcgtcaagccatgtctctacgatcattttcgcaagctccgctcctaccacacgagctccgaacgccaggatattacagttattgtgcactcttgccatctttgccgtaaacggctcgctgcaaaccgcggcgcggattccttttactttatttgccgcaagagaaattccaagacctgttccgcagatcaggattccctgttcaacctcgcctgctgccactgctcttgccacgatttccccgtagaccggataatcacagctctcgcttgaatttgttccgtaatctactacttcatgtcctttttctttcaggaaactaatgatttccgcctttaattctaatgctgaatggtcatttccgattccgatcttcatattcttctccttttcttttccactttattttatttacatgcttctttacaataaaattgatttctctatcatcataacaaatccggcgctgtgattcaataaacctaatttacaaaacgctctttagaaagccggttctgtcaaacaatttttataaaaatatttcctcaagttgttccggtttcccggcgcgataagtcgcatccgcttctgtttccggttcgccccataccgcatgaacacaatccactcccgcattgagggcgcatgccatatctgaagcgctgtctccgatatagacggtttcttctttccgcgctcctgacagttccatatatttcagcagcggctgtgccgacggtttatgctctttcgtgtcatcggcacatatgcatatcgaaaaatattttcgtatcggaagctgatcaagaacaagctccagttcctcgcgtgttcttgatgttacgacaccaagcgtacttccttttttctccagtttttccagaagttcttctattccgtcaaaaatgcggatcatatcgatgttcttctcttcatttgccacccacatttcgactgcgcccgggattttttcttcttccaccccgagaagatgcatatttttcacagatgtattagccagcacaaacttcagatcttctatctcgtaccgctctccttttaccgtcatgagcatctcctgcaatgaatataatatgcagtctctcgtatcgatcagtgttccgtccacgtcaaagacaatatgtctgtattttgccattcctatacctcccgctgtcttctcaaatcttttttcttctttcttttttcgtttttcaggaaattcctctcatcgtaagctgtatcctcttctttttcatatccacgctcatcacctttacatccacaacgtctccgacgctcactgcctcaaggggatgtttgatataacggtctgtaatctgggaaatatgtacgagaccgtcctgatgaactccgatatccacaaacacgccgaaatcaatgacgtttcgcaccgttcctttcaatatcattccttcttttaaatctttcatttccagtacgtccgttctaagaatcggttttggcatctcgtcacgcgggtcgcgcgcaggcttttccaactcttttacgatatcgcgcagggtgatctcgccgattcctaattcttctgccgtcgctttatagtcttttatcgtaagagataatcccgccagattatgagccgccacatcttccggtgaatacccctgcttttgcaaaaggccttttgccgcttcatatgattcagggtggacgcccgtaccgtcaagcggattctctccgtcgcggattctcataaatcccgcacattgttcaaacgctttcggcccaagtttcggcactttcagaagttctcttctgctcgtaaactttccgtgctcctctctgtaggctacaatatttttagaaatcgccgaactgattcccgaaatgtacgataaaagcggcgcagacgccgtattcaaatcaacgccgactttattaacgcagtcctctacgactcccccaagcttttctcccagtttcttctgattcatatcatgctgatattgtccgacgcctatcgacttcggatcgatcttcacaagttcggccaatggatcttgaagtcttctcgcgatggacgccgcgcttctttgacctacatcaaacttcggaaattcctcacttgcaagcttacttgccgagtagacagaagctcccgcttcattgacgatcacataccgaacctgctcaggtatctctttcaaaagttccacgataaactgttctgattcacgggaagcagttccgtttccaagcgaaataagtgaaatatgatatttcggaatgatcttctttagcaagtccttacttgccttgatcttctgcggagtcgtcggagccgtcggataaatgaccgtagttccgatcacctttcccgtcggatcgacaactgccagtttacatcccgtacgaaacgccggatcccatccaagcactactttccccgcgatcggcggctgcatgagaagctgatgcagatttttcccgaatacgtcgatcgctccgtcttccgctttctccgtcagttcatttcttatctccctttcgatcgcaggctcgatcagacgtttataactgtcctcgacaacttcttttaagaccgaagtcgtatacggattatcatttacgatcgtctttttctctaaatatctcagaatatcttcctccggagcctctactttgaccgtcagtattttttctttctcaccacggttcagcgcaagaatccgatgtccggcaagcttttcaaccgattcttcaaattcgtaatacatctcgtaaacagattctgtctccggatcttttgctgtagaaacgacttttccttttttcatcgtcgtttttctgatccatgtacgataatccgcattatcggaaatgatttccgcaataatgtcttttgctccggcgattgcttcttcctctgtctttacttctttttcttccgaaatatattgctttgcggtttcttccaaaggttcttttgcctgctgcagcatcatatacgctgccaaaggctctaatcctttttctttcgcgatcgtcgccctcgtccgccgcttcggacgatatggccgatacagatcttccactgtcacgagcgtctcagctaaaaggatcttctctttgagttcttctgtcatctttccctgctcttcaatgctcgagatcacctgctctttcttctcttccagatttctcagatagagaagtctttcatgaagcttcctaagctgctcgtcgttgagtgacccggtcgcttcttttctatatctcgatataaacgggatcgtattcccttcatcgatcaaagttaccgccgcgtcaatctgccagcggttcacatcaagttcttctgtcagtttttgattgatatccatttataaaaatcctctctctaaattaattcacaaacagcattatacatagtttaccacacacgtacattccattccaccttttcccgcgaactttacacgactgctttacattattgaccggtcttgtctgtctttgttataatatatgactgaactgacgcaatacaaaaacagacatgcgaaacccggcatataaaaattgccgcctcgttttgcgcgccgaaacgaaatggagaagttatggaacgtacgatcacatataaaataaccgacagcggacaaaacatccgtattgacagttttctccgaaagcacggatattccatgcaaaatctgacacttcttaaaaaaatgcccgaaagcattttaaaaaacggagaatggtcttatatgcaaacaacacttcaggcaggagatattctgactgtccgcattcaggaagaaacttcctctccgaatattcccgctgtcaatctgccgatcgatattgtctatgaagatgaagatatcatagtgataaacaaagctgccggaatgccgatccacccttctcttaacaactatcgaaactctcttgcaaacgcgctgatgtggtattatgaacaacaaaacaaaccttttattttccgctgtacaaaccgtcttgaccgggacacttccggtctgactgtcgttgcgaagcatatggtcagctctaatatcttatcttccatgaccgcccggcatcagatcgaacgggaatatctcgccattgtacgcggacacgtcactccttttgaaggaacgataaatgctccgatcggacgaaccggaagttctctcatcgaacggaagatcgattttgaaaacggcgaacatgcaattacccattaccacacagtttttgaaaaaaacgggctttcactcgtttctcttattttagaaacaggccgcacacatcagatccgagtccatatgaaacacctcggatttcctttgatcggagattatctgtacaatccggatatggaactgatcgaccggcaggcgcttcactctcactgtcttcgctttctccatccgataaccggaagacaaatgacatttaccgccgatctgcccgaagacatggcaagattgtttgcctgagaaccccttgaaaatcattctttaaaattatttattttttattccaaaaagggttgacatatttcaaaacctataatataataaatttcgctgtgaacgaaacagcaaatgtgcgattagctcagctggatagagcgtctggctacggaccagaaggtcgggagttcgaatcttctatcgcacgtacgaaaagagatgttgcttatgcagcatcttttttattgtaaaataattcttgatcaggctcggattttccccgtcgccgacaaaaaaactcagaagaactttctcctgagttttttgatatcatttcttattctgcaaactgttctgactgcgctttaatcagttctgtatcgtcaaagtaattgatcttcattgcagcttttacttctgcaagtgtctgtgctgcaaccgcttccgctttctcgcttccctttttaagcatctcataaaccgccggaatatctttactgaattcttttctgcggttcctgatcggctctaactcggcctgaagcacattattcagaaaacgtttcactttcatatctccgagtccgccgcgctgataatgtgctttcagctcgtccagatccgaatattccggcaaaaactctgcaaaatattccggtctgcaaaatgcatcaagataagtaaatactgtgtttccttccagttttcccggatcttccacccggatatgagtcggatcggtaaacatactgaacactttcttcttaatctcctccggctcttccgacagatagatacagttcccgagtgatttgctcattttcgcttttccgtcaattcccggaagccgcagacaagcctgattttcagggagaaggatcttcggatctataagtgtatccccatatacggaattaaacttatgaacgatctcttttgtctgttcgatcatcggcatctgatcttcgccgaccggaacagtcgtcgccttaaacgccgtaatatccgccgcctgactgatcggatatgtgaaaaatcctaccggaatactcgtctcgaaattacgcattttaatctctgtttttacagtagggtttctctgaagtcttgacaccgtcacaagattcatataataaaacgacagttcacataactgcggaatctgcgactggataaaaagcgtcgatttttccggatcaagtccgcacgcaagataatccaaagcgacttcaataatattgctgcgcaccttttccggattatccgcattatccgtcagcgcctgagcatctgcgatcataataaaaatatcgtcgaactctcccgtattctgaagctccacacgtcttcttaacgatcctacatagtgtcccacatgaagtcttcctgtcggacggtcacctgtaagcataacttttctcataatgttcattccctctcatttcccattttcgctcctgtcgaaaatgttcctgttaaaattaatctatctttatcctgtttatctttaccgctgctcttttatttattatgagcggcaatccgcttctgctttgaaaatttttgttttgagagctgaggtatcatcttcttttccggctcatagacgactttataaagtacatacgccataatcaccgctccgaatacgtccagaacagaatgttgtttcaaaaacatcgttgcaagaatgatcagcgccgccaatatgtacgccgcattgcagacagctttgtgttttttcagtttttcactctcatggacagcgatacacacgctcagcgtattaaatacatgcagactcgggaatacattcgtacatgtatccgcacgatacagcatccgcaccatatccacaaatacattatctctctcaaatacgaccggacgaagatcctgcccattcggaaatatcgtcgatatgatcaagaatattgtcataccggtaaacataaacttcgccattttataaaatcccggtacgtccgtaaagaaaaaatacacaaatgcagccgcgataaacgcaaaccacatcaaatacggaataataaaatattcaacaaacggaatccacatatcaaactgcgtctggatcacatgatagtttgtcgttacatgcttttccaaaagcaaaaaccacggcatgtagataaaaatatacaaaaatacccacgcatgtttatactttttcagccagcttccgaatttaccactttcttttttgcccattacacgactgccccttttcatatgcaatcttttaatctttgcgattgcaacgattatagcacgatttaaaatgtacaacaaccttcttcataaaacatttaggaaacatttattaaattttccggctgttatcctgcaatgatatgcaatttttcttccagtatctccaccgatgccttatatcgggaaaacgccgcctctccgtctgtatggatcggaaggcttcgctgcgcctcaaccgataccgaaggactccgaatgatcgtaatttcttttgctcccgtatgtttcccaaaaaacgctctcggcaacagccacaccgccttcaaaggagacatatggtgcgctatcacgatatcgatgcagccatccgtcacggacgcctccggggcaaatcgaaaaccgccgccttcatatggaagattcataaaagccacaaaaagagttttttcaaacatctgttttctcccgtcaggcagcgttaccgtcaactttgtcggccggtcttttttcagacggtcaagggcaactactgcgtaacttagtttacccagccctattttattcagccgctttttccattgtgacacgcacacttcatgacagactcctgcgtcgaaccccatccctgcgcttacaataaatctccggctttttccttctcttgaaatctgtcctacatcggcagaaatcactttcttcggagataatacagattgaagtgctttcatcggatctttcggaagttttaatccccgcgcgaaatcattgctcgaccctatagggatatacccaaatgttatcagatccggacgttttatcccgtttacgacttcattaactgtgccgtctccgcctaaaacaacaatcgtatgccgtttatcatctgccgtgataaacgccgccgtcttagcggcatgacctcttctttttgtcagatatacacggtaatttatatgtcgtgccttcaattctgattctattttctgccatgctttcattcccattcctgaacgcgctttcgggtttataataaaatcatattctttttccatttttattatctcttatctattgttccttttataagctccgtccgctttttatgttctgttttgtttgtctttcgtcagcgaaccgcttcgcgaagcgccccgtcgagataacatctaagcgaccggctcatatttccttcaaaatcagcctttccatgcttaatgcaccactcaaacacattcccgattacgatcatcctgatatctgtcgtaaattcttcgatcggctcattcaatactgcgacgcctgcctgcactgccttttcgacataagctcttactgtcacgatcggatacggacgttctgtacggatatctgcattcaacgcctggtttttcgtatcatagtaaccggacataaactcaactccaagttcacggcagtattttacataattcaaatacacttggataataccgtcttttactgcttgtacgctgtccggaagttccaaaagattcggttcgatctgaggctgatcttctatatagtaagaaagaagatcatcttttgtcttaaaatggtggtaaaagcttccattggagacacccgcctcctcacatatatttttgatagacagttcctcgtatccgcccttctgcaaaatgcgtttcgctgccttgaatattttttctttcgtctcccgggatttttgctgctgtcttgagatctgttctttttctttcatccaagcacactcctgtctgttctgacttcattcaatacatacagcaacagtttaccacagtatctcatacatttcaagaaaaccgagtgtgctctacaaacttatcaaatgcagacggcatcgcatactcttcctctaattgttttatctttacaaatatattttccgatccatccgctccgttttccacacacatttgaccgacgtttggcgccgacgttttttccagttcatcgaccagcagttcatatcctgtcatatgccattctacatggctgaaaatatgttttgccgttccaatccgttttacacgtaccggagtcagccctgccgtctgcgcatacccgatcacttcctctgtcctgaggtgcccttccacattcggaaattcatacattccggcaaggagtcctttttgaggccgtttcctgattgccactttttcattatcccgaaaaataaacaccgtcctcttttctattcttcttgctttcgcctttttcttcaccgggaaatccatttcccgtccttccttatgtgctttgcacagcgcttcaagcggacaggcggcgcatttcggctctccgttcggaacacagacgatcgctcccaactcaatcaacccctgattaaaatcacccggcgcatctttcgggatgatttcttcgatcaattcttctacttttgatcttacagccgccgttttgatatcaccctcatctgccgtaagcctcgatactacgcgcagaacatttccgtctactgcgggtttcggaatgtgataaacaaatgatccgatcgctcccgcagtataatttccgattcccttcagcgaacgtatttcttcatatgatgaaggaaaccttcctccgtattgttccataatctgacacgccgcagcttttaaattgcgggcccggttataataccccaatccttcccacagtttcaataacctgtcttcctcgacagatgcaagtgcgctcacatcgggaagttcacttaaaaagcgctcataataaggctttaccgcctccaccctcgtctgctgaagcataatctccgaaatccacactctgtatgcgttaatcctctttctccacggaagatcacgcttattctcacgaaaccactctacaagaggccggacagattcttttaagatcggattgcctagaacgacgtctaccgcatcgctcagctcgatcgcatcgcttgtcacatcacagtcataggcaagcacttttacaccttcctttgccgtcttttgaagcgcttcggcaaattgaggatgtgtctctgtattcggcgtgaaataacgcacgcctttcatctggatcacaaaaaacacatatgcctcatatccattcttctttgcatcggaaagctcttccagatgttttacggctcgttcgcttggcgcatccgggaagcggcacactccgttttcttctaatgtcacacctttgatctcaataaaaatctttcggattcccccgttttgatcttccgcttccacatacaggtcaaaacgagaatttttgtatacggtttcaggccagatcaaagtcacatttccaaaaagatttccctgttcaatccattcttttacaaccttattcggaatctgagagtccatattgatcattcgactgcccttttttacggcaatcaagtcccaccttgtctttctggacggattatcgctttcctgaatataaatatctgctcccggccgaagaagctcggcgcatcttcctgtatttttcacatgaaccgtttcctttttcccgtttaattctgcataggcaataaaccggttcggacgttctataaacttcgccttataaattcgatcgtatctcattttccacctcgctttaaataaaagcaaaaagtctgcttcggacttttcattctttcaaaaacaaaaagcagagtttctcatccaccctgcttttcatatgttcttctgtgcacagacatgtacacgtttttcaacttacagattctttttacaaaatcttcgacaaaaattctttcagtctcggattcttcggattgccgaaaaattcttccggttcagcttcctcaacaatctgcccgtcatccatgaagatcactctggacgcaacctctttcgcaaatcccatctcatgagtgactacaaccatcgtcattccttcctgagccagcttcttcatcaactcaagaacttctccgaccatctccggatcaagcgccgatgtcggctcgtcaaacaggatcacatccggattcattgcaagagaacgaatgatcgcaactctttgcttctgacctcccgacaatgtagacgggtaaacgtccgctttgtcttcaagtccgattcttccgagcagttcaagagcctgctttttcgtctcgcttttgatctgttcttttgtcgttgtaattgggataagttcttcttttttgcttcggaatatatttttaaaccggatcattctgtttttattttttgcttttttcagatccttgcactgcaaatatgccggagccatcattacgttttgaagaactgttttattattgaacaaattaaaatgttgaaataccatacccatatggcggcgatgcacgttgatatcgactttcatatccgcgatatcgactcctttaaaaacaatgcttccggatgtcggatcttccatacaatttaagcagcgcagaaacgtactttttccggaacctgacggtccgagcaccgcgacaatgtcgcctttattgatcgtgatattgatgccttttaagatttcaagatcaccaaagctttttctaagattaattacgtctatcactcttcttcaggctcctttccaataattttacaagcagtgtcacaacaaggatcaatgcaatataaataagcgccatcacgagatacggaaccatgaattcataactgtttgttccgatatagttaaacgccacatacagatccgccgcgcctacgaaacttacaaccgatgtttctttgataagcgcgataaattcgtttccgagagtcggaagaatattcttgacagcctgcggaatgacaatcttcatcatactcgccccgaaacttaatccgactgcacgtcccgcttccatctgtcctgcgtctaccgattggattccgcttcgcataatttccgaaatatatgcgccgctgttcaatccgaacacaagcatcgcgacctgaactcccgttatgttccatccgatgatcggaagaagtacataataaaatacaagaagctgcacaaccatcggcgttcctctgaacatcgccacataaacgctgcatataccgttcaaaactcttgggagcactttatatttcggcagcacccttgccgtcgcgataacagtcccgatcaaaataccgatgaccagaccgacaatcgcaataaggactgtgttctgcaaaccttgcaccacttttacatagccgttttgatcgataaatatttctataaacttatctacttttgcactaaaattacccattactttcctctttgctttcttctctcaaacgtccaaagaaaggaaaacgccgatattttccgttttcggaacatacctgtatttccctttctgatttaatactgttttctattctttttgcaaaactctcagtccgaaatcatccgctcaatcgtccgtttcatttcatactgttttgaaatcctcttctgtattgcgccgattgctcattctgcttccgagaacttattgcattgcattaatcgcttctgtgatcgctgtagccggagctgcatcgatgatcacatatttgatgtttccgttcagcatatcctgaaccgcaagtgatccgctcttatacggctggcatgtagccggaagtccttcaaatccgaaagcttcgtctccttcgatgtagctttgcgctgtcgttccctgctgtacgccgatcttatcttcttttttcagttcgccaagttttgccgcaactgcatctgcatctttcagatcgtcgaatgtatcgtcatcgctcggaacgatcaaacgctgtgacgcctgataatatgtatctgagaatgtcacatattgttttctttcatcattgactgtaagtcctgcgatagcgatatcacatttgtgctgtcctacagaaagacataccgcatcaaaatccatattctggattacaagttcttttccaagcttttccgcaagaagagctgccagttccatgtcgattccgacatatttatcgccttttgtatactcaaacggctcaaacgctgcatttgtggcaactacaagctgatctttcgactcgtcaagttttgcggattctactgctgccggctctccgccgccgaaatacttgtcacagatctcatccagcgttccgtcttcttttacttcttttataaatgcgtttacctgttcaacaagttccggctgatctttatcaataccgaacgcatactcttcatttgtaagatcaacgtcgatcactttcgccgttttcgcgctgcttcctttatcttcttctttaccgtcttctttgcttccgcaacctgctgccagtccggcaacaagcgccgcacttaaaactactgctaaaaactttttcattttcgtatttttcattttcgcaccctccgtttataattccattgctcaatgctgaataaccatgcattccatgcactacattctaacacgttctgcataaaaatcaagctctttttttaattttatgcattctgtttcagtttttatgtatattatgcgttactttatgcataaatcttcattctttatacaggttttttgcaaaatacacattttcgccgaaacaattcttatgcaagcagcgtcttaataccgaagtaaagaagcacaatgactcccagtacgattctgtagtaaccaaacactttaaaatcatgttttctgatatactgcatgaggaacttgatcgcaaggatggaaaccgcaaacgaaacgaccgttcccaacaaaagcagaaatacctgcatacccgtgaaatttaatccgaatttaatcagtttcaaaaaacttgcgccgaacatcgccggaattgcaaggaaaaatgtaaattccgccgcaactcctcttgatactcctatgagaagcgctcccacgatcgtcgctcccgaacgggatgttccggggatcagcgccaatgcctgaaatacgccgatgatcaaaaccgtctgtatcgtaagctgagaaagtttttccactttcggctgcttatctttctgatagttttcgattacgataaacagaataccgtagatgatcaatgtcgcggcaacaacatatgaattgttgaacttttcttctataaaatcattgaacggaagcccgatcagcattgccggaatcgaacctatgatcactttgacccacaactggatcgtcaacatcttctgtttctgggttttcttcggtgaaaacggattcagcttatggaaatacataacgacaaccgccagtatcgctccaagctggatcacaacataaaacatgtcaagaaacgcctgattttgtttcaaatgcagtaattcttccaacaagatcagatgccccgtgctgctgatcggcagccattccgtgattccctccacaataccgaatataattacttttaatgcttctaacatcttgcttctcctcctccgagaacaaatctttcaatcgcttgcgcaacgccgtcctcttcatttgacagtgtgatataatctgcagcttctttcacctgcggctctccgtttgccattgcgacgccgaaaccgacttctttcagcatcacggtatcgttatctccgtctccgaacgccatgatctcttcccgcttaataccaagcctgcttccgagattgacaagtcctgttcctttattgactcccgccgcgttcacttctatattataacgaagagatccgaccagttccaaatcctcatgacgggcaagttcttcccacgcatgttttctctcggacatatccgcaaataatgcctgcgttttatcgagacctctgttttctctgtctaccagttcaaaaatatcatccaccggaatacgggttttacgcatatattcccacatattcggatttttgtgatatcgttccacaaactccattttttctgccggagcatatccctgtccatcaaaatatacctcttgtagagtatcatattttcgacaaatttccaacgcctttttcgctgatttgacagacaacagatgttcttctattacatttcccgtacgagtgtcgataatccttgctccattagacgtcagcgcataatccatacccggaaattctctcaattcttccggaactcccatccacggacgccccgtagctacaagtacgacgattccgcttctgatcgcctttgcaagaacttctcttgtccgcacagtcagttcttttttatccgtcagcaatgttccgtccaggtcaagtccgatcatttttatcttatgcgtcatagatatacctctttcttttccgttctgtctttcgctgcttttgaaagcggccttctcagcctttatcatatcaaagtttgccaaataacgcaatttgtagtataatgattattcagcacttaaaaaatgcttcaagaaaggaatttaaagctatgaaattctacaaaaaacggtggatacaatcaggcatcatcctgatcagttctctcggaattgtactttcagtttttccttcatttgcagatgacaacattgacaatttaaaaggacagacttctgcactcgaaagtgaattagacggtatcaacaaagatattctctctttgagcgaagagatctctgcaacagaaatgcaggttgagatcttaaacggtgagattgcccgtacttccgatgcacttgtcgaagctgaagaaaacgaaaatgagcagtatgaaaatatgaaatcccgtattaaatatatgtacgaacacgggaacgcaacactgcttgagatgctcttttcggcggaaaacatggcagattttataaacaaagctgattttatcgaaaatctgagcgaatatgacaaaactgcccttgacgatctgaaaaatatttataaaaatatcgaagatcagaaaaacacattagaaactcagcaggattcacttcttgatctgaaagatgaacttaagaaaaaacagacggaactccaggaaaaagcaaaggcgacttcaacaaatcttacggaagtacaagccaaattagaaaaagcaaaggctgaagaggctgcccgccttgaggcagagcgactggagcagctccagcaaaacggcggctacgacgatactattacaaacaacggcggacagatcgacgcttctgcggatgacgtcacacttcttgcggcgatcctgcagtgtgaagctcatcagaactatgattctctgcttgctgtcgcaactgtaatattaaaccgtgtggaaagtcctcgttttccgaatacgatcagaggagttatctatgcaagcggacagtttgaaccggtatggacaggtcgtcttgacgctgttctgaagaaaggtccgacctctttatctatgcaggttgcgcaagatgcgatcaacggcgcaagacttgcggcagtggcagactgttattatttcctctatgcaggatctacaaaccgaccgggagtcaacatcggaaataaccttttcttccctagctggtaaagatatcgttattgaaaccgaaaacaaaatccccgtaacaacgaactcttccaaaaaagtcagactttttggagcagttcattgttacggggatttcttacttttcagttctatattttcgttgtctgcacagcttaacttttctttataaaagtcgtaccgcacttcggacatcttacttcaattttccctttgcccttcgggatgcggattttttgtttacatgacggacatgtataaatgtggtacacttttctctgctgccagatgtttttttgattctgaaaccaatttcttatcttgtatgttttcataagatatgcctgattttctgcgtaccgcttctgtacatttcttgaaaatatccgaaaataacagtagatcacgactccccagccgaaaatatataaaagcatgctcaccgcggtttctccgaaaaacgccgataaaagaactaccgccaatcccgtgatcagaagaaacttcgataattgatcgataccgtatctgccctgcataaaacgtattaatttttctttcatttccatccatccttctgcattaatgcctttttgatatgaataacattctctctcgtttctcctgcaaagtcaattaaaagaatataaaatcttactgcttataacctgtttttattcttcttcatttaatatatttccacatattgcatcagaaaccagatacacaatctttgaatcatttaacatcacatatctgtcatccccgacccggtttcctatatataatgtcagtttcttttctttttcatcttcctgataagtcacttctaccgcagcccttaaatcttcatccaaaccgtattctgataattctttttcttctgcacaataatctgccgttgtggacagctgcacagctccaaggcctccggctattgcgattatttgttccgtctgcgtctcgtctgcactgtcatatacaacagaatttttatttttcgtaataactgccttctcaagattgccacttccaatcgatggatagtcgtcaagttgtatcagatcttcttctgtataatttaaatcttcaatgacctgactcgaaacagtataaatagatttttccccttttaatgttgcataaatattgtcccctgtattatttccgaaataaacagaaatgacatcatcattatcatctgtatactcaatcgtataaataggaacatccaaaccatagtcttttgcttcatctgcatttttcaacttccgattgagatttcacctgttttaagaaatttaat

SEQ ID NO: 7621 - DNA, 67181 bp, Unknown
  gut microbiota DNA sequence
ggtcgagggcataaccaaagcggagataggcacatgtcgttggttagcatctgtgttttagatgcttatcaaagacggtacccgtaagggtaggatgaaaaagattctttgtatgtagttttgaaggtatatgtaaacgagatataaataagaagagaatattttccaaacggaatgagagaaggcagcgtctgaaaaggcgttgtctttttttgcggcagaggcaagctaaagtcgggcttgtcagaaatattctaataattatatgtgccggttaaatatttaaggaaacactgattaatgatttgattttcttcaagaatggacattgtataatgatcagttctgattttttaaaaacaagtgtcgtttttgtattcctgccggagaaacgcataaaaaccttagttttacagatactacctttattgacagaaatatgataaagatagaaatttgcaaaacggaggattttttatgaaagcaacaggaatcgtaagaagaattgatgatctcggcagagttgtaattccgaaagaaatcagaagaacgcttcgtatacgcgagggagatcctttggaaatatttactgacagagaaggcgaaattattttgaaaaagtattctccgatcggtgaatttggaatgcctgtaaaattgtatgcggaaagtttatctcagacaatggggtgtacagtgtgtattacagatacagatcaggttatcgctgtttcgggagcaggtaaaaaagatttagaagaaagatttgtaagaaaagagtttcttcaggttttgggagacagagaagttttaacggcgtgtcaaggagatgacagatatgtaaaagtgacggaagaaatgaatgaatatgaggatgaagttatatctcctattatcagcgcgggagatataatcggggcagtcgttttattaaacaaagataagaaaaaacattttggcgaagtagaacaaagagttgccgtcagcgcagcggattttttgggaagacaaatggaataacagcaagaacagcttggtaaatatgagggaaataagtattttcaccagtcataaatctttcgggacaaacatatgctttattagtgatgatacgaaacgggaggtttgtgatggaagcaaaagaatatggaaatgttgggaaaaaggcgatctggttcgtgaaatcacttttgtgtggttatattgtgacaggattcttacttttgatactggcgctgatgctttataagcttggtttgagtgaacaaaatgtcaatgccggaattgttttaatttatgtgatttcaacattttccgcgggttttgtacttgggaagttggcgggaaaaagaaaattcttatgggggctgtttgccggaataacatattttgtcctgcttatgctgattactttgggagtataccatgcgtttcaagggaatgtgacaaatattgctgtgacatttttgctgtgcgccggagggggaatgctcggaggaatgattgcctgaaaacagttcatatctcaatcatttctcaatcttgcagagcagttaaaaaactctttaaaaatggcgcatactgtgctataattttatgagcgtaataatgttataagattaggaggacaggacatgaaacatattaaaacattaaatacacagacattgaatcacacagtaaaaaaaggcggatgcggcgagtgccagacatcatgccagtcagcatgtaagacatcttgtactgttggaaaccagacttgcgagcagaagaaataattaaaatatcgtaagaatacggggcaatagggtgaagaaggcagcggtctttaaaagccgctgccttatgcttgtttgaacgaaatgaaagagaggtatttttcgtgatacatttgtatcagaataacggatataatatagtgttggatgtcaacagcggtgcagtgcatgtcgtagataaggcagcgtacgatgtgatcggcgcgttagaagagcaaaatgaattacatacggcagaaacattgaaaacaccggaaacttttgagttcttaagatcaaaactcggaagtacatacgcagaagaagatataagagatattttggaagctgtcgcaacgattacgcaagagggaagactttttacgagagatgtttatgaagactacattgatgaagtgaagcagagaaaaacagttgtcaaggcgctttgcctgcacatcgcacatgactgtaatctggcctgcagatactgcttcgcagaagaaggggaatatcatggacgccgggcgcttatgtcttatgaagtaggaaaaaaagcgcttgatttccttattgcgaattcgggaaaaagaagaaatctggaagtagactttttcggcggagaaccgcttatgaactggcaggttgtaaaagatcttgtcgcttacgggcgagagcaggaaaaaatccacgataagcatttccgttttacagtgacgacaaacggagtgcttctaaatgatgagatccaggaatttgtcaataaagagatggataacgtcgtacttagtttggatggcagaaaagaggttaacgacaaaatgcgtccgtttagaaacggaaagggaagttatgatctcattgtgccgaaatttcagaaacttgcagagagccggaatcaggagaagtattacataagaggaacatttacgagaaataacctggatttctccaacgacgtacttcattttgcggatcttggatttgagcagatttcaatcgagccggtcgtaggagaagatacagatccttatgcgatcagaaaggaagatcttccgaagatttttgaagaatatgacaagttggcaaagatcatggtagagcgtgaaagaagcggacggggctttacatttttccattttatgatcgatttggaaggcgggccgtgcgtttcaaaacgtctgtcgggatgtggatcgggaacagaatatcttgcagtaactccgtggggagatttgtatccatgtcatcaatttgtcggacaggaagaattccttatgggaaatgtggacgaaggtattacgcatacggagattgcggatgaattcagaggatgcagcgtatattcaaaagaaagctgcaaaaattgtttcgcaagattttattgcagcggcggctgtatggcgaactcttataagttcaatcattcgatcaatgatacatatgaagtaagttgcgagatggagagaaaacgtgttgaatgtgcgatcatgatcaaagctgcattggccgacgccgacgcacagtaacggaaaagcgcatagagcataaagaaaggtacatgagcggacggaataaaacgtctgcataaatgtagataaaaaagaaaagtaagaaaggaaaagaagtcatgaaaaagagcagaggtatattaagccttattctcgtggcagcactttcagtcctgctcggtgtgactacgatccgcggattggattccgaaggaatgggcgcagcgaaaaatattaatttgggactggatcttgagggtggagtcagcattacatatcaggtaaaaggcgacaaaccgtcacaggaagacatggatgacactgtatataaaatgcagcgtcgtgtagagcagtacagtacagaggcacaggcatatcaggaaggtgacaaccggatcagcatcgagatcccgggcgtagaagacgcgaatgcaatccttgaagaattaggacagccgggatcactgtatttcattaagcacaaagatgctgatggaaatgagaactacacacttggagcagaaggttatgtattgaataaaacgatcgatgaactgaaagcgaacggttctatcgttttaacaggatcggaagtgaaatccgctacggcaggcgcatgggacgatcagaagacaggtaagaaaatgtatggggtagatcttacgctgaatgcagaaggaacagatgcgtttgcggcagctacaacagaagcatacaacaacggaaacgatacgatcgcaatctattatgacggagaattgatcagtgttccgagtgtaaatgcaatcattgaaaacggacaggcacagatcacaggctctgcatcatacgaagaagcggataatatcgcatctacgatccgtatcggaggtctgaatctggaactggaagagatcagttcaaaagtagtcggcgcacagctcggtgaagaagcgatcagtacaagtcttaaggcaggagcgatcggtcttgcagccgtatgtctgtttatgatctttgtgtacctgcttccgggatttgcatcaagtatcgcgcttgtcatttatgtcggcttgatcttacttctgttaaatgcgtttgacatcacgcttacacttcctggtatcgcaggtattatcctcggtatcggtatggcagtagacgcgaacgttatcatttttgctcgtgtgaaagaagaattgtcagcaggagcgtctgttcattcagcgcttcgggcaggatttcataaagcgatgtcggcaatccttgacggaaatattacaacattgatcgcggctgcagtattgtggcttagaggaagcggtccggtaaaaggatttgcacagacattggctcttggtatcgtcgtttcgatgtttacggcgcttgttgtaacaagactgctcgtatattctttctatgctatcggcatccgcaatccgaaagtatacggcagagtaaaagaagagagaaaaccgatcgattttctcggaaagaaaaaagtgttctttgtcgtttctatcgcactttgcctgagcggatttgttgttatgggaatcaattccgcaagggacgtgggagcgctgaattacagccttgattttgtcggcggtacggcgacaacggtaacgtttgacaaagagtatacattagaagaagttgacagtcagatggtgcctgaacttgaaaagatcacaggcgataaaaacgtacaggtacagactgtaaagggaacaaatcaggtagtgtttaaaacacagactcttgaccttgaaaagagagaagcttttgaatcttatatgcagaacgagtttggcgtaaaagaagagattgccacagaaaatatcagttctacggtaagttccgaaatgagaatggatgcggtgatcgcagttattatcgcgacgatcttcatgcttttgtatatctggttcagatttaaagatattcgttttgctacgagcgcggtagtggcgcttctgcacgacgtgcttgtcgtacttgcattttatgcgatcgcccgtgtttccgtgggaaatacatttatcgcatgtatgctgacaatcgtcggatactctattaatgcgacaatcgttattttcgaccgtatccgtgaggagatgaagaacagttccagaaacacagatctgaaagatcttgtaaatcgctgtatcacacagacgctgacaagaagtatttatacatcgctgacaacatttgtcatggtggcggttctgtatgtgatgggtgtaagttcgatcaaagaattcgcacttccgcttatggcgggaatcgtttgcggagcttattcatctgtatgtatcacaggcgcgctctggtatgttatgaagaccgggaagaatgcaaaagttcaggctgcttccgtaccggcgaaacaggttgaaagtgtaaagacagagtcgtcagaagaaagctcatcggacggaaatgttcaaaaagcagcaaaatcaaaaacaaaaaagaaaaaaaagagaagataaattttcgttaaaagattgtttgaaacgaaaatgaaaagaccggtcgtgaagcggaaacgttttacggccggttttctctatggtgatattttgaaaattatgatactataatacaaaaatgtacgtgatatacttggaggaacaaacgatggaacgctggtatgtaatgatgaagaaagctgatttcagcagtatcggagcgaaatataatatttcgccggtcattgcccgcctgatcagaaacagagatattatagaagatgaagagattaatctttatttgaacggaacgattgccgacctgtatgacggaatgttaatgaaggacatggataaggcggttgagatcttatcggagaagatcagggaagaaaaacccgtaagggtgatcggagattatgatattgacggtgtgaatgcagcttatattttgaaagaaggtctggaaggactcggagcagatgttgatacagatattcccgacaggattaaagacggatacggattaaataaaatgctgatcgaccgggcgttagatgatgggatcgatacgattattacatgtgataacgggattgcggctgcggaagaaatcacttacggaagaaaaaacggtcttacggtgatcgtgacagaccatcatcaagttccttttgtagaaataaacaaagaacgggaatatctcctgccgcaggctgatgcggttgtagatccaaggcgtccggattgtgagtatccttttaaaaatctgtgcggggcagcggtcgcatataagttagtagaggcattgtataatgttatgctccgagatccggaagacgttgattatcttatggaaaatgtggcgattgcaacagtaggtgatgtgatggcgctaaagggagaaaatcgtatttttgtgaaacagggacttgagatgctcaagcgcacaaaaaatgaagggttaaaagcgcttatagaatgtacgggaatcaatcccgaatatttgaatacatacgatctcgggtttgttcttggaccatgtattaatgcgagcgggagactggacaccgcaaaaagagcattggaactgctgagtacacggacgaggcgggatgcggtcatgttggcggaagatttaaaggcgttaaatgacagccgtaaggaaatgacggaacgaggaattaaagaagcggcagagatgatagaaactacctcgctgaaagaggacaaagtatttgtgatctatctgccggactgtcatgaaagtattgcgggaattatcgcaggaaagatcagagacagatattataggcctacgatcatcttaacaaaggcagaagacggagtgaaaggatcgggacggtctacggaagagtatgacatgtttacagaattgtgtaaatgtcaggcgctgtttacaaaattcggcggccacaggcaggcggcaggcgtgtccctgaaagaggagaatgttcagcgattcagagaaacgatcaattctctttgtacattgacagaagaagaccttcaaatgaaagtatatatcgatatgcaagttccttttccgtatttaacagaagatttgatcgagcagtttcaggtgatggaacctttcggaaaaggaaataaaagaccgctgtttgcggagaaagatctgaaggtgattcaacctaaaattgtagggaaaaacgagaatgttttgcagtgtatattggaagataagcagggaaatcgtatgaaagcggtttatttcggcgatgtaaagacttgcctgaaagagatgctggcaggaaaagtcaccgcggttacttattttccgtcaattaacgaatatatgggcagacgaagcatacagcttacgattgtaaattatcaaaagaaatgatataattaaacgatcttataactttgttgaatgagctgcatgagagaaggggactttactatggcaggaacggcagaatatgaagaattgaataaaaatctggagatcgtggacggtcatgcagtaaaagcgccggaggattatcaagatccggagcagctttatcatgttcttattgaaagagtgagaaagtatcatccgtctgcggatattaccatgatcgaaaaagcttatcgtatagggaaagaagcgcatcgtgatcaggtgagaaaatcaggagagccgtatattatccaccctctctgggtcggtattattttggcggatcttgagatggacaaagagacgatcgtggcaggaatgctccacgacgcagtagaagatacggatatgacgcttgacgatgtggcaggtgagttcggagaagaagtcgctcttcttgtggacggcgttacaaagcttggccagttgaattattcacaggacaaattagaagttcaggcagagaacctcaggaaaatgtttcttgcgatggcgaaggacatccgggttattattattaaactggcagaccgactgcataatatgcgtacgcttgaatttatgactccgacaaagcagcaggaaaaagcgagagagacgatggatatttatgctcccatcgcgcagagactcggaatttccaagattaagacagaattagatgatttgtctttaaaatactggaaaccggaagtttattataatctcgtgagggatctgaaccgaaggaaaacagaacgcgaggaatttgtgcagcagatagtagccgaagtttcgaaacatatgaaaaatgcgcatatagaggcgaaagtatatggacgtgtaaagcattttttcagtatttataagaaaatggtgaatcaaaataagacgctggatcaggtatacgatctgtttgcggtgcggataattgttgattctgtaaaagattgttatgcggcgcttggagtaatccacgagatgtacacgccgattcccggaaggtttaaagattatattgcgatgccgaaaccgaatatgtatcagtctcttcacacaacgctgatgggaccgtcaggacagccgtttgagatccagatcagaacagaagagatgcataagacggctgaatacggtattgcggctcactggaaatataaagaaggcggagattcagcgaagagtatggaatctcaggaggctaagctgaactggctgcgtcagattttggaatggcaaagagacatgtcggataaccgggagtttttaagcctgttaaaaggcgaccttgatctgtttgctgaagacgtttactgttttacgccaaacggtgacgtgaagaatttgccgaacggttccacaccggttgactttgcgtatgcgatacacagcgccgtgggaaataagatggtcggtgcacgtgtaaacggaaaacttgtcaatatagattataaaatacaaaacggcgacaggatcgagattcttacgtcgcagaattcaaaaggaccgagccgcgactggctgaatatcgttaagagtacacaggcaaaaaataaaattaaccagtggttcaaaaaagagtttaaggaagataatattatccggggaaaagaattgatcgtttcctattgcagggggaaatcaattaatctccaaaatatactgaaaccgaagtatcagcaggttgttcagaaaaagtacggcttcagggattgggacgctgttttggcggcgatcggtcatggcggtttaaaggaaggacaggttgtaaacagactttttgaggagtacgaaaaagaacataagaaagaaattacagacgagacgattcttgagagaatctcagaagcaaactctcaaaaagttcacattgcaaagtcaaagagcggtattgttgtaaaaggaattaatgatatggcagtgcgtttttcaaaatgctgcaatccggttcccggagacgagatcgtcggatttgtcacgagaggacggggaatgtcaatccatcggacggactgtattaatatgctccacctttctgatgtagagagggcgcgtttgatcgacgcggagtgggaagatacgtccgagacagagggcggcggaaaatatctggcagagcttaagatgtacgcaaacgacagacaaggattccttatggatatctcaaaagtatttacagaagcgaaaatagatgtgaagtctatgaatgttcgcacaagcaaaaagggaacagcaacgatcgatatgggatttattgtaaacggaagagaggaactccatgcgatcatagagaaactgcgtcagcttcagggagttcttgatattgagagaacgacgggttgatcttatatgaagcctttcaagtaagaagcaatagcgttcccgttgcggaggcggcgggagtaaaatgacagtttgaacaaagtcagagttgataaaaaggagagacagttcatgcgcattgagaaatttgtattcggacctgtaggaacgaattgttatatcgtaataaacgagatgacttcggaatgttttgccgtagatatggcggattgtcctcaggaattcgtaaagcatataaaagatgcaggactttgcgtaaaagcgctgcttttgacgcatggtcactttgatcatattatgggagcggaacgctttgcggaaatcttcggatgtccggtttatgcatatgaaggggaagaaaatattttatgcgatccggtgctgaatgcatcggcgacgatgctcggacagtcatatgtgtttacaaaagcagagtatgtaaaagcggatacgcagatagaaaccgcaggctttcaggtggagattattccgactccgggacatacagagggcggatgctgttattatatcggagaagaacatgtattgttcagcggagataccctttttcataattctatcggaagaacggatcttcctacgggaagcggaagtgagcttgtccgttcggtaagagaaaaacttctggttttgccggaagatacgagagtatatcccggacatatggaagagacaacgatttcgcatgaaaagaaatataatcctttcatataaagttaataagtgaacgggaatgattggaatataggaatggatataacaggtggcgatggaataggcttcgcagagataataggaaatgggaagagacgatgattaaagtatcaagtaagaaaaataaatatacatacaatgtatatcatcttgtaaaagcctttttccccaatgaagagatcatacagaatgtagatgaaaagcaggaatctcttgtggcattaaatctgcccggagggtcttgcttttccattgcgcttgaggaagtggaagcggcagcaggtgatctttcggaaatggagacagaagaggcgaaagaacaggcaataaaaaaagaactgactcgtttgttgtaccgatatctcgaacaacagacaaggacaacgcttgcatggggaacacttacaggagtgcggccgacaaaacttgccatgacaaaattggaacaatatgaatcgatgacggaagcggaagcagtccgcaggacagtcggagcgtttcgtgatgaattttttgtcagtgaagagaaagcgcagcttgcatgtgagattgctgtgagggaaaagaaacttttgtccaaattggattataaggatgggtttagtttatatgtagggattccgttttgcccaagcgtatgctcttactgttcgtttagttcttcgccgatcgcagagtggaaagataaggtggaaagttacctttttgctttgttgaaagaaatccgggcaatcgggaaaatgtcggaagggcacagaccggacagcgtgtatatcggaggaggaacgccgacgactttggaggcagagcagatggatcgtttattaaagacgatcacggagaatttcgacttgtcaaacgtacttgaatttacagtggaggcaggaagaccggatagcattacggaagaaaagcttgcggtgatcagaaaatacccggtgactcgtatttcaataaatcctcagacaatgcagcaaaagacattagatctggtcggaagaaatcatacggtggcacagacaaaagatgcattctatctggcgaggaaactgggatttgacaatattaatatggatcttatcgccgggcttccgggagaggatgcttctgatatggaagatacgcttcggcaggtggaagaaatgcatcctgacagtctgacggttcatgcgctggcgatcaaaagagcggcgagatacggacaggagggaagaaaacaggatcttcattctgagatttcgcagatgataatgtcggcagctgattgtgccaagcggattggactgcagccgtattatttatacaggcagaaaaatattgcgggaaattttgaaaatgtcggttatgcagaacttgacaaagccggaatatacaatatactgattatggaagaaaaacagacgatactggcagccggagcgggagcgtcgacgaagatattactcaaagatccgatccggacagatagcgggaaagagattaatctggttcgctgtgaaaacgtgaaaaatattatggaatatatcgacagggtcgatgaaatgatagaacgaaaaggagaatggttatggcgctgaaaaagaaaccggttacaggcatgaaagacatgatgccggcggaaatggaagttcgggattatgttatcggtcttatcaaagagacatataaaacatttgggttttcctctatggaaactccgtgtgtggaacatatcgagaacttatgcagtaagcagggcggagataatgaaaaacttatttttaagattttaaaaagaggggagaagctaaaacttgatacagcgaaagaagaggcagatctcgtggacggaggacttcgttacgacctgactgttcctctctcaagatactatgcaaatcatgcgaatgaactgccgtctccgtttaaggcacttcagatgggaaatgtgtggagagcggatcgtccgcagagaggacgctttcgtcagtttatgcagtgcgatatagacatcctcggagaaccgtcgaatctggcagagattgaattgattcttgccacaacagcgctgcttggaaagttagattttaagaattttacaatccgtatcaacgaccggcgttttctgaaagcaatggctgcgtacagcggattcaaagaggaagattatgacagtgtgtttattacgctcgataagatggacaagatcggattggacggcgtggcggcagagctgaaaggaaacggatatgcggaagaatcggtggaaaaatacctctcgctttttgaagagattacgaatgatgtggaaggcgtccgtctctgcaaagaaaaattacagggctatcttgcgcctgaggcggcggattcactggaaatgatcatcacgagtgtggagagtcagaaagaagctgaatttaagatgagttttgacccgacgcttgtgcggggaatgtcttattatacaggaacaatctttgagatttccatggatgaattcggcggaagcgtcggcggaggcggacgttatgataagatgatcggaaaatttacgggacaggatacgccggcagttggattttccatcgggtttgagcggatcgtcatgctgctgttggaacggggatacgaagtgccgacgagcaaaccgaaaaaagcgtttctgatcgagaaaaaacttccgcaggagaaacttctggaggtgcttgaagaagcgcgcaaagagcgggaagcaggcagacaggttatgatagtaaatatgaagaaaaacaagaagttccaaaaggaacagcttgcagaacagggatatacagatattacggaggtgtacaatggctgaatcaatgcagggacttaagagaactcacagatgtggagaattatctgcggcaaacgcaggtgaaaaagtgaccattatgggatgggttcaaaagaacagaaataaaggcgggcttgtgtttgtagatgtgcgtgatcgttcgggaatcattcaggtcgtatgtgaagaaggcaagacagatgcggcgctgatcgagaaggcagcaggacttcgttccgaatatgtcgttgcgatcgtcggagaggtggcaatgcgttccggcgctgtaaacgataagattgcgacaggggagatcgaggttatcccaagtgaactcagaattctttcagaggctttgacaccgccgtttccgattgaggaaaactctaagacaaaagaagaagttcgtttgaaatatcgctatcttgaccttagaagagccgatcttcagagaaatctgatgatgaaaagtcaagtgatgacattgacaagacagtttttctcagaggaaggatttcttgaggtagagacgccggtactcggaaaaagtacgccggaaggcgcgagagattatttagtgccaagccgcgtgcatccgggaagtttttacggacttccgcagtcgccgcagctttataaacaacttttgatgtgttcgggatttgaccggtatattcagattgcaagatgttttcgtgacgaagatctccgtgcggacagacagccggaatttacacagatcgacatggaactttcttttgtcgatgtagatgaagtgatcgatgtaaatgaacgttatcttgcgagagtatttaaagaagttctcggcgtagatgtaccgcttccgatccagagaatgacatggcaggaagcgatggatcgtttcggttcggataagcccgatcttcgttttggcatggaacttacagatgtgacagacgtcgtgaaaaactgcggcttttccgtatttaccggagcagtcgaaaatggcggaagtgtacgcggtatcaacgcgaaaggtcagggcgggatgccgagaaagaagattgataaactgacggcatttgtgaaagattacggcgcaaaaggactcgcttatattgcgatccaggaagacggaagtataaaatcttcctttgcaaaatttatgatggaagaagagatggatgcgctgatcaaggcgatgggagcagaagccggtgatttactgctttttgcggcagataagaacaaggttgtgtgggacagcctcggagcgcttcgtgtggaactggcaaaacagcttgaactgcttgataaaaatgaattccgatttgtatggatcacagagttccctcttcttgagtggagtgaagagcagaaccgctatgtggcaatgcatcatccgtttacgatgccgatggaggaagatcttccgctgatcgacagcgatccgggaaaagtgcgcgcaaaagcatatgatatcgttttgaacggaaatgagatcggaggaggaagcgtccgaatcttccaggatgatattcaggagaagatgtttgaagtgctcggctttacaaaagagcaggcatacagccagtttggattccttcttgatgcgtttaaatatggagttccgcctcatgcaggacttgcttacggtttggatcgtctcgttatgcttatggcaaaacaggacagcattcgtgatgtgatcgcattcccgaaagtgaaagatgcgtcttgccttatgacggaagcgccaagtgtcgttgatgtaaaacagctgaatgaacttggtcttgaaacaacagccgaaacagaaaaataagaataaaaacctcactgccttaactgtactgctttgaaaaagtcagatcaaagcccggtacgtttttgcagtgaggttttattttattatagctaaacgaatttcagcgtatatcgccggatgcgtctttattcatcccagccttcatagaaccggatgtttaccgagatattccgaacgatatcgcccgcctctgtttcaatatcattgatatctgaaatatatgggaagacaggattttcttcttcaaattctaccatgatccagttgcgggcggcttcatttgcattgtcgattgcatcgtcgagagtatctcccgatgcttcgcagcattcaagatccgggaaatatgcatcgtacccgccgctttcgtttttgcggaagaccgcaggatatataaatttcataatgataggactcctttctgagtaatacaaatacataaaaagtatagcatcgaagtgggtgaggtgcaatgcgaaaatatatggagctgaaaactctttaaaagtaatgagaaaataaaaaagttttgagaatttttggaatacaatccatgaatgcaatttatgataaaaaaataaaaaaaggtgttgacatttctctttgtgcgtagtatagtatgtattgttccggtcaacggaacggagaaaatgcgacagtggctcagctggtagagtacgaccttgccaaggtcggggtcgcgggttcgaaccccgtctgtcgctcttaaaaagcacttgatatctcagatgagatgcgagtgctttttattttatactatataatagatgatatacgttaaaaagtcttttacaatttgtttttttcaaagtataataaataacatgtatctcagagattagatttataaaagaacggaaagaaaaggtgaggtttcgatatgcgtaaaatacaagtaggacttctcggacttggaactgtcggaatgggtgtgtacaagcttcttcgtaagagggcggagacgatggataagacgatcggtgcgcagcttgagattaaaaagattcttgtccataataagaataagaaaagagaaggagtcgatgagacgcttcttacagatgattggaaagaaattatagaagatgatgagattcagatcgtaattgaggtaatcggcggtatcgaaccggcgaaaacgatgatactggaggctttaaaagcagggaaaaacgttgtgtctgcaaataaagatctgattgcggaagaaggaaaagagatttttgacacggcacaggcagcgggaaaagattttctgtttgaggcggcagtggcaggtggtattccgatcatccgaccactgaaacagtgtcttgcgggcaacgacctgacagacatactcggaatcgtgaacggtacgacgaactatattttaacgaagatgtttgaggatggaatggaattttcggatgctttgaaaaaagcgcaggaactcggctatgcggaagcagatccgacggcggacgtagaaggtcttgacgccggaaggaagatggcgatcatggcttctattgcatttcattcaagagtcgtgtttgcggatgtgtatacggaaggaattacaaaaattacggcggcagatatcgcctatgccaaagagtttgacagcgtgatcaagctgcttggtgtggcgagaaatacgccggaaggaatcgaggtcggagtttacccggtcatgatcgcgagagatcatccgctggcatctgtaagagattcttttaacgctgtatttattcacggagatgcagtggacgatgcgatgttctacggaagaggcgcaggagagatgccgacggcaagcgcggttgtaggggatgtgatcgacgaggcgagaaatattgaatacggatgcagcggacggataagctgtacatgttatcagcagcttgccgtaaaagatttcggagatgtgaaaaataaattcttccttaggatgcaggttgaaaactgcccgggtgttctggcgcagatcgcgaaggtgttcggggaacataaggtgagtattgcaagagtcgtacagaaaaacgccaagacggacagagcggagcttgtgatcgtaacggagaaagtgaaagaaaaacatatgggaagcgcgctttgtgagttgaaggaaatgaaaagtatttttgaagtgagcagcatgatcagagagtattgatagaaactgccgccggattttagatgccgggcgggagcagttgaattttcaaaaagtccgaataaggagtgcagatggaaaatcggagtttgccgatcggttttatcataaaacaggtcaataatgtatatgaaaaagatcttaatgaacgattgaaaaaaataggaatcacatcatcccagtgcgcggtgctcgattatttgtttcatacgagtaaagatgaagtgagtcagagagatgtggagaaaaatctgaatctgaaaaatccgactgtgaccggaatactgaagcgcttagatgaaaaaggatatattttctgtgtaccgaatgcaaacgacagaagaaaaaagataatttatcttacggaaaaagcttatgatattagaagaaaaatggaagctgacaggcgcaagctggacagagaactgacgagagggatgacaaagagggaaacagaagctcttagaaagaatttggataagatattgaataatattgcagatccgtgagagcaggcggaagtaaatgagccggaagagcggaaaaggaattgataaaaggagaagatatatgagttacgcagataaagtgtttatcgatatgtgccgtgatattattgacaacggtacgagcacagaaggagaaaaagtgcgtccggtctgggaagacggaacgtctgcatatacgatcaaacgattcggcgttgtgaaccgatatgatttatcgaaagaatttccggcgttgacactgcgccgtacagcgataaaaagctgtgtggacgagctgctttggatctggcagaaaaaatcaaataatgtaaatgaattaaaaagccacatttgggacagttgggcggatgagacagggtcgatcggaaaagcctacggctatcaaatgggagtgaagcatcagtataaagaaggccggatggatcagacggaccgtgtcatatttgatctgaaaaataatccgtacagcagacgtatcatgacgaacatttatgttcataatgacctgcatgagatgcatctttatccgtgtgcatatagtatgacgttcaatgtgacaaaagaaaaagacagtgagaaattgacgctgaatgctattttaaatcaaagatctcaggacgttcttgcggcaaataactggaatgtgtgtcagtatgcggttctcgttcatatgcttgcacaagtatgcggaatgaaagcaggagagtttgtgcatgtgatcgcagatgcgcacatttatgacaggcatgttccgatgatcgaggaactgatttccagagaaccgcttccggcgccgacgttctggctgaatcctgagattacagacttttatgattttacaccggatgacgtcagactggatcgctatgagacgcatccgcagattaaaaatattccgattgctgtttgagtagagaaaggagtgtgcggagtatgagagcaatcgtatgtgccgataaaaactggggaatcggatacaagaacaggcttcttgtgagtattccgtctgatatgaagttttttagagaaacaacgacaggtaaagttatcgtaatgggtcgaaagacactggaaagtttcccgaatgggatgccgcttaaaaacaggatcaatattgtgcttacaagagacagaaactatgaagcaaaaggtgcggtgatcgttcacgatgaagaagaattgatgaatgaactcggaaagtatgatacggaacaaatctacattatcggaggagagagcgtctacaagatgatgctttcgcattgtgataaaatttatgtgacaaaagtggatcgtgcatttcaggcagacacttatttcccgaatttggatgagatgagcgagtggaagatgacgcaggaaagtgaggagcagacttgttttgatctggaattttgttttacaacatatgaaagatgttaagaaaaaaatatggcgcagacggggaccggcggttctcgttctgtgccttgctgttattgtgcagggatgtgcggggtacccggctgataaagacggggggcatagagaacaaaacaaaacaaatgaaaatgggcggctgagtgttgtgacgacaatttttcctccgtatgattttgtaagggagatcgccggagactgcgtagacttaaaaatgcttttaaaacccggggaggaaagtcattcttatgagccgacgccgcaagatatgatcgctattgaaaacagtgacgtgttcatttatgtcggcggggaaaatgatgtgtgggttgaagatattttaagttccatgccggataaagaccgggtttcgataagacttctcgattgtgttgaaacggaggaagaagaacatgtagaaggaatgaaagaaccggcaggagactctcaccatgaaatgcacggtgaagagaaacatgagggatctgtccatgaaattgacgaacatgtatggacgtctcctgtcaatgcatctgtgatcgtggagaagatcaaagaagttctcattcaaaaagactctgaaaataaagcggcgtatgaggaaaacgcagatagatatcagacagagcttgcacaattggataagcggtttcgagaagttgtgagacagtcaaaaagaaatttattaatattcggagatcgttttccgtttctttattttgcaaaagagtatggattggaatattatgcggcatttccgggatgcgcaggtgatacagagccgagcgcggcgacaatggtatttttgattgaaaaggcaaaagacgagaacgttccggcagtgcttaaaatggagttaagcaatgcagacattgcaaatgcggtagccgaagcttccggtacggaagtgagaatattttatagctgccataacctttcggcagaagattttgaaaaaggcgagacatatcttacgatgatgcaaaagaacgcagatacgttaaaggaggttttgaactgatggcgctgataacgtgtgaaaatgtttccatcggttacgaaggacaaacggttgtaaaagaattgaatttttctattgaaaggggagattacctctgcattgtcggagagaatggatcaggtaaaagcacccttgtcaaaagcctgctcggactaaaaggcgcagaccgggggaaaatcatatacggagacggactgaagaaaaatgagatcggatatctgccgcagaaaaatgaagagcaaaaaggatttcctgccagcgtttatgaagtcgttttgtcgggaagattaaacggccgtgggtggaagccgttttataggaaagaagataaagaagctgcggcagaaaagatggaaatgttaggaatcacagatttggcgcgccaatgctttcgggatctttcgggcggacagcagcaaagagcgcttcttgcaagggcgctttgtgcgacgaaaagcctacttttacttgatgaacctgtgacgggacttgatccgatcgtaacaggagaattttatgatctgatccgaaagatcaatcaggaatcaaatatcgcggttgtgatggtctctcatgatatagaaactgcagtggaaaatgcaagtcatattcttcatttgcaggagacggtccgatttttcggaacggcagaagactatcgtaaaagccggatcggaaagaaattcctcggaggtgaagagcatgattgatacgattgtggaaatgttttcttatccgtttatggtacgggcgtttgcggtaggttcattagttgccctttgcgccgcgctgcttggcgtcagtcttgtgctgaaacaatattcgatgataggagacggcttgtctcatgttggttttggcgctcttgcggtggcaactgcgtttcaggcagctccgctttctgttgcgatcccggttgttgtacttgctgctgttttgattttaaggataaagggaaacggcaagatcaaaggtgatgcggcaatcgcgcttatttcgacaacctctcttgcccttggagtcatggtgatttccatgacgacaggaatgaatacagatgtgtacaattatatgttcggcagtattttggctatgagcgccgaagatgttcggctgagtgttattttggcgggaatcgttctcgttttgtatcttcttttttataataaaatatttgcggtcacattcgatgaaacatttgcgcaggcaacgggagtaaaagccaatctgtacaatacgctgatcgctgtgctgacagccgtgacaatcgtgcttgggatgcggatgatgggagctcttttgatctccagtctgatcatctttccggcgctgacgtcgatgcgtgtatgcagaacatttcggtctgtcattataaattccgccgtaatatctgttttatgtcttgtgatcgggattgcgatttcttatgtatgggcaactcccgcaggagcaagtgttgtcatcgtaaatgctgcggctctagcggtgtattctattgtcggaatgatacgatgcagaaagtaacagttccgactgcgtcattcgtaaaaccgcacgggtgcttcttgtggccggtgctgctgttttactcatgaacgggcggacgtctgtatggctgaactgctgccatagataaaaaagatcaaggataggaaattgacaagataccggatacaaagtatcatattgcttaagatgccggaagagaaaatttggattcggagttgttgttttttcaggcaatgagagtatgagagacagacccttagtttgaggaggtaagattttgagacagattacgggaaataagctgctcgtaagagcgttaaaagaagaaggagtcgatacgattttcggatatccgggagcgtgtacgattgatattagcgatgagttatacagacaagatgagatcaaagtgatcttgccaagacatgaacaggcgcttgtacatgcggcagatgcatatgcgcggacaacggggaaagtcggcgtgtgccttgtgacaagcggtccgggagcgacgaatcttgttaccgggttggcaacggcgaattatgacagtgtgccgttagtttgttttacaggtcaggtggcccgccatctgatcggaaacgatgcgtttcaggaagtggatatcgtaggaatcacacgaagtattacaaagtacggtgtgaccgtgagtaaaagagaagatcttggaaggatcattaaagaggcgttttatattgcgcggacagggagaccgggaccagtgctgatcgaccttccgaaagatgtgatgagtgagcttggaagcccggaatatccggaaacggtaaatcttcgtggatataagccgaatacgagcgttcatatggggcagcttaaacgcgcgcttaagatgctcaataaggcgaaaaaaccgctgtttcttgcaggaggcggagtgaatatcgcaagagcgaataaagagtttacggaagtagtcaatataacaaacgttcctgtagtgacgacgatcatgggacgaggcgcggttccgacagatcatccgctgtttatcggaaacctgggaatgcatggggcgtatgccgcgaacatggcagtgagcgaatgcgatctgttgttttctatcggtactcgttttaatgatcggattacagggaaacttcatgaatttgcaccgaatgcacagattgtacatatagatattgatacagcgtcgatatcaagaaatattcatgtgcatgtgcctattgttgccgatgcgaaagaagctgtggcgaagatgagagaatatgtggaaccatgtgagacaaaagagtggttagaacgtatcgcgcagtggaatgcagaacatccgcttacaatgaaagttcacggttcgataggaccaagagatattatcgaagagatgaacagacagtttgacgatgctattattacaacggatgtaggacagcatcagatgtttgtgacgcagtatgcagaaataacggaaaagaagcagctcgttacatcaggcggactcggaactatgggatatggattccccgctgcgatcggagcgaagataggcaatccggacagaaccgtgatcgcgatttccggtgatggcggaatgcagatgaatatacaggagtttgcgactgctgttttggaggaacttccgttgattctgtgcgtctttaataatgaatatctcggtatggtccgtcagtggcagaaactgttttatggaaaacgctacgggatgacgaatctgcgttccggggcgttgttccgaagaacaaatggggaagaaatgccggaatatacaccggattttgtgcgtctggcagaaagttacggcgcaaagggaatccgcgtgacaaagaaagaagagataaaggaggcttttgaagaagccggaaaaaatacaactgtgccaactttgatcgagtttatcattgatccggaagagatggtttatccgatgataaaaccgggcggaacactggaagaaatgattgtggaatgttagaagggagcgcgtgaatatggaaaataaaatgaaaaaaagatggatttccctttatgttgaaaatcaagtcggcgtactttcaaaaattacaggacttttttccggaaagacatataatctggacagtctgacagtaggaacaacggaagacccgacagtatcaagaatgacgatcgctacagtgagcgatgatgaaacttttgagcagatcaaaaaacagctgaaccgaatggtagaagtgatcaaagtgattgattttacaaatatctttgtgcgtatgaaagaaattttatatgtgaaagtgtttaaatgcacacctgaggataaagttgaagtgtttcagattgcggaaacgtttaaggcgaaagtgatcgattacggaaaagacagtgtgcttgtggagtttgttcagactgctacgaaaaacgacgcggtcgtaaaattaatgaaggaagaatttaaaacaatagaagttgtccggggaggaagcgtaggaatagagtctatcagtatgatggaacgatagtccgaagcgccgggacggttagtatagcgggatcgattgttgaaaaaacagtcgatcccgctttttgtaacggaaatgtgccttctgatatttctgggttaatgtaagaaaatggatttgcattttggaaaagttatgatgaactttcaaataaacagtatataacagttgacaaacagttatatactgttatatactgtttgacgaaaggaggaagtatatgaagattataatcaacagttcgtcgatggtaccgatttatgaacaaattatggatcagatcaaatcacttattacaggcggagatctgaagcaaaatgatgctcttccttcagtccgaactcttgcaaaagagttgaagatcagtgcgctgactgtaaagaaagcgtatgataatcttgaacaggaaggatttacagtgacgattcacggaaagggaacttatgtcgcggcttcaaataaagagcggatattagaggaattgaaaagagagatagaaagcgatctggaaaaagtagttcaaaaggcaagaggatgtggtctggatgacagtcagattagggaaatgttagagttgatcatggaggactaaaagatgttggaaataaataaattgcaaaaaaaatatgaaaatttcgagctgaattgttcgatgaaggtggaaaaagggtatattacggcgctcgtaggtgaaaacggagcaggaaaaagtacaacatttaaagcgcttctcggccttataaagccggatggaggagaaatcactatcttcgggaaaaaacctttggagctaacagcgaaagacagagcgaagatgggaattgttttgacagattcgggattcagcggatatttaaaagtaaaagatatcataccggtgatggagtcgctatataccgaatttgagaagtcgcgttttctggatttgtgtaataagttggatattcctcttaataaatcgattaaagagttttcaaccggaatgaaagcaaagttgaaagtgctttgcgcgctgacgcataaagcgaagtttctgcttcttgatgaaccgacagcaggtctggatgtgatggcgagagaaagtattttgaatctgttcagagaatatatggaggaagacggggagagaacaattttgatcagttcccatatttcttctgatctggaaggtttgtgcgacgatatttatatgattcatgaaggaaggattatctttcatgaagatacggatgtacttctgaatcaatacggattgctgaaagtagatgaaaagcagtttgaggaacttgacaagaggtatttgctgaaaaaaaggaaagaacattatggatatgcctgtctgacaaaagagaaacaatattatatcgaaaattatccggatattgtagtggaaaaaggcactgtagacgaattgattgcgatgatgataggagggaacgaactgtgaaaggacttttgatcaaagatttgaaattaatgaaaaataatgggaaaaatctgctgctggtctttttgatcatcggaacgatgatggggatcatgacgaaagaactttatgcggcagttggatatgtcacttttatttttactttgtttacggtaagtacgatcagttatgatgaatatgataacggttatccgtttttgtttactctgccgattacaagaagacagtatgtaaatgaaaagtacgtgtttgttttgatcatgacagcgatttcgtttttggtcggcataatctcagtcgttgtacagtttttcttacttactccgaaagaaagcttgactgaacttatcttgatgtacggagtttatacaatcaccgtattgattttaaacgatattatgattcctttgaaattaagatttgaaagcgagaagggccgcttggttattcctattgtattcggaggagcaatggtgattgccctgattgctgcaaaattagcaggaatgctgtcggaaactttaaaagagaagtttcttctggctgctttcaatataggagaatatgggattgcagcgattgtcatagtggcggcagttattgttacgattgcttcgtggttttggagtcagcggattttagaaaaaaaagagttttaaatcagcggtttgattttatcggtgaaaaagcttgagggaaaaaacagagtacaatctgttttttctcttgacaaaactgcttctgcaagttaccatagtaacacagtaagttagcaaggaggagttttagttatgaaaatgtggaagaaagcagcaagtatcgcgcttgtatcagctctgacagtatcaatggcggcttgcggaaacggcggcggaagtgacaagggttcggcagacgcggatacatttaagatcggaggtatcggacctacaacaggagatgcggcgatttatggtacggcagtacaaaacggtatccagcttgcgattgacgagatcaatgaagctggcggtatcaacggatatcagatcgaatttaaatttgaggatgaccagtctgattccgaaaagtcggttaatgcgtacaatacgctgaaagactggggaatgcagatgttagtcggaacgacgacatcaacaccgtgtacggcagttgtagaagagacacatgcagataatatgttccagctcacaccgtcggcaacggctgtagaaagtattcagtatgacaatgcattccgtatgtgcttctcagatccggatcagggaaaagcatcggctgattatatctcagagaataatctggcgaaaaagatagcggttatttacaacagttccgacacatattcatcgggagtttatcagaaattcgcagagcaggcgaaaacactcggacttgatattgtagcggcagaagcgtttacggcagacagtaagacagacttttccgttcagcttcagaaagcgaaagacgcaggcgcagaacttgttttcctgccgatttattatcaggaggcatctttgattcttgctcaggcaaacaaaatgggatttgcaccgaagtggttcggatgtgacggaatggacggactgcttgcattagacggatttgatgcagcgttggctgagaatttaatgttccttacaccgtttacggcagatgcggaagatgaagcgacacagaaatttgtatccgattttgaagctgctttcaagggaactccgaatcagtttgcagcggatgcttatgactgcgtatatgtgatcaaagaggcagcagaaaaggctgaacttacacctgatatgagcgtttccgatatgagtgatgctttgaaaaaagcgatgacagagatcaaagttgacagaatgacaggaaaatcaattacatggagtgaagacggagaaccgacaaaagatccgacagttgtaattgttcagggcggagtttataaaatccttcatgcagaataaaaagaaaaacagaagcagaacggttatgttatgtgaaagtgcttcttatatgtgagaaaaagatcctgcgttaagcgggatctttttgtataggacagtttgttttgatagttttaaatgatgcatagaatacgataaacagcgaaaacccgctaaccttccggctaacgggtttcgttgttttatagttatctaaaggaatgagagttaaagtagagtgcttttgacacttcaactttatgaggggaagatagttgcttatcaactatctaactcagattataaagaacaaatatgtcaaaagtatgtttaaactataaaagaatacgaaaaattataaacagggaattaagaaagtatataatcatttctgtgtcttttgtattgcgcttgatagtttcggtccgatgattgctgcgagagcgatcttgacagcatctccgggaagataagggatgactccgatcataagggcagctttgaaagtaaggctcatatgtagtgcaagccatatcgttccgaatagataacaggcaatcatgccgagagtcatgccgatgattgaagcaaacgtttttttatgaaatctcagcataaaaaatccatggatgagtgcaaggaagatgaaaccgaacaaatatcccccggtcggtccggctagcttcccaagaccgccgctgaacgacgaaaagacaggaagtccgattgtaccgagagcaaggtaaatgagcagactgatcgttccgtatttcattccgagtatataaatagaaagaaaaaccgcaaagtttgtcagagtgatcggcacaggactaaatggaagcgggagggaaagaggtccgagaatgcatgttacagctgtcataagtccgatcattgtgattttttttgttttttctgcctgtgaggcagtgaggcgctggttcataagattactcctttacgtaaaatgtatggtttgataaaaaagaacgaaagcacataaaaactgttatgaaaaagaacacggttttattggtgtatccgagcgtagtataatagaaaatgaaacaaaagtcaacctaaaataaaaacaggtttacaattagaatctgacgttgaaaatactttataaaacattgtaaaggctatttatagttaatatcagcaagctgtgtaacagtacacagttataattcaccgtatttttataaacagcaggccgaatgcgtgttataatgcgataagaatgtgacggaaaatattgttttacaatgaaagcatgtcaaagcaagacaatgtagaaaatgaagaagtgtttgaggagaagagtgatgtttgggtatgtgacggtatgtgaaccggaattaaaggtgaaagatttaaaaaaatataaggcatattattgcggtttgtgtcatgtattaaaagaagagtatgggtttataggtcagatgacacttacatatgatatgacatttgcaattattttgttatcttcgctatatgaaagtgacacgagagcagatatgcattgctgcaaagtgcatccggtaaaaaagcagataatgttgacaaacgagattacgtcatatggtgcggccatgaacgtgttgatggcatattatcatatggaagatgattggcaggatgaaaggaaagtttcaagcctgactgtaaaaacgatgcttcgaggtaaagtaaaaaaaatcatggaacaatatccgaggcagagcagggcaatcgaatcggctctgaatgaattgtctgtttgcgaaagagaaggaagtacagatttggataaaacggcaggatgtttcgggaaactgatggaagagctgtttttatataaaaaagaccggtgggaagaaactcttcggaagatgggattttttatgggaaagtttatttatcttatggacgcatatgaagatctgccgaatgatctggaaaaaggatgctataacccgttgaagaagattgccgaagaagaaggatatgaagagcggatcaaacagatcttatgcatgatgatagcagagagtacggcagaatttgagaagcttccatgcctttcggatatagacattttgcggaatatattgtatgatggagtgtggaattgttataataagatacagagaaagaaaagtgaggaacagaaaaaatgataaataacccgtatgaagtgctcggcgtttctccaagcgcgtcagatgatgagataaaaaaagcatatcgtgatcttacaagaaagtatcatccggatgcgaatgttgataatcctcttgcagatcttgcagaagaaaagtttaaagaagtacaggaagcttatgatatgatcatgaaagagagagcttcgggcggcggatattcttatggttacgggtcgtcctcgggcagttcttcttatggtgcgggcggtaattatcagaacgcacagcaggatccgaggcttcaggcggctgtgaattatattaacagcagaagatttcgcgaagcgctcaacacgcttgatcagattaacgaacgatctgcaatctggtattatttaagcagctgtgcgaatgcgggacttggcaataatgttctggcaagagaccatgcggctcaggctgtgaatatggagccgaacaatatgcagtacagacagcttttgaatcagttgaattatgcgagcagccgttatcagaacagctcttatggcaatggatacagcagcggtactacaccgtgcggtacaggcaatatgtgttgtgatctgtttgttgcggattcgttgtgcgaatgtatgggaggcgacttgtgttcatgcatgtaaaggcaaaaacaatggcgtttagcggacttcttcttgcgctgactgtgatctttatggtgttgggcagtgtgatcgagacgagcacattatttctgctggcggcggcatctttttttgtcgggatcattatccgggagttcggacttaggataggagcggcattttatgcggcaggagtgatacttggatttattacagcgccgaataagttttatgtgtttacatttgcggcgatgggattatacatatgggggagagaagctgcatggagatggatcgtgcggcatgtgcgggaagaaaagagcaggacggcgtttcttctttttaaatacggaatctttaatcttgtatatatcccgatcgttgttattttcagagaaatgttatttgcaaaagcagtatcgaccccgattcttgtcggtgttatgatagccggacagataggaatacttatctatgataaggcatatgattatgttcaggttcgcctttggggaaagatgcgcggaagagtgatgtcataaagaacgatataaaaaggatgagccacatttctgcggctcatgggggaaaaagtttatgaaaaagtgttctcatctgagaacacttttagtatacacagaaaatgtgtaaaaaatgtgaggaacttttgaaccaaatatgaaaaaatttgaaccaaatatgaaaaaaacggataaagaggaatctttgacggagaaatcaaggcatcagaaagaaaaatgatattattacaatatttatatacatgaaaaagtgataaaagaaataaaaagatgataaagtaaattaaaaaagtgactacccataagaaaatttgtttttttggaggatttgtgcttgtgaaaatgtgaaaatagaggttaaaaagaaaacaaagtccttgaaaatagagaactatagatttataatgaatagagtaaatggaatacgatcttcggggtagggtgcaagtcccaaccggcggtatagtccgcgacccgcagcgatgcggtggaatcggtgactttcttaaacagaaagaattccgataccgacagtatagtctggatgagagaagatagtgccgcttattgctcaggaaagggcggtaagttacacaggtgcagtttatcccgaacatgatatatgttcgggatttttttataaaattgcagaaacgaaaaaaaggagaagaaaaaatggaagaggaaacaggaacggtaaaaatggtgatgagtaagaagaaaacagtgaaaatggtaaaaatgggagtgatggtagccatatcggtagcgatggtatatcttgttcattttccgatttttccggcagtgccgtttttagagtatgatccggcggatatttctattctgatcggaacatttgccttcggaccggaggctgggcttgttttgacagttgtgacggcggttgttcagggactgacagtgagtgcggggagcggactgtatgggatattgatgcatatgatcgctacgggtgttcttgtcctcgtatctggaatgatctacaacagaaaaaagacaaaggcaacggctgtttttggattgacggcgggaatggctgcaatggcagttgttatggtcggggcaaatttattgattactccgatgtttatgggagtatcaaaagatgtcgtatggaaattaatgccgtttattatcggcttcaatgtgataaaagcgggaataaacggggcggttacatttcttttgtataagcggatcgcaatgtttttgcgtaaatgatcaagtagatgaaagtcttatctgtatctttgttttgaaaagatgcggataggactgtttttttgcggcagaaaaagatgcagcaaaaaatgagaaagaaaaaagttgacaacttcttttctttgtagtacaatcccagtcgtaacatttttgtaatatctgtaataaatatgaaaacaacacatatattttaaaaggggattattaaaaatatattgtgaagatattgcaaatgtttacgaggaggagtatatgaattataataaaaaaagaatgattgtggcgctgcatcttacagtgtcaagtgttatgctgctttcgggatttacaagtcccgggacaaagatgaataccgccggagatctccgttatgcgggaggtgaaatagccgttcagatcggggattcagttgtggacggtacgattagtatgatcaaaggaacgaaacaggtttcgcaaagcgttcaaacggcaggagacgtatggaaaacagaggctgtccgtattgaagaaatgattcgggcagaggaagaaagagccgcagaagaagcaagaattgccgaagaacaagcagcacaggcagcggctttggaagcgacacagttggaagcggcgaatgttatggcaggggagcaggaacttcttgccgctcttatctattgcgaagcgggaaatcagccatatgaaggtcaggttgcagtcggagcagttgtaatgaatcgtgtgagaagcggttcttatccgaatacgatcagtgaagtgatctatcagtctgggcagttcggaccggcgatgacagggtggcttgattcggttctttcgtcgggaggctatacagagacagcgatgcaggcagcggcagacgctcttgcgggaagtaatccgattggcgattgcctttccttcggaaacggaaactggggaatccagatcggggatcatttttttcattaaatcatagatacgaaagaaggaaatagtgtggatattaagatcagacagtatgcggaagaggatgtaaaagaaacgattgccatctggaacgaagttgtaaaagaagggatcgcatttccacagaaagagactcttacagagtcgacaggagatctgttttttaaagagcagacatttacggggatcgcttatgacgaagagaaaaaagaaattgtcggaatgtacattttgcatccgaataatatcggaagatgcggtcacatatgtaatgcaagttatgctgtccgaaaagatatgcggggacttcatatcggggaaatgcttgtaaaacattgcatgaaaatgggaaaaaaattcggctttcgcattttacagtttaatgcggttgtgaaaagcaatgcaggagctttgaaactttatgaaaagcttggttttgtccgtttaggaacgattccaaaagggtttgaaatgaatgacggacattatgaagatattattccgcattatcatgaattataattaatgatatgtattgtaaggaggctgtaattctgacaagaatttaattgttagaattacagcctcctgttgtaacggcgacgagacaaagtccgggttttcctaaggctttgccagccgcttatgattttggaatgcttttttgcgcgttttgtgatttatacgctgtgaaagccttttccgatgatctcgcttgtgtttgagataaggatgaaagcttctttatcattttcacggataaagttgcgaagatgcacagcctgcattctgtttaaagcagtgaggatgatgtatttatcatttcctgaatacgctcccttggcgagacacacgctggcgcttcgtccgagcgtatgtacgatgtaatcacagatcggctcagggttatcgcatacgacgttaaaatatttcgacaggttaaagctttcgataaatgtgtcgatcatgaaagaacgaatagaaagtccgagcagggaaaacagtccggtttctatatcgaaaataaaaaatccggatgccgttatcaatgcatctgaaatcaataatgccttgccgatgtcgaagctggaatattttttcaggatcattgcgatgatatctgttccgccgctggaagaaccgatgttaaaaagaatcgccgatccaagcgccggaagagctatggcaaaacataattcaagcatcggttcatcggtaaaaggagagtgcataggaaagagccgttccagcaccgagagcgaaacggagagaaggatgctgcagtaggcggtagttgcggcgaattttttcccgaggatgaacattccgatgatgagcagaatcatgcttgcgataaagttaaagtcacctgccgaaatgagtccggttttagcgataagaacggcaagaccggtaattccgccaaaagtgaaattattcgtaaatttaaaaaagtatgttccgaatgcaataagaagcgtgctgaatgtaagcataaagaaatgttttaatttattcattttattttctccaaagtatgaaattaaaaactctactcgaattgtaatcttctaaaaataaaaagtcaacgcattaagtataaaaatgaggagataatgtattaataaaagaatagaaagaaagaaaataaataaggagacagtatatggataaagagatgttgattcgggatatatttgcaagggaaatattagattcacggggaaatcctacgattgaggctgaagttctcgcaggggaaaatatcgtcggcagagccgcagttccatccggcgcttcaacaggaaaatatgaggctgtggagcttcgggatcaggaagagcgttacggaggaaaaggagtggagcgggcagttgaaaatgtgaacagttgtctggcaaaagcggtgataggaatgaacgtgttcgatcaaaaggagatcgaccgtgctctttgtaaagcggacggaacagaaaataaaagcaacctcggtgcaaacgcgattttaggagtgtccatggcggcggcaagagcggcggcgaaaggactgaatattcctttatacagatatttgggaggggttcaggcgaagaagatgccggttccgatgatgaatattttaaatggcggagtacatgccgataacccgttagacatacaggagtttatgatcgttccggtaagagagacttcttttcgggagagacttcgtatttgtgcggaaatctatcatatgctaagagcggttctgaaaggaaaaggtcttcagacaggagttggggatgaaggcggatttgcgcctgaacttgcagatacgaaagaagcgcttcggacgataagggatgcggcagaaagggcaggataccgtatggggcgggatattatgatcgcgcttgatgtggcggcgtctgagctgtatattgaagaaaaaggcggatatattttcgcgggagaagggaaaaaaggagaacctgtcgtgcggacgacagaagagatgatctcttattatgaggaacttgttgaagaatttccgattttttcgatcgaagatccgcttgatgaagaagattgggacgggtggaaaaagcttacgaaaaagattggaaacagagtccagcttgtaggagatgatctttttgtcacaaatgcgcagagattgagaaaagggatcgaacttggagccgctaatgcgatactcataaaagttaatcagatcggtactttaagtgaaacgttcgagacgataaaaacagctcaggaagcaggttataatgtaattgtatcgcatcgttccggagaaacagaagatacgatcatcgctgatatcgccgtggcgtttaataccgggcagatcaaaacaggagcgccatgccggtctgagagagtggcaaaatacaacagactcttacggatcgaagaacagatcggtgagaaagaaaagatgtaggaacgatatgcagcgagcggcggaagaagcgtaagagacgtgtagtgagggctgtgcaggtgaagatacgggaatggttgcatatcttttcttcacctgttatacttttacgcggaagccatctggcaaaacgccgttttgatctgatattttattgggaggatgacgcaggctatggcgataaacaaagttggaaatgagtttgaaaagaacaagataagataaaaaaggagaaacggatgagtatggaaatcaatgaaatgcaagaaatgaatgaaagagcaaagaaagctttggaatatcataagaaaggatataattgctcacaagcagtggcatgttctttttgtgaggagtttggagtggatgaagaaacgatgtttcgtattgctgaaggttttggtttcggtatgggcatgatggacatatgcggtgcggttactggtatgtttatggtgatgggactggataatagcgttggaaatcctgacaacggaaaacttacaaaagcagatacatataagaaagtaaaagaatacgccaatcggtttaaagagaaaaacggaacatattactgccgtgaactcaaaagcgttgtggacggaaagcaaagagtaagctgcgaccaatgcattttagatgcggttgcgctgacggaaagctacctggcaaacagaggatagattttcagatccggtgaaccgttcctttcggaaaagtgatctgtaatatggtatattctttttcttcggatgcaatatctaattttagtcccagacgaaaggaaagttttcgggcgagatataaccctacgcctgttgagttcgatttgctccggtcagatccggtaaaccctttttcaaatactcttgacaggtcggaagaggagatgccgcagccgttgtccttgatcgaaaggataatatttgtgtcgttatcctgaccggttatcgtaagtttattttcttgtttgtcaaagtatttgatcgaattttgtatgatctgtgacagtatgaaagtcagccatttctcatctgtgtagacgatctggtcaatcgcatgagtttctattatgactttgtgatcgatcagatcatggcggaactttaaaatgacgttgtgtatgacttcttctaagttcagtttttttacaaaataatctttttctgtactttcgcttcgcgcataataaagcatctgttctgtaaggcgatagagtttgtcggtttcttttttcagcgcatagttttttgtgttgtcaaaagtcaaagataacgcgccgatcggaattttgatctcatgcgcgaagctttctacatattcttcgtattcttgtttttctttttcgatttgtgagattttgtcattcatagctttgcacgctttttttaacgcataatagtaggctttgttctgagggtcgcccggctttggcaaaatatctgagatataatagctctcttgaagctcatctgcaagattaataatgcgttgtgaatctttttgtttcttttgaaatgaaaaccatagaaaagagatttgcgccgaaagaaaaaggactgccgataaaataataaatgatgaatctacatcgtagaaaatcaagagaaatacaatgcctgaaagaaagaaaatttgaaataataattcggatattttcccttctaaaaatgtcaaaaagctcacaacttccacccctttcctcttatattttctaatagatgaataattccgatttctttcattttcttttttaaccgggtcatattaacaagcagtacgttttcatctaaataatatttatcgttccatagtttttctaatagctcttctttactgatgatcttatcttcgttcatgaaaaaataatataaaatgcgaaattcgttccttgtcagctcgatactttttccttcgtattttaatacggacaaatgaagatcgagagtgcagtctttttttgtaagttcccggaaattattcggatttgataattgaagtgcccgtttgattttctccaggagaataagtgtgtcatatggtttcgtgataaaatcgatccctcctgcctgaatacttagcagttcgtcggcgcttgtgtccctgcttgtcacaaaaataatcggtacagacatgagctttttcatcttcctgcatatttcatatccgttttcgtatggaagattaatatccagtaagatcagatcgaaagaatatttttttgattcctctgataaattctcgaaatctgttaataaaacagtttcatatccgtgcgagttcagtaatttggaaagttcgagacgggtgattttgtcatcttctataattgcaattttcattttccgtacctcttgatttgctttttgtaattgcggtgatccttttgcttagtattcctgatttattattataataaaattacggcgggagagccagaaaaatctaactctcctcattgatatttcgtttaaagccgatgtaagccgtgatccagtaaataccgtatatgaaaaagaaaatcgctaatccgcttataaaatagagcaggtaagtatatctgctttccagcatgatatgataaacattattcatagaagctaacatacaaaatccggcaatcacaggacaaatgacaggtacaaagaaaaagataagtaattgtctgcggatcgtccgaaaaatagaagaatcgtttacgccgagcctttgcagtgtcgtgtagcggtatttatattttgcagagtcgctcaacgattgtatcgcaagaattgtacctactgcagagatcaggatgaaagcaatatacaggcagaggcttgcgatcattgcagtcattgtattttgttcctcgacagcagtacctcttacattgactctgtaatattcgcggattgtctcgttgtcatcattttttgtgacgagcagatggtttaaatccgtttttattttttcttccaatttagatgttgtatcttctttcgtgtctgcgatcagatgcttttcgcttatttctaatccgctgacatatttgtcgggaacaattaccgtaaatctgcctgtattattcatagtataccaaaaggagtttgtatcgattccttttaaatgcagcttttgatctgcgaaccggatattttggatctcgttgttaccttccactttatataacaactggcggtcggtgacaaggaaatattcgtcgctttttagctcgatcggagttaagctgcgcatttttaataatttattatagtcgcttaatttcattaccggatcaaaattataaaattgaacatcgtagtaattttgtatttgatgggcaggatctttgtaaatattaaattcgattgattcgtttatcgtataatcttcatctatcacacgaagatattcgttaaaatcgtcaaaaggctgttcataatcgaaaatatcaacgtcgtaaggagctgttaattcaatacttctatgatagactcctttgcatatgcttgaataatttaaacataataaagaaagcaggatcagcatagaaagagttccgaacgtaaaactcattgtccgcgcctttgacgcaaacgttctggctgtaaaaaggtaatcttttttgtattttatttttttgcttttcaataaagcggacaataacatgtctgcgcatgtggcacaaatgccgtacatacttacgatcagtatcgacatactgataattaaataagtgagcgtttcctgtgctccgtttttttccagtgtccaccgggaagcccaaagggcaagagcggcaattccgagtatgatactcaatagaaataaaatgtttcgttttctgtttccgtgaaacattttcgtttcattttgcttttcaaagtaaagaaaatcgtgtacagtcattttccttattcgtcttaacagatttagaagaactaaaaggtagatcagcagaaagtaaacagccagcattccgatagacacaaagtttacaaagatgaagattgttttcggtattttgagcagttttacgatgattacagatataaactgactgaatacaaagccgatagggattgccaaaataaatgcaaagattcctactaatatattttccgttacaagcagacgggcgattgatgtttttttgataccgagcagcatatatgttccgaattctttgcttcttttttcaaacataaatttcgtcgtgtagttgattaaaaaacatactacaaatacgatgacgatatttacgaagatcaatacatttttaaatgtgctcattccggatgacagcgctgcaacctcatcagaacttgccacaagattaaacgcaagtattaaagaaaaagaaagtgttattgtaatcagatagatcaaataatctttgatacttctttttgcgtttcgataagccagtttacctaacatttcccaattcacctccgagcaaggtcaatatatccaatatttcattgaaaaattcttttctgcttttttctcctttgaatatttcgttgaataattttccgtcttttaaaaacaggatacgctcgcaaaaagaggcgctgaacggatcatgagttaccattaaaattgtcgtatgcattttccggttaatatcagacattgtttccagtaataatctcgatgaacgggaatctaaagcaccggtaggttcatcggctaagattagattcggttcgttgatcaatgctcttgcgcaggcacagcgctgcttctgaccgccggaaacttcgtaaggaaatttcgataaaatatcgcggatacctaatttgtcggcaatcgcatggacacgccgctcgatcgaagacgggttcgctttattgatgatgagcgagagagaaatattttcttctatagttaatgtgtctaaaaggttaaagtcctgaaagataaatcccagattctttcgtcggaatgaggcaaagtctttttctttgatttttgtaatatcctgatgattgacagtaatgtgtcctgcggttacggtgtcgatcgtggaaatacagtttagaagcgttgttttgcctgatccgcttgcacccatgatcgcagtaaattctcctttgtttacttccatggaaatgccgtctaccgctttcgtaatatttccggcagctccgccgtaatattttttgacttgttccagttttaatatatgttccataagaatactcctttcggcttctgtctgtttagattataacaatcaacggcgcgttatacacttacagttttgaaagtaagagatcagaaatactcacaaaatattcaaaaaaatggcattgaaaacttatcttgacgattgtataatagcaaagtgatagtttgaaaaacgtgagttgtcacgggaagggctatgcgaaaaatattcaaaaaggagagtgcagacaatgagtattcgagttggtattttgggatatggtaacttaggcagaggtgtagaatgtgcagtaaaacaaaatgatgatatggaacttgcggcagtatttacaagaagagatccttcaggcgtgacaattttgacagaaggagttccggtatgcagtgtggatgacgccgcagactggaaagataagatcgacgtattgattctttgcggaggaagcgcgacagatcttccgaaacagacgccggagtttgcaaagctgtttaatgtaattgacagttttgacacacatgcccgcattccggagcattttgcgaatgtggatgctgcggcgaaggagagtggaaaagtcggaattatttccgtaggctgggatccgggtatgttctctttaaacagattgtatgcaaacgcgatccttcctgacggaaaagattatacattctggggaaaaggagtaagccagggtcattcagatgcgatcagaagagtagaaggcgtaaaagacggaaaacagtatacgattccgtcagaagcagctcttgaggcagtgcgaaacggagaaaacccggaacttacgacacgtcagaaacatacaagagagtgttttgttgtccttgaagagggcgcggacgcggcaaaagtagaagcggagatcaaatcgatgccgaactattttgtcgattatgatacgacggttcattttataagtgaagaagaattaaaacgcgatcacagcggaatcccgcacggcggtttcgtacttagaagcggaaagacaggctgggacggagaaaacagccatttgatcgagtacagcttaaaattagactctaatcctgagtttacatcgtccgtgatcgttgcatatgcccgcgcagcttacagacttgctgcggaaggtcagagcggatgcaagacagtgttcgatatcgctccggcatatttaagcgcaaaaagcggagaagaattaagaaaagagatgctgtaaaaagcaatcgtctgaagtgccaaaaggcacatttcgcgattgtaaacagtcgctgaggtccggggttgcccggaccttagtttattgccgtcacaaaaaagagacatcgatgatcttactgtttctgatcgaatgaaaacagtgcgatcgatgaatgtctcttttaaaatgctattttttatcttttttacctttccaatcttttttaagttccaaacaaacgtcgacaaatataataattaaatccccgataaagaaaaatagaaaaattttatctattttattgtctatcaaagaaaatataataagagatataagtgatatgaatagggcgataagctgcttcttttctttttttattagctttttaatcataaattgtaccctcctttttctattaagaaactgatattattcaattccaatatagcaaaaacgtgatttttaccattgaaaataaggaagttaaataacttttttgaagttatatgaattcggatacgattataataattgttcaaatgtatcataaaaagtaggatacgatacgtccacacatttactgtcaaggattttcgttgttccgtcagcgacaagagccgcgatgctgaacgccattgcaatcctgtgatcgagaagggtgtggatcgaagcgccgtgaagtgttccgcctgtgatgatcattccgtcttctgtgggggtgacgttacatcccatcgcttttaaattatctgtcacagtttcgatgcggtcagtttcttttactttcagttcagcggcgtctttgatgacagttgttccgtctgcgacggcagccatgactgcgatgatcggaatttcgtcgatcaatgtcgggataatatcgccttcgatcgtaattccgtgcagactgctcgtgcggacgaggatgtcggcaattttttcgccggcctcacatcgttcgttaagaagtgtgatatcgccgcccatatcttcgcatactttcaaaataccggatctggtcgggttgatccccacatgttcgatcaatatttccgaatcgggaacgatcagtcctgctgcgataaaatatgccgcagaagaaatatctcccggaacaacgattttttgaccgtatagttttgggtacggtttaatatatgcggttgcttctgttcctgacagcgagtgaagagtccgtatgtcagcgccgaattctttcagcatcagttcagtgtggttcctggaaagcgacggttctgtaaccgaagtttctccttctgcgtacaatccggcaagcaggatacatgatttcacctgtgcggaagagacgggggaatcgtagtggattccgtgcagatttcccggagcgatgtacagcggagcgcatccgtttctgagaatacttgaaatatttgcgcccatcattgtaagcggttcgatgatccgtttcatagggcgggagtttaaagactcgtctcccgaaagttttgattcaaacttctgtcccgcgagaatgccagacaaaaggcgggttgtagtgccgctgtttccgacgtcgaggatatttaagggagcggatagtccgtgtaatcctttcccgtggaccgtgatcgtatgatctgtttcttctatattaatgcccatagactgaaagcagcggatcgtggcaagacagtccgcgcctttcagaaaattgtggatttccgtcgttccgtttgcaatcgatccgaacatgatgcatcggtgggaaattgatttatctccgggaacggaaactgttccctttaatccttgaataccggctaattccattgctttttcctcctgtttaaattattgtttctttcttagacttcgtatacgatatatcggtattttttcagcagcgcagaagctttggaagaggaggattcatcataaaattcgattcggagtacgccttcttcaaattcgcggttgtggataatgccgatatttttaatactgatattattgcttgccaatatagttgcgatcgtcgcgattcctccggtttcatcaataatatcacagtatacggcaaactgttttttgatcggccctgccgaggtgttaggcatagaattacgataatcgcgggaagattcaaataaagtataaagcgcattttcatcttccgtatctatagaaagtttagcttgtatgagtgcttcgatatactgtcctaaaatatgcgagatattttttccgtttttcagacagatttgctgccacataaccggggacgaggatgcgatcctcgtaatgtctttgaaaccgccggcggcaagcgctttcatcagttcttctttcgtatcggtatcccggacgaagtttacaagtgtagaagcaatgatgtgaggcagatggctgatcgttccggttatgcagtcgtgctgcctgtagtcgaggacaataggcagcgcttttaaagaagaaacaaagttccggtaagcattgattttttcttcggatactttagctgaaggggtgagaatatagtaagcgttctcgatcaaatgagcttttgagttggcgaatccgtttttctccgaacctgccatcggatgaccgcctataaaattttcttccataccaagcgagattatttcttcgtggattgaagttttaacgcttcctacatctgttaaaatacagtctggatcgatcagagattttagctgggtaaggcaggcggtgttgtatgaaacgggggcgcataagaaaatatagctgcagcctttaaaattgtcatcgatcgcagaacaggaagtgtcgatgatgttttcctggactgcgagagcgagagtttctttatttttatcgaatgcaatcagctcataatcggggaagtatgtgcggatcgcctttgcgacagaaccgccgataagtccgagcccgataaagccgatttttgcaggagtgatgtctgaaaacataaaagtaaaatcctttccttattataatatagaggtattttaacacgctgacttgtaaaagtaaacaaagtaatggtaatagttaagccgatccggttcgtaaaaccgcaccgtatgcttatcgtgtatgacgacactgttttcctcagaaacaggaagagaactgcaatgttgaactgcacaagaaatatgtgaaaaatatataaaatagttgtaatttataaaaaaatttagtacaatatacctatgatgtgcatggcgagaggaaagaaatacatgcaaaataactacatatcaaggaggcggaagcatgaaagtttacagaacagacgaaattagaaatgtggtattgctcggacacggcggaagcggaaagacgagtcttgttgaagcgatgctgtatgtatcaggcgttacgaaccgaatggggaaagtgacagaatctaacacggtcagtgattttgataaagaagaacagaaacgtggtttttcgatcagcacaagtcttgttccgatcgaatgggaaaaggcgaagatcaacattcttgatacaccgggatattttgattttgtgggagaagtggaagaagcggtaagcgcggcggacgcagcggtcatcgttgtttccggcaaagcgggagttcaggtaggcacggagaaagcctgggagctgtgtgataagtataaccttccgcgaatgatctatgtgacagagatggacgttgacgatgcaagtttccgtcaggtagtagaagatctgactacccgttacggcaaaaagatcgcgccgcatttccagccgatccgcgagaacgaaaaacttgtcggatatatcaatgttattaaaaatgcaggaagaagatatacggagatcgggcaaagagaagagtgcgagattcctgattactgtaaaccgaatcttgagattttgagagactctcttatggaagctgtcgcagagacaagtgaagagtttatggagcgttatttcaacggcgaagaattttcggtagaagagatacgctctgcaatgcgtacggaagtgatggacggagatatcgttcctgtcgctatgggatcaaacgtgcaggcgcaaggcgttgcgaatctgctttctgacattgtaagattcttcccgagtccggataaaagaaaatgcgcaggtattaatcgcagaacaaacgagatttttgaaggcaattatgaattctcaaaagcaaagaccgcatatgtatttaagacgatggtcgatccgttcattggaaaatattcattcgtaaaagtatgctccggagtgttgaaaggcgatgatattttatataatgcagacgcagacgcagaagagaaacccggaaagatttacacaatgtgcggaaataaaccggcggaagtttccgaactgtttgcaggagatatcggggctatcgcaaaactcggcagtacacgcacgggcgatacgctttctacaaaggcaaatccggtatcttatgcgaaaacagattattctgttccttacacatatatgaagtatacggtgaaaacaaagggcgatgaagataaggtttcacaggcgcttgcaaaaatgacggcagaggatgttactctgaagtcggtaaatgacagtgagaaccgtcagacgcttctctatggaatgggagatcagcatctcgagatcgcagcaagcaaacttgcggcgagatataaagtggagatcacgcttgagacaccgaaagttgcattccgcgaaacgatccgcaaaaattcggatgtagatatgaaatataagaaacagaccggcggccacggacagtacggacacgttaagatgaaatttgaaccgtctcacgatcttgatacaccgtatgtatttgaagagtgcgtagtcggcggagcagttccgaaaaactatttcccggctgtagaaaaaggattgcaggaatcggttcttaaagggcctcttgccggatatccggtggtcggtgtaaaagcgactttgtatgacggatcttatcatccggtagattcttcggaaatggcgttcaaaacagctacaacccaggcgtttaagaaaggatttcttgaggcatctccggtacttcttgagccgatcgcttctttgaaagtgactgttccggacgattatacgggagatgtgatgggagatctgaataagagacgcggacgagtgcttggcatgactccgatcgcaggtggaaagcaagtgatcgaagcggacattccgatgacaggattgttcgggtattgtacggtgcttcgctccatgacaggcggaagaggaacatacgcatatgaatttgcaagatatgagcaggctccgtctgatgtacaggagaaagagatcgcagcaagagcggaagagtaaaacagaaaaaaaagaacagaaaagaacggtatgctcagtttgcggaccggcaggtatttctgttataaaaaggatcaaataccgcgcatcttttatggtgtgcggtattctgcttttcttatgacggcggttcgttaagaatttgcaaagatcattgtactttatgtgtaaaggtgctataattgctctactgtcaagaaatacagacataaaatttaaaattataaaatgatatttaagagaatcagttagagggaaagagaatgaagattgtgattataggtgatgggaaagtcggatataaactggcccgtcagctttcggcggatgattatgacattgtgatgatcgacagtaacgagagaaaacttcggtttgctatcgacagacttgatattttctgcgtccacggaaacggggtggatgccgacgtgcaaaaagcggcggatgtgccgcatgcagatctggtgatcgcatgtacatcggcagatgaatgtaatatgttgagctgtcttattgcaagaaagctcggagctcgtcatacgatcgcccgcgtgcgtaatccgatttattttaaacagatcggtcttttaaaagaagagcttcatcttagtatggcggtgaatccggaattgatcgtggcgaatgatatcagtcgtctgcttctgtttccggttgcgagtaagattgagacgtttgtaaaaggaagagttgaattgatagagtttactgtttcggaggacaatcgtcttgtaggaatgtctcttgcggcaatctataaaaagtttcagatcaaaatccttgtttgcgcggtagaacatgagggaaaagtatttataccggatggggaatatgtacttcaggcaggggataaacttcatattaccggtgcgcatgaggcgatggaagcgtttttcaaaatgcatggaaaacgtcagcttcagacaaagatcaagaaagttcttatttgcggaggaggccggggggcctattatctggcggcgagactttgtaagatcggaatgcatgtaaagatcatcgaaaaagacgaaaatcggtgtgaagaattatgcgattgtcttccgaaagtaacagtgatccacggagatgcgacagatcatgatcttttaagtgaagaaggcgtggagaatgtagatgcatttgttgcgctgacaggaatcgatgaagaaaacattattctttcgctttatgcgaaaagccagggcgcgggaaagattattgccaaagtgaatgaagacagaagggcgagaatggtagcggatttcggtatcgacagtatcgtttcggcgaaaacggcaacggcagatgcgattttaagttacgtcagagcgagaaagaactcccaaaagagcgcaaatgtagagacgatgtaccaacttgtggacgaaaaagtagaagcattggagttcattgtgaaaaatgaaacgaattatacaggtataacgttgaaagatttgaaagtgaaaccgaataatctgatcgcatgtatcgtaagaaagcgtcagattatcataccgaatggaaatgacagcatagaggcaggagacagcgtgattgttgttacgatggaaaaacatctggaagatctttcggatattatagcgcaggtacagtaagatgaataaaaagatgatagtgtatatactggggaaaatgcttggtacggaagggcttttgcttcttataccggcggtggtgtctctcctttacaaagaaaaaacgggagtttattttcttgtagtggcggcggtattatttgctctttatcttggattgggaaggaaaaagccggagaacaaacagatctacgggaaggaaggctttgtgatcgtcggacttgcgtggattttatggtcgttgttcggagcgcttccgttctttttgtcggattgtattccgaattatattgatgcggtttttgaaacggtttccggttttacgacgaccggatctactattttgcagaatatagaggctcttccgaaaggaatgaatttctggcggtgctttacacattggatcggcggaatgggagtgctcgtttttgtgatgatgatcacttctcttgatacggataattctatgtcgcttatgcgggccgaagtgccgggaccggagatggataaactcgttccgaaagttcgtcatacggcaaaactgttgtatcagatgtattttgttctgacgatcgcggaagtgatcttccttatgtttggcggaatgaatttgtatgatgctgtcgttcattcgttcagtacggcgggaacaggaggattctccaacagaaatgcgagcgttgcattttatgacagcgcatatattgacggcgtgatcaccgtgtttatgatcttgttcggaatcaactttaatctctactttctgctgttgcttaaagactggaagagcgtgttgaaaaatgaagagcttagagtgtatctcggagtagttgccgcggcgatcgtaacgattacgatcaatatattgagtatgtatgaaacagtggcgcacgcgtttcgctatgcctcgttccaggtaggggcgatcattacgacaacgggattttatacggccgattttgaacagtggcccgagttatctaaaacgatactgatgatgcttatggtgatcggagcatgcgggggatcaacgggaggcggtattaaagtaagtcgttttatgatcctttgcaaatcgatccgtcaggaaattcataagatgcttcatccgaatgcggtgacgatggttaggatgaacggaaagaaagtaggcgcagatacgatgcgcagcattaatatttatttttcggcatatgtatttatcattattgtgtcagtgctgcttgtttcgcttgataattttgattttgccacatcattcagcggagttttgacaacaataaacaacgtaggaccgggaatttcacaagtaggccctaccgataatttccatgcgttttctgcgctgtcgaagattgtgtttagttttgatatgctattcggaagattggaaatattcccttatcttctgatactgtcacctgatctttggcgaaagaggttttagagagaagctttaaaatgggattccagaaaggtaagaaaagtatatgaaaaaaataggtggaaagatagcggttgtactggcggtgatcgcgttgcttggtgtttactattacgtagctcttcctgcagttaacattcatgcgacagaattttggatcttccttgtgattcttgttgttttggcagcgctgatctatgtcaggaagaaaaagttaaacagatacgagatgaaggaatcgaaaggattaaaagcgattcttacggttcttgtagtgatcgtagcggtatatctgttgggatctcttctttcctctccgatagtgaacgcaaagaaatatcaaaagcttatgaaagtggagaccggagagtttacaaaggatatagaggaactttcttttgatcagattccgcttcttgaccgtgattctgcgacgcttctgggtaacagaaagatgggaagtatggttgatatggtttctcagtttgaagtggatgagctctattcacagatcaattaccaggatcgtcctgtacgtgtttctccgctgaaatacgcaagcgtcatcaaatggtttacgaatcagtcagatggaataccggcgtatatcaagattgatatggcaacacagaatacggagcttgtgaaacttgaaaaagggatgaaatatacgacaagcgatcattttaacagaaatatttatcgtcatttgagatttaagtatccgacatatatttttaatgatttaagctttgaagtagacgaagaaggtacgccgtattgggtttgccctgtgaaaaaatataatatcggtcttttcggcggtgtgacagtggatcgggttgtgctttgcaacgcagttaccggagaaacggtagattataaagtcaaagacgttccgcagtgggtagatcgcgtatattcggcagatcttcttgttcaattatacgattattacggaacattgaagcatggatattttaacagcgtgctcggacagaaagactgtcttgccacaacggacggatataattatctggcgatcaacgatgatgtatgggtttatacaggagttacttcgatcacaggcgatcagtcgaatgtcgggtttgttctgatgaatcagcgtacgatggaaactaaattttacgaagttgaaggtgcgacagaggcgtctgcgatgtcttctgcagaaggacaggtacagaacttgaaatatgttgcgacgtttcctttactgttaaatatttcaggagaaccgacatattttattgcacttaaagatgatgcgggacttgtgaaaaagtatgcgatggtaaatgttcagaaatatcagatcgttgcgatcggcgatactgtaagcgagtgtgaaagcgtttatacagatttaatgtatgaaaacggtattaaagaagaagaggaagacgtaagggaagtacagacgattacggctccgattacgaaaattgctcagggagtagtggaaggaaactcacattactatattatggtggaaggatctgacgatatatttgatgtgtcggttgttgattttattgacattatccgctataacgtgggagatcaggtgacgatagaatataaagaaggcgaaaagagcaatacggttctgtcgcttaccgaagtgaaaacaatacaataaaagaattaaaaaacggttcacagtcaatagcgctgtgaaccgttttgctgtacaggtgactgtcgataaaatatagatgcagcagttagctgacaactgtacaatcagatgaatcgattccgggaatatcttttttatccgcgctgatgctgagataaaaatcaatattgttttctgttgaaatcttgtttaatttgtgaaggaaagcggcaagactttcaagagtgatgttagcctgttttaaaacactgtcaataaagactgcttcgatatcatggtttccggctgccataccgtaaaggaaacctacgaattcttcgagcgttagaacgtccggataatcagccatgcggattacacggatattgaagtcaaccgtgtaagtatctttatggctttttttgataaatactacattaccgttagatgtttttactttttcgttagcaagatcgatcatctgctgagtttttccgctgcctctcgggcctgttactaaatataccatggcgaatctctcctttatgtaagtattgtttgagaatatcacctctcaaatgtgttaaacttattatacactaattctatgtgtgaaacaactaaaaaaaggataaaaaaataaaaaaaattaaacaatattactataaagaagagcgttgaaaaagacgaaatgagaatagatatcaaaataattgcaatatgcagaaacgtatgatatgatccgatatatgaattatgaatatatgtgtcagagttttgggcatatgcataggataaagtatcggtgtaattctatattacagtcggcggtggatatggtgaagaagattgtccgcggcagtataaaaatcggaggaatagagatgaacagtaatattttattaggaataatgattccgtttatcggaacgacacttggttcggcaatggtattttttatgaaaaaggaaatgaatgtccgcctgcagaaaatgcttctcggatttgcgtcgggagtaatgatcgcggcgtcggtctggtcgcttcttattccggccattgacatgtcagagcaggcgggaggaatttcatggatgcctccggcagtcggctttttatttggaatgggttttcttcttgttttggatacattgatcccacacctccactttacggaagagaagccggaaggagttccgtctcagttaaaaaaaacgacgatgcttgtccttgcggtaacgcttcataacattccggaagggatggcggtcggagtgacgtttgcgggagtaatgacagaaaattcggtaatctctcttgccggcgcgctggcgctttcgattgggattgcaattcaaaactttccggaaggggcaattatatccatgcctctgcaaagtcatggattgtcaaaaggaaaggcatttttatacggggcaatgtccggcattgtagaaccgattgcggcggtgatcaccatttttctgaccggaatcgccgtgcctctccttccttatcttttgtcttttgcggcaggagccatgatctatgtcgttgtagaagaactcattcccgaatctcaggccggagaacattccaatatcggaacgatcggagtggcggcaggctttgttctgatgatgatacttgatgtggcgcttggataagcgaaaacttaaggaagttgggttaaaggcttgatctgataacccatttctttccattttgtcagtaattcatctaagatgtcggcgtttgtttttgatgtgctgtggagcaggacgatcgcgcctgggtggatgcgtttgagcagtttatcaaacgcttctgcttttgtaggctgatctgtatcgtaccagtcgacataggcaagactccagaaaaaagttttgtatccgagatcttgagccatttttaagttttctttgctgtattttccttgcggaggacgatagaaacgaaccatatcttttccggtggtttctttatatattttctctacatccgttaattctttttgaaatgattcaagagttgacatttgcgacatatcaggatgatgccatgtatggtttcctacgatgtgtccgtccttgcacatcctcttgacgagttcgggatttgactcgatatatgttccgacaacgaaaaaagcagcggatacgtcatgcttttttaatacgtctaaaattttttctgtgtttccgttttcgtatcctgcatcaaatgtaagatagagtattttttcatctgtatcttgcatataataagcgtcatactgtgcaagttcatctgtggaagcattagctgtcggcggtgtgttttcttcatgaaaacttaatccccagtttccttcggcagcggcagaggtgaggcttccggctccggctccgatcacataggatgagagaaaaagagcgggaagtaagaaaaaagtttttttagatatgtttgaaaacatagtagataaacctcttaagttttgtcatatttatatgaaaaggcagggaaaagtatgaacaaaacagaggtagacatttcgagaaaaggggagtaaaataaggcaaatattattgtgcgaggtgatgagaatgaaaatttttgtatataattacagagagtttgacgaggcggaatattttgaaaaattttcaaaagagtatcatgtggagcttggtatctgcaaagaggcgccatcgcttgaaaatgcatatcttgtaaaagggtatgaatatgtaagcattatcacaacgaagatcgaccgacctcttttggaaaagttccgtgagttcggggtgaagatgatatcgacaaggacagtcggatacgatcacattgacctggaggcggcgcggcagctcggaatacgcgtgagcaacgtatcctattcgccggaatgtgtggcggattatacgatgatgcttattttgatgtcgatccgaaaaatgaaacggatcatgcagagggcggagatcaatgatttttcattgccggggattcaaggacgtgagcttcctaattttacaataggagttctcggtacggggaggatcggacaagcggtgatccgggatctgcacggtttcgggtgtaagatttatgcgtacgataaatatgagaatgaagcggtaaaacagttcgcggagtatgcggatctttcggtgatttatgaaaagtgtgatctgattactttgcatatgccgctttcggaagataatttccatattatcgatgcgtctgcgatgaaaaatatgaaagacggtgtcgttattatcaatacagcgaggggaagtctgatcgacacaaaggcattgatcgaagctttggaatccgggaaagtcggcgcagccggtctggatgtgatcgaagatgaacttggaatgtattattacaacaggaaatcagatatattgtccaaaagagatctgtatgttctgcgtggtttcccgaatgtgatcgtcacgccgcatatggcgttttataccgatcaggctgtgagcgatatggtaaaacattcgatagaaagctgtattctccgtgaagccggaaagaaagacccgtgggaggttgtttaagaaaaggggattcagatgatctgcgtgaaagaacttgtgaaaaattttgatgatgtatgtgcggtcaataatattactttaaatattccggaaggagagatgctcggcctgctcggaacgaacggagcggggaagacaacgctccttcgtatgattgcgggagtgctggaagccgatggcggcagcattgtcgttgacggtgcaaatatcacatccggagacgtatctgaagagattttttatttgccggatgatccttatttttttccgaacgcctctatggaagaaatgattttgttttataagaaatattatcctcgcatggatgctgaggcggcggcttatatggcggggaaattgaatctggaaacgaagcgcccacttcgtacattttcaaaaggtatgaaacgtcaggcatttcttatccttgccctttgtgccggaacaaaataccttctctgtgatgaagtgttcgacggtcttgatccgatcgtgacggaagtgatgaaaaacctgtttcgtcaggaaatgaaagaacggaagtttacggtggtagtggcatctcataaacttcgggaacttgaggatatatgccacagtatcgcgatccttcataaaggaggagtcctgacctcgaaagatatgaggcatcaggccggaaatatatgcaaatatcagtgtgtattttcggaacagaccgatcttgaagaagtaaaaaaggcggtcgatcttattcgttttcatgcggatggatattttgtgacgcttatcgttcgtatgcagccggaaacaatggcccggctgaacagtttttcgcctgtgtttatgaaagaagtgccgatgacgttagaagagatttttattgccgaaatggagggaaaagagtatgacatccgtaaagtgcttcggtagttggctgaaagaagccggaagaggacaccttaccgcgttgtttggatggacaacattttttatatatactgtccttcttgtaatgcgtttaagtcttgatacttcctatacgtttttcgggattggaaatacagttctgctttggctgagtatgggactgggcgtcctgttttcttttctggagttcttttatttgctgcagcagaagaaacaggatttttattacagtcttccggtgaaaaaaggaatgatcttttggtctagatatacgcatggggtgatccatttctttcttccgtttttgctcatgatttccgtatgtggaatatggcaggcgatggtcgatccggaatttgctccttttgtcggaagttataccgcgaaaagtattcttgcgtttggatttgcttttttaatcttctatcatatagggattttatgtgtttcggtatgcggcaattttatatgtgcagtctcactctgtgtttcgatcattgcgtattcttctttatttattgaaaatgtcatcaaagtgtttgcaaaacattattttgttacttattacaaaattgaattgcttgaaaaactaaataatatactatctccgtttggattggcaaaacggctggcgggacttggaatatatgagaagaggatagctctgcagtatccgcttccggcgccttacataatcgctgctgttgtatgggcggctgttctgttcgttttgttttctgctgctcagaagaaaagaaaaccggaatatgtaggaacaccgtttatgtttcgcaatgtgcaaagactgacagaaatattgctttccgttttggcaggagcgtggtttgcggcatttgcagcggaattgacgaaaacagacagtttacttttcgggtttgtggaagcgctgtgtggggcggcggcagctttttttgtacagtacctgatagaactggctgtgaagaagcagggggttagtcttctgcggaggaaggggcagtttgcggcagtaagtattgccgccgcctgtataggccctgctatgatgtttggcgcacgtttttatgacggatattttccgaaagaagcggaagcggtaagcgttgtgatcgagggagtgggaatgagccgcgatgaatatgaaatgctcgacggacaggaaaatacggtgacagaaaagtatttatatcgcttccgtatgacgggagaaggtaaaaaaatgacgcttcaatgggcaaaagatttggcggttgctgtgaacggcagagatgcggaagaacaaaaatcggtgacgaaagcgactgtttgttatgaaacagaaggcgggagcagacattatcggacttatccggtgacagaagaaagtctgcgcaagttttcctccgtttatgaaacaaaagagtataagacgcttgcttatgaaggagtttcgcttgaggaagtgggacaagataagtttagttggaaagacggcgttttctcgcagactatgaaaatagaagctgaggaaaaagaggagcttttaaagcggtacaaagaagacgtgttccgatttcagatggagcagcttacgaaagcctgtccatgcggaattcttgaaatctcgtctccggcagacggagaagaaaccgagcttatcgtatatccgttttttgaaaaaacatgcgatttccttgaaagccgggggattgatccggaaaaacagataaaagactatcctgttgaatctgtagaaataaagaaaacttctgcggttttgccgaatgtaagcggcggaagttatgtgcatttttatgaagaacctgaggaagtagatcaatggaaagaaaagctgatcccgaaagcatttgatgtgcagcagattctctatccgacagatcacacccaaaacgcagaggcggtagtgacagatgaggagacggcttcttatgtgagagtgaagtgtatattgaaataataaagtgatggataatagaaagaagaattttgtctatatgacagagttcttctttttttttatttggaagatgttatactgtggcgaaatgacaggagggaaaagtatgaataaaaagggttgtaacttaaagaaaatattgataggtgtttctgtgggggttatgattctggcctctgtagttggcgtttatctgtatgtgaacaggtttgatgcatcaaagtatgtgcaggctgtgcttgatgtgtcttataaaaataagacaaccttgtatcaggaagtggcagatgtgtctgaaaaggaggcaaaagcagtatttgaaaagaatctggatgcgacgatgcaggggtttgatgcatctgatatgccggattcgttaaaaggaaaatacagagaactcttcggtgaaattgcaaaaaaagtaaattatacagtaggggaggcgcaaaaggaaaaagacggaacatatatcgtttcggtgaaagtaaaaccgatcacactttttactgatacatatgatctgtttttgagtcgtgcagagcagtatgcgaaagaagttacagatcatgtgacgaaaggcgcgcagatgcctacggatgaagaaatgcaggaaaagatttatcagatttattatgaggtgctaaaagaacaggcagaggtgggaatgctttatggaagagcggaagatgttgtactgcatatagaaaaagaagggcgcgggaattacggaatccgtcagaaagacatgaaaaaactggatggacttctgattgaagaagtccatccgattgagtgagatctgcttaagcgggatttgatcagaggaatttgattttgttgagaggccagtaccgtaggaaagcttttccgacgatttcatcatccgtaacaaaagtatgttcccagtagcgggagtcttttgagttgtttcggttatcccccatgacgaaataacagttgtcaggtacagtataaggaccgaaagaaccttgcataaattcttttgtcgttacatctttaagaggggttttcgagccgtcgatgaagatctgtccgtcatggatttccactgtttcaccgggaagtccgatgatgcgtttaataaaaagctgcttttcgtcatccgggtatcggaagataatgatatcgaaccgtttcggttcgccgaatatataagcaagccggtttccgaaaacacggtctccggtcatgatcgtattctccatagaaccggaaggaatttccgcatttacaaggacaaaacggttgacgcaaagggcaatgataactgcgattgcgagtgtcagtatccagtggaagagttcgtttttgtcggaaggttcttgttccggttcgagtgattcttgtttttggtcaaaacattgatttgccatagtgtattcctgctttccgtaaattttatgtacttcaataataacgagtgtatgaaaaatttgcaagatgcagtattgtcatgatctgattttgcagaaaagaatcttctgtgatacaatgatttttcataaataagatttcgtataaacgaagaagaacagccggcagataaaacaggtattgcaaaaaatatatctgatcgggaaaaatgggagtatcaaagatggcaaagagaaaaaaagggattattattacgagtacatgtgcgctgttagcaggagcggcagtcattgccgaactggcgcttggcggcggtacaggcggtaacggggttggcaggcagcagggatggcagaatcttcagaaagaaatttttgattctgcatatagtgaagaaagttatgattctgctgttgaagtgccggaatatgaaggagaaccatacgtgatattggacggaaacgagccggcgtttacagaggacgagatgacgacgacagtttatgagcagtacagtcctttggacagctacgggagatgtcagacggcagaagcgtgcgtgggagaagaactgatgcctgatgaaaagcgcggtgatatcagcagtgtaaagccgacgggatggcagtctgttcggtatgaaaatgtggagggaggatcgctgtataatcgctgccatttgatcgcgtatcagttgtccggagaaaatgcaaatgaagaaaatctgattaccggaacacggtatatgaatacagagggaatgctcccttttgaaaatcttgtggcagaatatgtgcatgaaacagataatcatgtgatgtatcgtgtaacgcctatatttgaaaatgaaaatcttgttgcttcaggagtacagatggaagcggaatctgtagaagatggcggaaagggaatcaagtttaatgtttatgtgtacaatatacagccggatattatcattgactataaaacaggagataacagagcagaagatgacgatgaaaaagaggcggcggggacatccggcgccggaaaagtgtctgtagagagcgagtatattttaaatacgagtacacataaattccacaggccggattgtgcgggggtgaaagatatgaaagagaaaaacaagaaaccatataaaggaaaaagatctaagctgcttgaggatgggtacagcccctgtaaaagctgtaatccctgaaaggttacacttttgaaatgttaaggcgggaagttggatcggcttgcgaggaaatacgcagagccggtcaatacttcccgtttctttttaatgtctcttccaggtattcataattctcggtaagaaaatcaatcgttatcagttttttaccgctggcgtataaaagtagttggttctttttcccgatttccacacgttcaatttcacttatctgtaaaactatacttttccgaaataaacgttgtatctccatctgatttccgtttaccgcgatcttccatttgcttgcccggattatgccaagaagaccgattgccattacccccaaacacatccataggtgtccgtttgttacagttggattattctgtagtttaaatacaaaaaagatgcaaaacatgcataatcctaaaatgaagaaagccatgcatgtatattttaatgctccggggattttaagcacataatggaattcattccggccggcattgtcagtgatactttttcggttatataaagaattgatcacgagctctatggcgcacatagaaatagcatatataagaaattttattatctctcccatcccatgttcctccttgctaagcgctgttcgctgtttttttatctattgtttgtctttgctttaaattagatttgatttatcgaaaacgaatgatttaatatcattgcattgaatctaagcactgtgtcaataaatagtttgatttttctttttatttcattccttataggaattttccggaaaatgaaaaatgccggataccttgaaaaaatcaaggcttccggcgtttctgaaagcaggggatgagagaatcgaactcccaccaaaggttttggagacccctatcataccatttgaccaatcccctatgtatgtttgacttcttatcgcaagtcacttgtatataatacctattcatatcggatttgtcaagaaaaatatagttattttttgaaaaaatttgaaaagtttcgataaaaacggaacataacttaaatggatttcaggagaggtcatgaaacaggcgttttgagatagaatggttaattgttgtaaataaagtcggaatttactgaaaatatattgaagaagcagaaaaagcatcgtattattaaagaaaaaacacttaatgcatgacgattatgtatggtgggaaaggagagtaagatgaaaaacaaatttattaggaaatggctggttattttaactgtggcggctatgatgatcccggctggaattccggcaaatgcagaaacagtggaagaaggcgaaaatatcgcgccgacagcgggaatatcagcagaaacgccgaatgtgacagcagaaacacaaaaggaagaaatatcagcagaaatgccggatatgacggcagaaacacagaatgaagaaaaatcggatgtgcaggcagaaggacaaaatcaggcaaaacagggtgttttggaagcggtacggcagaatacagaaaaagccgaagaagcttcagatgcagtcgatgtacaggcggaggaaaggacggcaggggaagttcagatcggagagcagatatatccgactcttaccgaagcatttgcagcggcaaaagacggggacgtactgcggcttttagaaaatgcagaagtttcacaaccgatcttgctgacaaagaatgtgacgttagatacaaatggatttactgtatcggcggcagcaggattcaaaggcaattttatgtttacgaatcggggaacattcaatattgtcggaagcggaaagattgacggcagtgtgggaacgtacccgctgatcatgatcaataataccggcggcgcggttttaaatatccaaagcagtgagatcaccggtcagggagttgtgcagaatgtaggcggaatcgtgaacatcacaggcggtacgttgacggcatcagcaagaaatacggttctttcacagttcggcgaagtgcatataggcgcatcggcccatcttatggcagcaggagaagggaaatctgcggttcagttgatcggagcaaagatgactctttcgggggatgcggtgctgtcaggaaacggcgggatcgatgtgtttaacagcaacagaaacgaagaaggtactgtatcggcgcaagtagagattacaggcggtaggatcgagacaaaagattttccggtttcgggaaacaatcaggagtcggcaggagcggaagttgcgatcacaggcggaagcctgaaaaatatatcgggcggaacagctatttactggccgatggaaggacaacttacgatcggcggcaatgcggtgatcgaaggaggaaccgggatcgaagcaaaaatgggaacaattacgatcaaggataatgcggtcatcacaggaagcggcgaatggaaagaagaaaagccgcaaaacggtggggcaaatcctgaaggttcagcgtttcttggatcggcgcagatgtacgacggctgcatcaatgattcttctcttgtcgttaatattctcggtggaacgcttaaaagcgtaaacggtaatgcggtcacgatctataatacagaagaaaaatcagatgtgagagcagatatttctgtgacaggcggatctttgcagccggcagcaggaaaaggtgcggtcaaagtaattacaagcggagataatacgacccgttttgatccggataaaaagactcttgacacaatgaaatccaatactaccgtaaaagttgcaaaggatgtagctgctgcggcaacggacagagacggaaagacaacatattataatacagtagaagaagcgcttggatcgaatacggaagacggaaatattcacatatatattaacgaaaactcttctgtaaaacaggaagctttggaaggagaaaacgtaatattgacagttgctcccggagtcgttttggaagtgacatccggaattgacggaatgatcgtaaaagaaactgttcatgaagacggatctaaaacatatgaacttgttaatgcagaagaactttcagcaccgaaaaatgtaaccgttacggcagactgcaagactgtacacatcggcaaaaagatccggctgaaagcttcggcagaacacgatacaaagcaggtgaattatctttatcggtggtacaaagacggagcgttgttaaatggagctgtttctgcggaattggaagttacagaaagcggaaactacgctgttgaagtatttgcggttctggaaaaagacggaacaacgttaacttctttaggcgcgaagagcgatcctgttaaatgtacggtgacgccgcatgaatatgaagaaaaatggagttcggacggaaaggttcactggcacgaatgtacgatctgtaaaaataaaactgatgtggcagagcatacattcggagaatggaaagtgacagagaaagcgacagagaaaaaggacggaagaaaagagcggagctgtactgtatgtggtcataaagaaacggcggtgataaaagcagcaggcaaaacagaagagccgcggaaagaatcagacaaaacggcttctgtgaaaaccggtgacaaaacagatccggcagtttatattttctttgtcattttgacaggcgggatgatcgcaatcttatcggcagggaacagaaagaacagaagaaaatagaatagatgaaaatagaataaaagaaaatcgaacagaagaaaatcgaaacaatgaaaaagcaagaggtccgttccactaagtggagcagacctctttaatgattaattatagcagaatatatgcagtaaaaagattcaaaacagaaaattttacagcagaccgaattcagtcattgcttttttcagcagttctttgtgaggctcttctaattctgtaagaggagctctaagagaaccgacttctttgcccatcatgttcatagcggcttttacagggatcggattgacttcgcagaaaagagcgtcgcagatcggaagcgcgtctaactgcattttgcagcttcctgccgtatcgcctgaaagatattttgttaccatgtcgtgaacgtaagtcggagctacgttggaaagtacggagataacaccgattccgccaagggaaagaagaggtactacctgatcatcgttccctgagtaaaggtcgatgtttccgtcgcacagatgcatgatctttgcaccgaccgaaatatcgccggaagcttctttgatgccgacgatgttatctacattttttacaagatgagctacagttgtaggctggatcgcacatcctgtacggctcggcacattataaaggatcgccgggatatcgacggagttacaaatctgtgtatagtgtgcgatcaaaccgttttgcgtcgctttgttgtagtacggtgtgacaagaagaagtccgtctgcaccgtctttggctgcttcctgagaaagctggatcgctgtgcgtgtagagttggatcctgtgcctgcgatcaccgggatacggtggtttacacgttcaatggcaaaacggatcactttgctgtgttcctcttcggacattgttgcagattctccggtcgttccgcagatgatgatcgcatctgtttttcctgcaatctgttcttcgagtagttccgcaagtttatcgtaattgacttcaagatctgatttcataggagtaacgatcgctacgcctgcgcctttgaaaattgacataattaaatcctccttaaatgtttgcgttcgtttgatagtgctttgcgtaaataaaagaaacggcaggatgcgccgtctcaaaatatactttacggtatacttcgatagctctccatcttgcgatgacagtcatggcgctgttgacgacatgcccaaggaaaagggttcaagtctccatatcctttcggcatcttcccctttctgatgagttcttctgctcttgaatacatccgtcatcgtacttatgaaaaatgcgacctctatctcgttcctttattagttattatatgaaaaaaattgttttgcgaacctgaaatgagttatacaaaacgcttcatctaatataaaaaaatcataacacccacgtggaatgatgtcaactgttttgctctttgacaagcaaattatttcatggtaaaatatatacatctgcagtgtgaatgacaagattttcatttgcactttttttatgctgtagcaaattttaatttcttacagcataaaaccctccgggaggatgtgtatgccgcatcgaggaagtctgccgctctgcggcgcgcaaaggccaagccctttatgagtaagggaaggagggcgttgaggtatgttagctcactttgttatgtatgtataggtaattgcgaaacaagtccgcaatcc

SEQ ID NO: 7622 - DNA, 88834 bp, Unknown
  gut microbiota DNA sequence
ttataaccagtttcccatgagacctctggggtggaaatcaccacaaactgttctgagggaatttattgatcggggtgtaacatatgtttgacaaacctacatataaatgaatatttacctctgcttcttttatttatctattttatacattttattgcaaaaatcagggggcgcacacacattttcttcggcaatacatacaataatcatagaaaaaacgagccgtaatgcccctctatacgcgcttgctttttcagtatttaatttgtttttcacaaaagaaactaaaatatttacatcaatatattatttatggaggcattatgaatataaaaggacttgatgtcagcgaatttcaaggagaaatcaactgggaacgggttaaaaacgcaggctatcagtttgctatgattcgtgcaggttatggattcaatacgattgacaaacaatttcagagaaatgcttctgaatgcaacagaatcggtcttccgatcggagtttactggttctgctatgctgtcagtcctgaaacggctattcaggaagccgacggctgtctgcgcaccattcgtaattatagaattgattatcctgtctgctatgatattgaacaggcgtccgccgcttatgctctcggagaaggtgtcactatcactccggctcttgcaaaacaactcgtttcttctttctgcaatcgtattgaagcagggggctactatgcgatgttttacacaaaccgcagttttttagacaattatctcggaaatgatcttgcaaaacgatatgcattctggtacgcccgctatgcgtcttccttcgacggaacagactgcggtatgtggcagtatacaaacgaaggaagtgttcccggtatcggcggaaatgtagaccttgatatcggctacatcgattatcccggcatcatccgccgggcaggacttaatcacctgtctgaaactgctccgccgcccgctcctccctccgctccgacatatatcacttatacgattcaacccggtgatacattaagtgaaattgccgaaagattcggaacaaccgtctcttctctttccgctctgaacggtatttccgatcccaatcttatttacgccggaaatacactccgcattccacaaggcgggaattctgcttcggtttattacaccattcagccgggagacacattaagcgaaattgccgaaagattcggaacgaccgtcgcttctctttctgccttgaacggtatttctgatcccaacttaatttatgcgggaaatacacttctaatttctcaataactttcagtaccgatagatttttttatcttttcttttcaataaagcgcggtttctttaactatctaaatttaagaatttcataactttttttcgttttcttttagacattaaacatactttagacacattttgaagatatactgttcaacagatagttgataaaacaactatctcccccctcataaagtaaagacatcccggataaccgggatgtcgcactttactctcattcctttagataactataaaaacaacgaaacccgttagccggaaggttagcgggttttcgctgtttatagaactgttcatctcgtctgtggatagttcttagacaattcactataactctaaaaatcattattcctattgttttcgtatcaattccctttttatcgcaaacagcagtaagaaaaatgcaatcatcattccgatatgagacaatcctgccagaccggacagcatcccattccccatttttccaagctctattccgagaacctgcacaattccgcgaataagcatcatcaccaccatggcaggcaatgcgatattatagagaacaaaaaatttcttaaacaaaagattttccgccaacattgttacttttgcgaaaagagccgttataagaaataacaatgttcccatcaccaacagatgaacatgcagcactcctaatgtagtcggctctgtatatccgttccattttgtaaattcccgataaaatacgcctcccgccattgcaaatataaaataaacaatcgctgtatttataattcttttcatatgtatcttctccttagtttttactcctcatcttttatgcatctatactttctctatacttcctctatactttctctatgctttttcgtttacttatgctttcttcctgtaagcctgtatataatttcttccaaataaaacgcctgccatgaaaagtgccgctcccaatcctgtgtaaaatacagctataaaccgctccggcagtaaatggaatgaacgaataataatcccgaaacttatcataaacgccataattaaaaatgatttcaaatcaaaaaatttataaaacagttgcttttcttcttcatatccttgaattcttattgtatgtttatttgtcaacttataaaataccatgaaccaaaagagaagaaacacgataattgtcacgatataatttattacagtctgatattcagcataagtttcaatcccgatcctcaaaacgttaaatcctgcgatcatccagacaagacttgccaaaagcaaaagattctgtttctttatcttcataacccatctccgttccacatcaactctttctcttaatacaaataattttttacaaattccaaaaaggactctttttcattttgtttttccagtaatattgataaaaacaaggtaaatatatagtccgtaaaaatttcggcagtcagattttctgtaaatatcccttgacgtattttttcatcattttccaaaaaatgtgccatttgattttttaacctcagaaaatatacttccatcgccttttttccttcttgtctttctcctgccgtaaaccccaatgcatgcatggaaaaaaatttcggataacggcttcggctattttcaacaccttcaaacaacaggtttaagtattccacaatattctcgcatttttctaaagtttttcccatttgaaatatatctttccacactgcctctattgtagcagacaaaagttctgattttgaagaaaaataattatacaaagaacctagtgcaattccgcattcagatgcaacggttctcatatttactgcggcaattcctttttttgccacaatcccacagcttactttcaatatttcttcttccgacgtaaccgctctgctcaactcttatcaccgtcctctttattctattctcctttcccgctttcccttttcagtttttttaatatgaacattgttcatgttaatattctatacaatatttgtcaagttttttctcctgttttccaatttttctctttactctctttttacaacttcaaaagaaccgattcccaaaagagaatcggttcttttatatcgcctcacaatattatattatgaaaactttattcttatttttgttcttattttttctttttatttttgataataagaactgccgccacaacggcgattgcagccacaagacccgcgatcggaagccatacgttcttatcgtcgcctgtctgtaccgcaccggaattgttctttccttcctctttgccggatgtcggaggaacttttcctttctcttcaacagtcacgttgaccgttactttcctgaattcttccggaattgtgattccttcttttgtctgaagtgttcctgtcagtttatatgttcctgctttgtctgctttatacacatctgtgttccatacgattgacagtttatctttcgccttgttatcaagtgtcactttcacttctttcggaagggcaagtttctctgccggagttccgaatttcacagtaaggtcagcaagtttttctactgctataaccactttgtcttccggctgcggcgggtctacttctccgcctttttcttctacagttacgttgatcgttactgtcttgaagttgtcaggaagtttaattccttcttttgcctgaagtgttcctgtcagttcgtacgttcccgcttcgtctgctttatacgcatctgtgttccactctactgacagtttgtcttctgtctcgttatctaatgttacttttacttctgtcggaagagcgagtttctcaactgaagttccgaactcaaccgtaagatcagtaagttcttctacttttgtaactactttgtcttccggctgcggcggatttacttcgctctcttctacaattacattgatcgttactgtcttaaacttatcaggaatcttaacgcctttcttcttctgaagttctcctgacagcgtctgtgttccgatctgatctgctttgtaattatctgtcgtccattttacttcaagtacatctgcaacacgaccgccttccagtgtaacatttactgtttttggaagatccagtttatcagcagcagttcctttcttcactttaagatcggcaggtttctctacgcctacaactgtctttgcattccagtcgtctaccgtcaggttaattactgcaggtacagctttgtttcctgatgcatctacagctacgatacggatactgtagcctttgctttcatccgcgtttttcaatgtatattctgtcttatcgctttcagatacgatcacgccgtctacatatacaatatatgtaacttcgcttccttccggatcttctgacggagcccatgtgatcttcacatctttttcaccttcttttactacgctgattccacttacctgtgccggagctttttcatctgccgccgccactgtcgtgaacggctcgctgcaaagagctttttccgactctactttattatggtttactcctacgatcataaatacataagatgtacccggtttcagattcgtaaaccgcaccgttgtctctgttgttgtcacaggttctcctgcattatccggaacagtatctgtaattgctttcagcgcttttgctgttccttcatgttctacagcatatactttataagactctgcccttggaagtttcgtccatgaaacagttgcttctgtacttgtaactcccattacagttgcttttgcatcttccggaatcgtcggagccggaatttctgccgcttcaagttttgcacctgctgcgttcaagtctgctgcaagcttatcagcctgctcttttgtcgtcttgtcgtcattcattcccttaacggcattgtcgtatgctgtcttaaactcgttccacagattttctgcgtaatcgtctttattcaaaccgctgtatttttcaatcgcagcctgaagcgccgatttatcaacagaagccgctgccggagtgaatacttcaagataatcaatgtttacgttaatgtttccatgatctgttgccgctgtaaacttgattgtatgttctgtattttccagatctgtcttttcaaatacgcactgctgcggtgatccgccggatttttcttcccaaagaactgcgtcgctttctgcctttccgtccagttctacagtaaatttgccttgcgtattatttttctgagcatagaacttaatgcctgttcctgtaaatgtatagctgaaccatgctccttctgtacttgtctccgtcttagttccgccgtgatgcttatcagcttctcctgtgtacggattactccagcctgtttcactccatgtgatcttcggattcttggagttcttatcatccgagcagtcctcgatgatctctgactgcgctgtcacatccgggattgcaactgtaatctcgcatgtgcctgagatttcggcattttctttcgatgtcgcttttactgtcacaacaccgtttgctgttcctgctgacagaagaccgttttcatcgatcgtagctgccgcgctgcctgattttgttgtaacagaccacgtaacacctttattgatcgcctctgcaggagttactgccgctttcatctgaagcgtcgatccggctttgctcaccgtcgtcattccgcttgcagacgttacctctactttttcaacccgcgccgcttctgtattcaatacattaaacgcgtcaagctctactttatctctgcttgcagatgcatttttctcgcccatcgcccgaactttaaccgtatggattccgtattcaagcgtcttatctttatgctcttctgtagagaatatttttgcctgtcttttttgagttgccgaataagtatctgctgttgcccatacttctccgtcgatagagatttcaactttacctctgtcgttttgtgtacaggagaatacttcgatacccgttccgcagaatgtaagttccgctgtctctgttcctgtcgggtcttctaagtatttcactgaaccgccgtagtttccttcctggctgatccagttgccccagcttcctgtatatttgatacgttcgtcctgatcgtcgatcatgccgatcatgttacggcagtcatctaccgttgcttccgaactgaactcactttcttttccgtcgatcacagccgtaactttgtacttcaatgttccgagcacatcccaagcgtctgtgtctgtccattctgtcgctttcagttctgtctgaacctgtacccactcgccgccttcaatctgacggtatacattataagatacttctgttctggctttgaccgcatcccatgtaagaactgtctctccgtctttgatcttcgttaccttaagacctgtaggagctgcagctaatgtattatcagggatagcagtgatcgtatatgtctttcctgcttctgtattgaaggaaatacgatctgaagtcaccggtgtgatctcaacgaggtttccgtcactgtcttttacagttgcaagtgaaagatttgcgtactgaacaaccgcttctccgccgttattagagtggatcgaagcttctgtcagtttgttgtctgcccatgccatatcaaccgcaaaattaccgcgggcaagcagacctttcacattacctgttccccatgctttcggaactgcaggcatcaggtcgatgtgacccatgttgctctgaacaagcatttccgcaactgccgctgtgtaaccgaagtttccgtcgatctggaacggagcgtgtgtatcccacaggtttgtcatgatcttgccgctcgtgaccattttggacaatacgtcgtatgctttatcgccttctgcaagtctcgcccatgttgcgacacgctgagccattgcccatcctgtcgtttcatcagttctattctgcatcgatactttcgctgccgccagccattcgtcgctctgagcgatcaagtctcccggatataatccgagcatatgggaaatatgacgatgaccatatccttgtcccatttgattaccgttctcatctgtatttaacgttgtctcgttataccactctttgatctgtccgctggcaccgacctcgatcggtccttttaagtcagcctgattctttttccactgtgcgactttcgcttcgtcaactcccaaagtctctgccgctgtgatcgtatcttcatataactgccagatcaacgaatgctcatatgtattacctgcagttctcggtccgtgctccggtgaataactcggaacagatacaagctttccatcattatcgcgcatcaacatttgatcgtagagcgtcgcttcttctttcatcatcgggtaaatatgagtctgcatgtactctgtatctcccgtaaactcataatattcccaacagttctgaagaatccacggaacgcctgccggagaccatccccagtcaaatacccagcccgggttcgtccatccgtacgggttgttctgtgtatgcgccataaatccattttcaggatttgcttccgtactctcaacgcccgcgtaaatcttcgccgtaatacgtccaggctctctaagagagtctacgtaattaatcagcggttctgcgcattccgccatattcgtcgtatatgtcggccagtagttcatctgcagattgacattcatatgatagtccgaatgccatgcggagttattcgctccgacccagattccctgcaagttcgacggaagagttgctcttctttcattcttcgttccgtcttcgttcacaggagtctctctcgatgatcccatcgtcagataacgtccgtactggaagagcatcaattccagataacgtttttctgtttcggaagccgttccttttttatatgcctccaacagcttatccgttgtcttgtcagacactgcctgtccgatgttaagatctaatcttccgaaaatatgatcgtaatcatttacatgatcttcttttaacgtctcatatccgccggcttttactttcgcctcagctccggatacatatccttttaccaaagcagcgagctgttcttttgtctcgcctgtacggtatttcggataatcgtttttataatccgttccgatggaagtaatgatcgtgatcgccttcgcaccgcttaccgtgatcttaccgtttgtcgaatcgtctttgatctgccctgctgttccatcgtctttgattaccttcgtataagaactgaacttcaactggttatctttaagctgtccgtcgattgcgattgcattgtcggatacttttttgtcaaacattctcgcgtaagaatctgctcccggctggttttgacttccgcctttttcctcatccggttctacacgaacgtcaaaatcaagcgttcctccgtctgttgcagtcagacgtgttacaagaacgttgtcaggatagcttacgaagttttctcttgtatagtgcgctccgttgagatcataattcactccggctaccgccgtgcgaagatccagatcgcgcgaatatcccgaaacgttattctttgtaacatttttgaaatccagatacatattgccataacttaaataatatccgtatccctgtactccggcgtcatcactgactccgataagctgtcctgcaagattactgtcaaacccttgtccgcttttcagtttctctttcagttgtgccataaccttgccgttctgaccttttgattcaatattaccgccgttatattccggtcggctgtctgaaggaccgccggaccaaagcgacttttcattcaactgaattcgctctgtctgaacaccgccaaacacactggctccaatcgcgctgtttccaagcggaagagcccactgctcccaccccgtatacgaattgggcgcctcttcatcataccacaaacgcaaagcatttccctccgtttcctgtgtctgtgccaaagcaacgttatcctcggccgctacagagaaaggagctgccgatacaacagtcgccatcgcaagtgcgacagataacgctttcccgcctgcttttgaaagcttccttttcatctttttcctcctttaaattcgcacagaagtacagccataaataaattaagccgaatactccgatgctacgttgtactgtttatcatatcacacttttattatattttgttatatttttatgatttaaaatagtaagttttttatattttcgcttttttacacataaattcaaggatagccgcagccattttttgtatatatagtctataccgcgtctatccttttctctttttacgttatatttaccttatacacaggtcgattttctccgatctgtcacctgcagttcttccgatagatgatttccagtcctttcaaaacaagatcatcgtctcgaataatctttcttctgcaatgaggaatgattttttccgccactccccctgtcgcaactaccgttacatcgccgtccacttcttctgacagtcgatcgatcaacccgtcgatcgccgcagcgctgctgtaaacgataccgcttttcatacagtccaccgtattttttcctataatatgccccggttcttccagactgatcccgccaagctgagacgcattggctgtaagggaatcaagagaaactccgatccccggataaatcatgccgccgatatagtttcggtttttatctataacacaaaccgtgtttgccgtacccatatcaaaaataagaagaggcgtcggatattccgcaatccctgccaccgctccgacaacaaggtcgctgccaagctgcgccggattgtcgatcctgatatttaatccggtcttgatccccgcgcctacgataaggacttccttttttaaaatcttttcaaccgcagcttttacaaccatcgtaatctgcggaacaaccgacgaaatgataccgccttctaaatctgcctttttaatatggtagatgtcgagtacgtttttaatatcgatcgcatactccagttccgtctttgtcttaacagttgaaatccgttctacgaacacgcattttgagccgtcaatgcagccgagcacggtgtttgtatttccgatattaatagccaatatcatttctaaaaccaagcctttctcttacattctttttcaaaagcgctcttccgatacataaagtcagcacacctgccacgattgcttccggaacgccgtttatcccgataatagaaagaataaatgtgtatacgcccgataccgccacattatttgccgatgcatatgcttccctgaaaaacagaaaaatcagattcataacaagcagcgtatttgtcattgcgcccgccacgcctgcagtcacaagtccaatgcttgacacaccggtcttttttgttttttcatttgaaaaacgaatgataagcttatatacataatacggtataattcccacaagtatgcggggaagaaaacagataatcacacttccccatccgccgcttacgcctgcaatactgtaaaacggagtaaatacaaacgatgtcggtgtcggattcatcgtattgttaataaaacttgtcaatccaaaaaggaatcctaaagctccgccttttttcggtcccatcaaaagcgaagcgataataaccgggatatgtatgatcgtcgcacgggtaaatccaagcgggatatatccgaggaaaggggtaaaagccatcacacatatgacagctccgaatattgccacctgaaccatactcattgtactgaatttacttgacgagcgctgtttccccgacgtctgccgatctttgctcgcggtctttagatccgctgcatactgatctgagccgtatacttctgccgtattcatttcttccgcacatgatactgtgctgttttctgttactgttttgttttccatgtctgcctccttgttatcattccctttcgggatacaatacatttgctttttgtctgcttcttatcgttccctttcgggatacaatacatttgctttttgtctgtttcttatcagacttttctggcttctgcaatcatcgtcaaaagttctgcggctgtctcctcttttgtcatttttccgagtgaaacttccttctctttcgtgatgaccgttacgacatttgtatttccgccgaatcctgcgccttccacacgaagactgtttgcggcgatcatgtcaagccgcttcttttccagttttctttttgcatttgcaatcaagtcttccgtttccattgcaaacccgcataaaaactgcccctgctttttgtgtgctccgagataagccaaaatatcgtctgtgcgttccagctcaagcgtcagatccgatccgtcttctgtctttttcatcttgctgcctcttatgtgtttcggtctgtaatccgccactgctgccgctttgataatgatatcctgttcctgcgcccgttccttaactgcctcgaacatctcctttgcggaacatacatttacaacatttacaaatgcaggttcttcctcggcagttggccctgatacgagcgtcacctcagcgcctctccttgatgcgatttttgcaatagcataacccatctttccggtagaatggtttgtaatataccgtaccggatcgaccgcttcctgtgtcgggcctgccgttacaaggatcttcaaacctgccagatctttttcatatgcgatttcctgcaaaatgacatcgagcagaacgtccggctcaaccatctttccggctccggtatctccgcatgcaaggtatcccactgccggatctacaacaccgtatccgtatacctgcaagatctttaagttgtcctgcacgataggattttcatacatgttcgtgttcatcgcaggcgcgataaatttcttacatctgcatgccataaccgttgttgtcagcatatcgtccgctatgccgtgggcgactttcccgatcacgttggcgcttgccggtgcgatcattacgatatccgctttctttgccagagacacatgctccacgctatactcaaaattacggtcaaacgtgtctacaagacacttatttcccgtcagcgtttcaaacgtgatcggattgataaaattaaccgcatttttcgtcataagcacatgtacgtccgcatgaagctttttcagcgcactggcaagatacgcgatcttatacgcagcgatacttccggtaactccgagcaaaactgttttgtcttttaacattttcgtaccccctttccttttgctccgcttcattatattgtatcgtatataaaaaatcaacctgaacaaatcgtatgttcaggttgaaatccgccttttttcaggaaatgtattctcaaagaaaatcactgtctgcattacgcattttccgagtttttctgaatctgcacatgctgcgtaagcttacacagcaaaatacctcccgtactgtttccgagaatcataataagaagcggaacagcatattttgtcggtgtacttacaagaccaaaataaaacatatttgcaatacagtgctcgaatcctgccaaaataaagaccgaaacgcaaagaaagactgcgatcgtgcctaaaatattcggctgttttttaaatgttgccacggcaatatacatcagcattccacaacaaacagccagcaaaaacaaactaatatatgtatctgacaatttcgtttctacgatcgggcccgccttctcaaccaatcttactccgacacgggtttgtttcataagaaacgccataatattaacaccgattccgtttccgaccaaagtaatcaatgtctcggcacaattttctttacagatatatccgatcttgccggtaaacaaattcaattccaaattgataatcgtaaaaagtcctaatccgaataaaaatgacgccacgattgaattgtccatattcaaaaaaacagtacagccgatcccgatcatcaacccggcaacaacagatttttttaaagctgataaatattccatacctcacctcgttctttttcttctaaaattgtaagtattcttaattaaatgttgtataaaacccgacgataccgccccggctcgcaggcacaacgtgcctattataccataaataccgcaaatgtatagaactctttttccgttttattaatcttctgtttagaaattttcgtattcttttattctttcaacatactttagacatattttctctttatactaagtatcagatagttgataaacaactatccccctcataaaagtaatgatatcccctgaacaaggatatcacgctttactctcattcctttagataactataaaacaacgaaacccgttagccggaaggttagcgggttttcgctgtttgcagaaacttttacgatttttaatcgactgtatttcacgataaatatgttgttataaaaagaaacttttgctaaaataagacaaggcactacatgagaatggtaggcggttagtccttcaacagagagaccgaactctctgattacatagaaatcctgtttgcaggaaatcttggaaaggagggcttaacttatgagtgattttgaaatgctctccatcgtactaatgatacttagtattgttgtaacgattctgatagcgtacataaatcaatcaaaaaagtaaccgcccctcgaccaaggaatacggttacttttttgtaactttatcaaatttggactaaccaactatcagtagtgccttatttatatctataatataccatccattaagcacattgtaaacatgtatctttgtaaatgcgtaaacattcctttagataactataaaacaacgaaacccgttagccggaaggttagcgggttttcgctgtttattatcttacctttttattaccttaccttttccaatggaaatgtaacactccacttccctttaatgtgcatattacttgttgtgaactttccataaataacataatccgaaacatttttatctgacaagtcaaagatatattcgctgtacatatctttttctccttcatctgtaaagaaagaaatacttgcttcacaatcaagaacatctccatcactgttcttcaaataaacatatccatgattatccgtttcaagcgcagaatcatatctgatttgaatatgaagtttttctcccacatatcctatcgccgtaagagcaactcccgaaacaggcgaatttatatctccttgagatacgagagcctgaaaatcttccatatacttttcactatttgcaccactcccacccaaaacactatacggagtaaaaatctttaccgaaccgctattcttatccaaatttaatgtcgatattgaaccttcatacgtttctttattactcaatatttcccgcacagagaaagttattttctcatctgcaatatcatacttatcccattgcgatatagaaatcaaaaaaacggctgtttccgtctctgcatcatactttatattttcacatgagctactgcagtcaaatgaggtattgatactaaaactatcaaacaaatctgtcgtttcatcaatcctgtcttcctccaaatcttgtacagaaataagtatcttcgcctctccgctctctacataagcagaaataacctctattttaataccattatcctcacttatcatactaacaggctttaacttttgggctgctgacggagacaacgtatagagaaattcataagccggagaaaaatccgcagctaccaatgtcgaaacagataatataaatacaagtataaatgaagccgcggcagcaacgctcttttgtaaaatagaactcttccctgtccttttcttttttctctgaaaatctgcagcttcttcgatatatcgatcattaatattgccaatcgcatctgatatatccttttttctcatacttcaacgccctccttttttaaatatcgttttaattttcctctaattcgtgaaagccggactgatacattgttattacttatttgaaacctttccgcaagatctgaaatactatcagaataccaataacggcgaacaaacattattctgcttctcttatctaacgtttcaagaaagccgtcaagtaaatccgacaattcatttgcttccatttcctgttcgacagtcattactgccataagacagttctccaattcctgcaacgccacatcataatagctgttccgcttaatacaagtgttctcatggtacttcgcaatagatatatttcggataatccggaatatataagcccttaacggatttggatttttaggcggtattgtattccatacggcaaggtatgtatcatttacacattcctctgcatcacgatgatttttcaaaatgttgcctgcaatacgtttacacgccgttccgtatttttccgacaattctataagagcctgttcctctcgcttatagagcaaatcaataattttactatcttcttccaacgtatcatcctcctctcagctatatactagggatttatccgcaaatcttacacctgaaaacaacaattttaaaaccttttaaacatttaatttccccctgcttgcagaaagtcctgaaaggaagtgcttgccaacactttaatccatcgtgattacttcaatccaaatcacactatataaaactgcggaaactcaaggaaaatgaatattgcattcaatatttgcatatgctataatgccagcaggcaaaaagaaacggcgtatccatgttgagcgtcaacaaaaaacccacgagtgcacacctcgtgggtttttctattcctactttttaggcatggggaggattaaccccataggccggttgccgattattttgtcgtgaattactttacaaaatcagcatggcatctccaaagctaaagaaacgatatcgttctttcaccgcttcttcataagccgccataacatgttcttttcctgccagcgcggatacgagcataataagagttgactccggcaaatggaagtttgtgatcaggcagtccagcgttttaaaacgataacccggataaataaaaatctccgtccagccactgcaagcctttaaacgtccgttttcatctgccgcagattcaatcgtgcggcagcttgtcgttccgacacagatcacgcgtccgcccctgtctttggcatggttgatcttctccgccgcttcttcatttatcatataaaattccgagtgcatatgatgattttccacatcgtcaactttgacaggacgaaatgttcccaaacctacatgtaatgttactcttgcaatatcaacgcctttttcttcaatttttctaagtagttccggcgtaaaatgaagtcctgccgtcggagcggctgctgaacctgaatgttctgcataaaccgtattatatctgttcttatcctgaagctgatgcgtaatatacggcggaagaggcatttgaccgagctgatctaatatttcttcaaagataccttcgtattcaaaatggatcagtctgtttccttcgtccacgatatcgacaacttctcctacgagcagcccgtctccgaaactaatccgcgttcccggttttgccttacgaccgggtttcacgagcgtttcccacacatcatccgctcctcttttcagaagaagcacttcgatcttcgctccggtttcttcttttgctccgatcaatctggcagggattacctttgtatcatttatcacgagacaatcgccttcattcaaataatcgataatctcactgaatacatgatgtccgatcttaccggtttctttgtccactgtcataagtctggaagaggaacggtcttcaagcggatcctgcgcgatcaactcctccggaagatcataataaaaatcacttgttttcatattcggtttatctcctgttatttctaagaagcaagccttgttttattgtgttctaagctctgcgcccattttctttccgagttttttcataacctgttcggcgacgctttcgatctcctgtgatgtcagcgttttctcatcagatccgatcgtcagtctgatcgttacggattttttgccctgcggaatctgttttcctctgtattcatctacaaacgatgcgtcttttaaaagggcgcttgctttctttttacccataacggcatcataaatgtcattccatactgcatcggaatcaaaaagcatggaaatgtcatagtctgtctcaggatactctgcaagatgctcgaatttattcgttcttgatttcagcggtttcagttttgaagcatccatttcaaaaagaatcacagaaagattcttaatgccgcattccatagaaacttttttcgctacaagccccatatcgccgattttctcgtcatcaaggtaaatattcagccacacaacattgtcagcccataccggcttttcttcttttttaaactcatacgcttccatatgcgtatatctcggcatatactcaagaactccttttgcctctctgaaaagcataccgatgtcctttacgctgcttgcaaatgccgctccgatatgtctgcgctgttcaggaagagattccgtctcatcatatgcatttgtgtagtttttatcaaagaacacctgagcctcttcaaagatagaaaaatcattaaagtaacgctcgtttttcgcaaccgcctcgcaaaggttcggcagaagagaagaacgaatgcagctcatatccggcgccggaggcgtggaaagtttcaaaactccgtctgtgctttgcagaactgcgtttacaaacacatcgttcatccacggataagtatatacttcctgcattccacagcgtattgcaagatattctttaatatttcttacaagactcttatctttctgattgatcgagtctgtaaatgtcgtcgtaaactctgtcgcctcgaaattatcgtatccgtacattctggcaacttcttccatcacatcgtctttaatggaaatatctcctgtcgaacgccatgtcggcgccgtcacatgcatgttgtctccgtcgatctgaacatcgaatccaagctgctctaatttgccctggatttcttcgtttgtcaaatgttttccaagtctcttctcaagccatgtcagattaacgtcaatctctgctctgtcgagttttttcacataattatcgcagtatcctgtcacctgaagttcaggataaagctctttaaaatacttcattgaaagagcaagcgcctgatcgcatctttcaggatcgattgctttctcatatctggaagacgcttctgtacgcgtatcgtaacgaagcgccgtacggcggatgcctgtcgcttcaaagtttgccacttcaagaatcacgcgttccgtcttcggcaggatcgaatctttcgctccgcccataactcctgcaagagcaaccgcgccttcggaatctgtgattacaagatcatctgcgtttaattcaagttctttatcatttaaaagaagcagtttctcaccttctcctgcatgtcttacaacaatgtgatccgtaatattgtccgcgtcaaatgcatgtgtcggatttcctgttgcaagcattacatagttcgtgatatcaacaagcgcattgatcggacgcattcctactttccagattctattctgcattttatacggcgcaggttttacagccacgcctgacatttcaacgccgatatatcttgtacatctgtcaggatcttctatctcgactttaaaatcagactgaacgtctgcccggaaaggctcgatctttgcaagcggcaagttataaagagccgcgatctcgcgggcgattccgtaatgtccccaaaggtccggtctgtttgtcattgatttattgtcgatctcaagaagcacgtcattcatatccaaagcatttgccaaagaagttcctgccggaacgtcaaacgctgacagatcaaggatttctccttctgtttctgacgggaacagctcgcctaatccgatctcatctgaagcgcagatcataccgaatgactcaactccgcgaagtttagaatttttgatcactacaggctcaccctcgccgtgccagcggacaaccgctcccggacaagatactgcaacgcgcattccttcttccagattaatgcctccgcatacgatgtctttgatctcatcactgccgatatttactttacatactcgcagtctgtccgcattcggatgcggctcgatcttttcgatcactccgacgatcatattttcaaaacgttctgcaagatattccacatcttccacttcgactgtagacattgtcagatcgtacgccagttttttcagatctgcatcttccggaatatttacataatctctaatccatgataatgataatttcatagtctctctcctcgtatctaaattgcctctatctaaactgtttcaggaatcttaaatctgcgctgtggaacaatcttacgtcatccacgccgtagcgcatcataacaagtctgtccaaaccgatatttacataaaatcctgtatactcatccggatcaagccctgctgcccgaagaacgttcggatgcggagaaccgcccggcataacttcgatccagccgacatgtttacatacgctgcatccttttccgccgcaaacctgacactgcatgtcgatctcaaatcccggctctacaaacgggaagaaaccggaacgcattctgaccggaacgtccgttccaaacactttgctcaaaatactcttaatcattactttacctgatgtaaacgtaatatctttgtccacgatcagcgcctcatactggaaaaacgctctctcatgatgcgcgtccgttgtctcatttctgtacacgcgacccggatatacgaaacgatacggcggtttgtgtgtctgcatatagcgaacacttccgcctgtcagatgcggacgaaggcaaagcttctcattcgtgcttccgctgtcatgtccttccagccagtatgtgtccatactctcacgcgccggatgattcggcggaaaattcaatttatcaaacgcatacatttcacttgtgatctcgtcttcctcgaacacctcgaatcccatcgaacggaacgtatcgttcaagtcataacacatctgcgtgatcgggtgaagtccgccgcctgtcggcaggatacccggaacagaacagtcaaaatcaggagacacttccgaagctttcagcttcagctccatcctcttctcatcgatcaggtccttcacttcatttttcgcctgattcaaaagttttcccatctcaggacgaagcgccacatccactgtagggatctctttcatcaaaagacttaatgaaccctgctttccgatatacgcgctttttacattttgcagttcaccctcgctcactgcatcagaaatcttaccttttgcttctgataaaatactgttgattttatctttcattttatttctccttcccaaattgttttttcatttgaacttcctcgatgcggcgtgcgcatcctccctaagggatctatgccataggaaatcgaatttttctatagcataatcaccggaagtgccaaacggcacattccgggattgtaagcggtcgccaaggtctcgggcaagcccggactttggcccgtcgcctatacaaaaaaacaccgtcgcttgtctgttcaacaagggacgatgttaatcgcggtaccaccctatttcagagcatcctatctgctctgcgctctcattgtgtaaaatattgctacacgaacatccgacttaacgcacaaactgcttttcgccggaagactcccatactgaaacttcaagaagggtcgcgcggaatgctctcagccgatgacactccgtctctgggtcgctctgcctactctactcacatatgttcatagtctaatttctgaaattatgattttgtttctgttatattttttaatctcccgctttgtaacaacaaacattgttccaatcggctgattctaaattattttggcacagattacgttttttgtcaatgacggaaatttacctcctctgtcacgttccgcataagcatttccaaaaagcgttctttcttagtttctcctgtaagctctttgaagtaaacgccttttcttgtttttaaataagctcttacatttttactttcgtaaaaatctgtcttgtgagtcagcgtcatctcatcaagcgcttgcggacaactgatgaaaagagactgcatcgcctgtttcgctttcgcattctgctccaatccggtcacggcatcaccatttgcacaataaatatggatgttcaatccaaacacgagcacaagagtcttcgttttattaccgatgatcgcgctctccaccggtatatcaaatactgctagataaacctgcttatcattttcaagctgaagattcatctgttcaaatgtataatccaaagcattttgccttaattccaaatatcgttctgacacttcttttatagccataaatttactctcctcctgccagttctgcatagatatcttttatcctgcggtacgttccatcctgctttttgtacagcttatcattctccgatttatacagagggaacttattttcctcaagaacctgcttcaaaataaccgccgcattttcaagacacttttctgtcatacagttgtcaaacttttttattctgtacaacgtattccaatctttcgcttcatctttcagatcaaacgtaaatgccccgcggtctgcatccagtgtaacataaatttttgtcggctcatagaaaaatctgatctgaaactgccccatagggccgatcgcactgctttcaccgatcacccgtatctgttcgccgaatattttacaaataatcttcttatatttacacatcatttccttttgctctgtctccatacgtttccgctccatatattcatattgtgaactacccattgtctgaagcctgtgggcttcctgtttcaatccgatacatgatgtctgtcggcaaaatcacaaaaactttaaaatccgctctgttcttgggtaacacaacacagtcacctgctcttctccttctaactcataatactcatccgaagaaatttccatctgatattccgtccactcgtcatctcttccgcataaatagtaatgccgtgaaataagaccatatattcccgacgattcacgcatagtaactgacgtcagacgcacaacctccggtcctgatataagatccaatacaagctttcctgatatccatccgccaatacctaatatcaataccagcagcaatactccgaaaacaaccgccgttttatttgtcttccttttatgaatgatcgtccacacacagcttcctccgataccgaaaaataaaaccgcatttgaaccttcatttaccattcccaatacacctgtttccgggattacaattttaacaatcaaaaaaaccagcactaaaatccaaaaaattgttgtaaataaatctcgtttcttttctttttcatctctcgttttcatactcaccgttttacagcctccttatttttcaagctgcaatccgcctttactctggtcttgataagtcaaattgcgctcagccttactgtacagcatgccacaaatcaccctcttttacaaatttatatccatgttgccgcaaatactcgatctctttcgcaaaaaaacttccgtctccgctgaatttcgccggatcatgagataagtatatatctcttcccgacgcgatttcaatatcaagaaatttctcatttactttccacatttcatctctcgaatacgtttttgccagctcatcccactcatccaaattataatactgtgcgtcatattcttgcgctattttatcatatgaagtcgattttccgtcctcaaacttaccaagcacgacggcatccgatttaccctttccttttattgcgccaaatgcgagatcttctgcttcctgatttgtaaatgtcgcagtctttgcgctgtctgcatctgtctttggatgcaaaaagctttcctgttttttcgcatactctgaacggatttttatcacttcattgtgatcaactttcttcaccgctatatgctcggacactttctgatttgcaaaatcccacgcatccatatctgcatcagatagtcccggagggttatgttttccgctttccatgttctgcatcgattgattataccgtttcgcctctgaaaatgtcatatcatctgtaaacggaacatgtttacttcccaccttatcaagtcctttatccaatccaaactcaagtcctgttttaagaagttccgtctgaaagtcgcccaaatccagctcttcacgcgcccagtttgtcatagtttcggcagtaaaatcaaccgccatgtcttttacagcctcttttgctactcgtttcgcgctttcgcgcgcgattgcctttactccaagaccggcccccgccttagttccttgaccaataggaactaaaagacccgcaaccatcatatttatatttccccatgcgtcatatgcctcttgattcccctgaaatactgtatctctgataaaattaaaagacttacttgtcagatctttagctcttccataatgaacgtcctgaatgccctctatcgctttactcgccccatagagagcggtcgatcctcctgtaacccatacgcctatcacaaccggagttgccatccctccagttccgacgattgccaagattccggtaattgccgcagcgcctcctgtcagcaattttattgcgccttcctcttctcttgccttacacgcatcttcatattgctgtgcgaatacttcctgcatctttacttctgcaagctcgatctcttccgcattttctttcaaatactcattcgctgtcagtacatgctgacaaagctccggcatatgtgaatttccgaaacagtctcccgactgatacgatgtcacattcgttccgtttgtataatattctgtaagcgttgcaaataatgactgaagcagatctgccaattccccgtttgcttctgacttatgctgcgcttcataatctataatattttgattgaagtctgttacattctgctttacttcttccatagaatcttttaaataatacgaattaggcgcctgcaaagcaataagatccgatacatttaacaaacttgtttgtactattagagaagaatcagatacgtcttcgatctctgttttcatccggtcttttacagaaagtaacgtcttctggggaatgactgcatataagtccccttccatatcataatatccttcacggtaaaaaagatattttgtcctatataactgtattgcctgctgtatagaagtaagcagcgtcatatgcacttctttcagatacgttttaacagactccgcgctttttccttgataacattccatatttccaagattttcacacgccttaacccacggttctaactgactgacccattctgccatgcgcccgtttgtctgatcataaaattgatccatagaactatacattattttatattgtccactcataatttttcctctgatatttcatcaaaatctctgtacaatgtctgcatatcgaaaaactatcccgaaaaattccgtaacagttcattttaactattacaaaaattccaaaatccgctctgttctcgaataacatcgtacaatgatttcatgtatattttccaactcataaaactcatctgccgatacttccagccgatacttccagccgatactgctttccgtcttcccctctgccgcataaataatagtgatgagaaattaaccctgataatccgttgagttcctctgttgtaaccgatgtcagacggatcgtttttggtccttctataagatctgctgcgaccttcccagagatccagccaccgggaacacatgctaaaactgctaagcataaaccgagaacaagcgcagatttatcttcttttcttttcttgatagctgcataagcacagactgctcctactccgaaaaataaaactgccattgacccttcgttcaccatcccacctatgcctgtttccggcagcataatttgcataacaataaaaagcaaaactgcaatacacaaaattcctccggcaatttcccgaattttcttttttctatcatctcgtttattttccacgttcactctttttgctttccttttttatttttattttctcatgtatttctgctgttctcaatcactttatttcaacatttgaagacctttccatacaccctctaattttaaatctatttctttcagttgttctcccgtagtttcaatcgcatcaatatctttttttataagtgatttataaagacttatgattctttgcagctgaacgaactgctctgcaaactcatcaagagcttctgatcgctcagctccccgcgctctttcttctacattcccgttaattccgtcggcgcttgttctcatctggtcgacagcatacttaaatttcccatagtcgagattgatcagacctgctaccgatcccaacgattgcaacgttgccatagtgatacctcctcgtataatacttaattgcaaagtgtacggatctcattgacaagagaattgatcaaagatcctatatgaagcacatcccaactcaactgcatgttttcatttttcagccttgttatttcattgcaaagcgcgtctacaacatcgtcaatacgctcaatataagtattgtactgtccgacaacgtttccttctatactatatactgtcgccgtctgttccttcccgatccattctccgatttcatcaccgtttgcatatttttccagttttttccgctttgcttttgccgaatttttctgcgactggatactgtctctcgccgtttttaatctttcgatctttttttcattcgcggcgcgctttgattctttttctgctttctcccgttcacgcgcgcttttttcgctgcgcgcctcacacactcttgccctttttcttctttcctcagccgagttttccgccatcttgagcaccccgctctcttacaagtttttctacgtctgtgcgttcatatggtgattccatataccactgattgatattgtctaccatcatcttatcatcgtcatcgtgaaatccgctgaaaacaacttttacgatatctctgtgattaaaatataagatctgatctccgaccagtccttgcgggtacagacatccgccgtaatcaaaataaccttctttccctgtcgcaaccgacaaaagccctctggcaatcacaacaactttctgcacgcctccctttaagatcacaacacttccaagcggaagataatctaccgtctctttttttacgttttctcccatcatgcttttcctttctgtttcaattcatttaaggtaaccgctcagtccgcgccattcgtaaagccgcgctgcgtacttatcatggctaacgctgctgtacggctgaactgttactatttaagctttttaagttccgcatttcccacaaaaggggaaatgcggaacgcggttttatccgccgctgcctttaaacctgctttttcgtactatcctctgaatccgcttgcaatactttcgtctacattttccatattttgagctgtcgtattcaacgcttttgaaatctccgcaagcaattcttctgcctgcgtaaacgccggccgcagactttcataacgttctctgtaagcctcgcttgccgatccttcccattctcctaaaagagactgaagtaacgaatctaatcttccgatcatctcgctgacattccctgattctgtttggtacgaatttgccctttctctcatctgatccggtgaaattctgatttgactagccataattgctacctcctataaaattttttatttatatataccggtcttccggatatatatcctactctcccgcaatgaacggggtcttcaatttaatacactcattttcttttatgtaatatccgtcgcctgtctcgatcggttttttgaactttcttgtcacggcgagcggcatatcgtaaatcttcaattctgaaatatctccgaaatacatcagatgtcttccgtcccggatgcctttgatcacctccggcgcgctgtatgggatcggcgcattttcgattgccgatataatcacgcctacattcatgttccggtagcgtccgataatatttttatacgatgcaagcgcctctttactattgctgatctgctcgatcgcatcaggattatcgataataagaagcatgtaatctgcttctgccggatcgctttcgatcccttttgcaagaagttcatatctgctttgcagttcttcttcgatctctttcagataagaaacgatatcttccgcgatcatgctgtaacgaacgacatttcttttttctttcatggaagcaagcttcttcccgattccgtccgaaatataaacttttgatctgcccggatacatcaattccagcatatccgccacatattttatccagttatagcgtccgctgccctctcttccgacaaccgccaatacaccaatcgaagacatacgaagcatatacggcatcacatcttcgtaatttaatcctgccgccaggtcgaaatgtccgcgcatcatatttccaaactgctgtgccatataattcatgctcaaaacaggcgggatcaacgggatcttccgagccacctcagtacattctccgtttcgtttttcgatatatccgcggattgcttccgctctttcaaattctttttctcctgcaaacggcagatacgcctgacattcaagtatctgtttatccacttctgcgaaacatcttcccggaagatgctcaagtctcctgttacaatgttcaaaaatcgcagagtattcgtttccgtcattgcagaataacgcgatcctgttagaaaaagacgacaaatatttgtatccgatccctgccgtctgtgcattcgcgatcacaatagaaattccgactgtaattccttcccgacacagattcagcagttcgtcatcatcttgaaaatacaattctttcagcgcagtaagattatctataataagaacaatctgcttcatatcggtgcgccccgcctctttgtacgcaacaaatgagcttactccgacagataatagtttctcttttcgagtttccatctcttcccaaagcattttaaacagatttttcagtttctcatcttcggaggaactgacaacgccgcctacatgattgagcgtctcaaagtttttcaataccatagacgcaaagtctataatgtagatcgccacctcatccggcgtatactgttccgaaagacttcggatcacattttgcagaatcgtcgtctttccggtctgcgccgaaccgataataatcatatttgccgcgcttaaattcactgcatactgatcctgattctggtgatcgggatcgtcataaacgccgatccacgcataaaatccgacttcttttttctgctcttgtactgcctcttttgataccggcgggaattcgatacactctctaagcggaggcagacagatatcgggaagctgcggtatttgaatcgaacggaaatattcggacacataagaaacgatcgcctcaagctgattgttcatcccttcctgtcctttgttctttttctttacataaaccggaacttttttcccgccgtccggaacttcatatatcgtaaatgcttttcctgttccttcgtcttctctttccggcactccgctgtatgccgactggaacaattcaaatatctcattgtttcctacttgcagataagctcgtccgggttctttgatttctgcggcaagaggagacttcagcacttcgttactgtcttctttgctctgcactttcagacagagtttaaaacgggagttactccatatctgttcattgacctgacctgcaggtttttgagtcgccagaatcagatgtactccaagacttcttccgatacgcgctgccgagatcagctctttcataaattccggctgttccgctttcagctctgcaaattcatctacaatgatgatcagatgcggaagcggttcgcttacttcgcccgctttatattttcggatatatttatcgatatggttgacgtccgcctgtgcgaaatatttctgtctcttctgcaattctgctttgatcgacttaagcgaccgattgatggcattcccatcaatatttgtgatcgcgccaagcagatggggcagctgcgcgaactgattcaccatacctccgcccttgaagtcaatgatgacaaacgccgcttcgtaaggatgatagagcgttgccatcgaaaggatatacgtctgcaatatctctgattttccagatcctgtcgttcccgcaacaagaccgtgcggaccatgagctttgtcatgaaggtcaagcataacgatccctgtctttgagactccgaccggagctgccattgacttcgtaactttagacgcagaccatcttgctttgagatcaagatcttccacagacaaaatattcagcatcttaaacattgatatattttttatcagttcaccttccaatgcaacttcatccgtacaaaccggagctaacgtcctgacaatgcgtactgccaaagtgtcgctgatctgagaagatacaaacggtactgtctttgatttctccgctgcgttgatcaaaacgcctctgtaaccgccggacaactgtacgacatagtcgcatcctaccggaatgtccgcgcgtgtctgtccgaaaaacaaaaaagtgactcccagatcttttcctttttctgtaaactgtgagatcggatgcttcttatatccgtattcgtcatagaaaaagatgagcagatgcggatactatctcttctcctgtgctctcattgtcagctctttgtacaaatactcaaaaataagcgtcttgctctcatcgtctgttacaattcctctcgtatctgtctgtacgcagtacgctcccggaagaaaacggaacaagtgcatccgtccggcatgttctttttccgccacgaaaaacaattttacatctgccgcaaaatgacgaagcgccacatctgtaacgatcagtttcaaaagttcaaaccgatctgcctcttctcctgtaatgccgactgcatttacatttttcagatcacatatgaccggcgcattttgaagttctttataaaaactcgccgtctgctcaggaagaagacttaaatcgtcttcaatttccagcttctcctgtttcttgtaatttacctgacgggcagactcgatcggaccgcttccgagacggacacaaagaaaatcttcatcctgcggcgtccggtcaaacagatccggagaaaatgtttccacctgctgaatctcctgctctgccggaatatagatttcattacgttctgtccattctctatttctgcactcttcgatttcctgacgttttgacgcaatatatttctgatatacttcgatccggttcgccgtcttttcccgaaactctttctttccctccatcacaccgactaccgctgttatgatcgcgatcgtacatgatataagagaaaaaataatcatcgttcctcccatgaacgccatcgcgcctgccgcgatcagcattccgaaggacggaaataatttcataaataaattacttttcggtttctgcggctttgaaggcggatctaaaatctcgatcttgtcctcacatatcaccgttttcagccgtgtatttctcgaaaatctcggatacccgtttctttccggataatccccgaaaccaagtccgttcactgtcagatcgcttctgatctccgcccacagtgcgttcccttttaagaaaaagtaataatctgcaacggaaaagaaatccccgtctttgatccattctttttgttctgtcttcttcccgttgtgatatactccgtactcactgttcataacttcaagcgtccagccgccttgtccccgcgtcagccggacaaattctctctttgcataaacgcctgatagtgcaatttcatatgctgagttgtttccgattgaaatcgtctgatacctgtccaaattgatcatccgctcacagcgatgcgatccgctgtcaaaatcgatctgaaaatcaattctaaatacaagtccttctgattcctgatacctgacttccaaagtatctccgtggatcactttccgcgtcatatattttcggatatcgccttccgtaaaataaatgttgtccgaacatgtcgctctccatccaccgctttctttcacaaattcaatctgtatcgattcaaaaaacagatctcttctcaaacgcaccgtacagtcgattcccgttcctaccgtaacccgttccatatcagccggaagttctgcttctttataaatctgatttcccgaaagtataatcttatatctgttctccatatctttcctctgccgtttcccgctccttatctgccgctgcctttgccgccggcagacttatctgataagattcttctcttttgcgccttactctgccatgcttatgatcgttccgtttcttactccgaattcttttaacgttctgttgcctttgagcagcatgatcggattctgcgcctttagataacaattatttatatctgacagatcgacgcccagaccatacgcctcgttaagcgccgccgccagttcttttgccgtcagatccagcggaacttctaaatctaccgtccgatgttccttatgaatatgaaaaataataatcgccgtttccatcttctctcaccacctgcactcatatcgtctttgtattgatttttctttttacatgatcaaaaatgccgctttctgcaatcccggcgtctggacaggcagtcccgatcctttcatttcatacgccggaagatgttcgatatattcgctcaccgtaaatcgatgcgccgctgtcggaagcagcaatgcattttcttcctctttcttaaaatcattacaaagaaatatatatttatcactattgttccgatttacattttggatcagctcattcgttgccttcaccgcatattccgtctgttttgtcacgatcaatattttatccgcaagctgcataagagccgctttttcctcgtcaaacacactgtctgcatcgataacgatgtaatcgtattcctgctctttgcgggctgcttctgctaatagtgcaaacacgcggtatgggatacccaacgacataagcgccgctttaaacggcggaagataactgaaaccttcctttcgtatgacatgccgtacgatccgataaacattgccaagattccccgacagacccgcataaaccgaagcatctctgatcggctcgccgttttccagcatccactgaaacgactgaagccgatccgcattcacatacagtgttttcttataattacgttccagacaacgacacaagccgaatgcaacactcgttttcccgactccgcctgacgccgaggtgatcaatatgatctttgtttcttttccggcatcctgttcggcataaagcgtatccttgcatctgcctgtaatttcattaaaaatctcccgcacacttgtatatttaaacaagcggcaaatgtcgagttcgtccgtctgtccgggttcgtaatgttccgacaatatcatcaaatgccggatatcatgttttttcagcccgctgttataaagcgtatccgacacaagcagaatgtccgcatgctgcgaaagtgaaaataactgattaaaataatctttatccgtaatgatctccaagtcgatcttatccgcgaacagctctgcaaatttcttttgtagcggaattacatagctttcatctgtatccgccacaatcactctcggtcttgccatatttctctgtcacctctattccatcacgatctggaaatcgctgatcgccattcgtataatatctccgtttttcaccggatattctctgcccggaaaaagctgcatcccattcaagtatgttccgtttgaactattcagatctacaaccgcatacccggatcccctttttacgatcttacagtgccttctgctgatcatcttgctgaatccggcaacgccgtccgcttgctccgtactctttccgatcacatactcttgtttcgttacagtcagacggatcggactgcctgctgtcagcgacacaagtgtacaagtctgatctcctctctgtgaagaaactttttcatttctattcaaactataaggtgtacttgtttcatctactgatccgcacttttccacatccgaatcttcactgctgtaaccgggacgtccgatgatctgaaagaaatccgcaaacctcttatcgtctttatccgaacgtttttctacagttttcttcagttctccccttagatgctcctcaaattccactacatctttatgaagtctctccgccacaggaagatatacgaacctgatttttcgcgttgcaggatcgacccatatcttatctgccgaaatatccagtttcaaaagcgaaagaaatccgttttctgtcacccttctgacttcatgcagaatatttcccaaaacagaaagcatcccttctgtatcttccgcccctgactggatcgcaagcggcagacaggatttcgtatcgtaatacagttctgtcttgccgttatacagcatcttcacacacttcaatagaaaatctgcttcttgaccgtgcatcattttatattctgttatcaaaaaatctgtcttatcttctaaaatataagcaaagttctctccacactgttcttccgtaatcattccatctctcattttcctgctctcatcttcctgctctcatcttcgtctggtttattttgaacccggacgcaaattttcctccgccggagcgcggttcagtattttcagttctccgtggtcaagctcaaatacttcccatacattttcaacgcctgcattcgggtcaagtgtgatcactgtcggagcgctcttgcccggaagatatactttcaccgttgcgccgtactgctgcaaagttcccgtcgttctgtagtcaacgacagagtatgtataaacgccgttcaggtcgttcagcgtgatcgtctccggtccgtatccgtttgtgtcatccacatcaagttctgccagaagcccgtctcttccttcgcatgtccgtttcctgaagttcacgtacaagtcatctcctttatccgtatttccccacagatacgagtcgagatcctgatgctgtgcgttccattccaatacgatacgcgcgctgcccgccgccagctccggtgaaatcgtaaactgctctccgctgtaatttttatctttctccatctcaaactcgaacgtttcatccacatacccgtccgcgctgatcgtcacttcgtacacgtctgccgccagttcgatcgagaacgatccgtcttttcccgacgtaacatgagtagaattttcagcgttttctttcgctttaaattcaagcttcgccgccggaacgccttctcctgtcatagcatcgatcacaacgccgttcagcgttccgttttccgagcggttttcgtttgcctctttcaaaataatttcattccacgctttatcggaaataatgtttcccgacgcatccgtctcaacacggatcaggaggcttcctgtagagagttccacataaactcgttcctcgtctgtgatcggcgctactttggaactggagattgcgttcagttctgcaaggcttgcctttcccgggaaatttctgaacaactgcgaaatcgaatctaaacgcacgatttccggcattccgtccttcgccggtttgtctgtctttacatttacaatatcgtcatgctctttcgtgtttgaataacagcatgttcccgccagatctttatgtacgacttctacttctccctttccggtctttacgatctgcggatatgagccgaactgatcgcagtagtccgtatagtcataattttccagcttctgaagaaatgcagtattaaaagaaaaaacgccaaatgactgcattgtctctttctttgtttctgaatcgtcaaattccgccaaaagcgaaccgtccttaatcccgcttaacatatactggatctttgaagaattcgtatgcatgtagcctcgctgaagcaaaacttttgcagcggagctttcccctctcttcaaatacacatctgccagtccgagatatccttcttcttctttcggtcggtctttgatcgcattttcatatgtaagcaccgccagttcatactctccgctgtccgcatatttttccgctgtttttattgattcgttatacgcgctcgctcctgcctgcatccgaaacatcacgatcccgataatcgcccctgccaaaagaagcagaccgcagacgatcagcagaatccggcttttcttttttcctttttctcccactgctccttctcctctctttcttgttttaccgagacgtttcgtaaacgcccctattttatttttcacgtccgtttatctatcatttactcgttatcttttccgctatttacaagttgatttgttcactttttagtttctccttttttctttgaagcaaatataatacgcttcctgctgccaacgacgcggccacgatcactacaacgcctgtcacacatatcatgatcccgctcatcttcattccctccgtttcgcactctcttcttgtctgcatcctgattctgtcttttattttctatcttcaatcttcgtgctgcttcacatctcacttccgattattcaagttctttcattgtctcttccagcatttccatatcaggatcttcttccgatcgatctgctctgttctcatataaatttctgcaagaatgataagtaaatttcagatcgcctgacacatttgaatacgttccttcttccgacgcctcgtccaaatagttgtaacagatccacatctgaactttatagtctttcggataatctattttcatctcttccagcacatccgtactgtctctatattttccgagaactcgaagaagaagcgcccttcccaaacgatcctcatatgacggatcgtttttttgacagagcatctcataatatgcaagagcctgcctgtaccactgatttttgaccgttcctatcctctcttcgtttcctgcctgatatgccgtcactgccgcttttctaagaacattgctgctttcatctagtttcactgcttgtgccgccgcatctgccgcagagtttatatccccctgctcaagatataattctgcttccagcagataaatttgtgcattcaactctgcatccatactttttccaagcgcttcttcgcataaagaaaccgcgctcttttgatcgccttttgcatacattgactgcgcctgaacaaatacagtagctgcctcatcgatcgccgcttccggatattcactttgtatcgtccatacatcgaccggacttccgtttcttgccattgcagtcatataatctctcacatataaagagttcctactgtcgcacgacaaagcttcctcataatactttcccgccgtgtcgtattgttcactatagaaatatccgtcccctacagcatgaagtacctccgccttctgctccttattccttttcatataaccttgcaaagaagaattgttcagaagttctgttccttctcttattatattttcggaatcccctgatcccacaacggcgtaaaactcttgatattcctgctgccacagctctttcccccgctgacgcacacctgacgcaataagaaagattcctgccagaatacaaaatccccacgcagtcgcggtcaatatctgcaagttcgtcagacggcggtacttcggatcgtatttttccatatgcgaaagagcttcttccatctgttttgccgtccgaaatcttcttgaaacgtcccgatccatcgctttatcgacgatccgtttcaagccgtccgcatacggaatatcaatctgtgacagcgcatacggaacaccgttttgagcatcaggcagatacccgctcatcattcggtaaaagaccgcccccagactgtaaatgtccattctctcatccagtgtttcactgcttttcctgccgtacattttgtccatcgcacatcggaattgttccggagatgcataccgtctgctcagtccctgtacttcctgtgttaccgacccgtccaatgaaatattaaaatcaataaggcaaatgtccccttccggcgtcaccataatatttgccggcttaatgtcgctgtgaaggattcgtggttttctcgtatgaagatagtccaaaacctcacataactcacgcatccacaacagaatcgtctcttccggaaatgtataattatggtcgatataatactgcagattttcccctgggatataatccatcactgtatatacgtcgtttcctacttccagaaaatcataaacctgcggcagatatgtatgtctaagctgttttaagatatcggcttcacctcttacatttacacggtccacgcacgtttcttttattttctttattacgatctgtttttgaagatgaagatgatacccgatatagatcactcccatgccgcctgttccgatctctcgtatcacctgatacattccgcttataatatctccgctttgcaacataacttctttcctcataaagacgaaaggcggctgtccgaatccgtttgttcagacagccgcctccttttcagccttttcttatttctgccgtatttttatcagcttcagactttttatttgctttcttctttcttttttctgatcacaaagaaccagatcagtccgcctgctacgagaacgattccgaggatcgatccgataagaagcggtgtattgttgatatactgaatccatacacttgatgtaacaagcactttgtgcatttccgaagtcgtttcatttcccgccatatcaagcgctgctgcttcgatcttctgcggttctgacgcaccttcaatcatgtaactgatctttccgcctgccttttcaatctctttctgtgcataagttgcaactgattttccgtcgatgatcacatccacgcacttaactgccgtattgtctgacaggttgatcgtcatttctctctcgtctgcacgatagcttgactcctcgatacctgtgataacaactgtcggaggcgtcttatcgattacaaagtcgatgttgcactcttttactttgttgttcatcttatttgtcgccttgtcttccgagtcgatcgtaacactgtagcggccttctttttcaaagttttcttttttgatcgtgtatgtatattctttccatgaaccttcgccgccgctttgttttactgtataatcgctgcctgctttcagttctttcttcgttccgtccaatccgtaagagataccgttgaacacaagtgaatctacgttcacctctgtaacaacaagatctttcggtttgttcgcatatacatcatcaaggaacttctccgttgtctcagagaaaatatagtttgatccgaaacggttaactgagaacataacctctttttccgtttcatttccggctttgtctttaataaccgccgtcatagtgtaaacgtcatccgtctcttcatcatgtttgaaatcttccattttgatgctctcgccgtttgcgatatttgtacggtttccgcttaattctgtcttgtcatgtttcgcgcctttgatcgtaatatcaacgccgctttccatgtagtttacatcactgtatttcacaccgggagcaactgttccgttatttgccgatttatcttcgatatcgaagaactcaacttccggatctgtcttatctaccgtaaatttatcctgtgtgtaatctgccgctgcatttcctgcaaggtctgtgtaatcaacatcaaacgtataatctgcgtctgcagagaatgttacgcttgccgtatgcacgtctccgtttgtgctccatccgccaagtcccggagctgccacgccgcttccctgcaaagctgccgtgatctgtgcgttgacttccgctgcgttaaagttatgctcgttgactgtaactgtcgccgttctgttcgcattgaaatatcccggtgtagccgcgctgttgttgtcgtaagacacttggatcgtcggaactgtccggtcgattgtaaagtcgtctacacgattgtagcttgatgcatttcctgcaaggtctgtcgtctcaagcgtaaatgtgtaatctccgtctgccgcaaacgttacctgacatgtatgtgtcgcatcgtcagatactcctgcgttcgcactgtgtgtccatccgctgatcgccggctgtgtgccgtctgtgttcgtgatgttgaaacgaactgcggactcgtcaaagtttctctctgtcacaacaaccgttgccgttcttacgtctttgtagtatctctcgttgagaggtgtgttcaagtcgtacgttacggcgattgtcgggtgagtgatgtcgatcttaagatctttcgtcgcctctgtttcatgtcctgcattatcaacaacttttacataaatctcaacatcattgctgttatttaaacttgccgtcactgtttcatttttcacaagcgactgcacgcgcccgtctaatattgtcaaacctgctttctgcgcgctttcctgattatttttactataatcaatctctaattccttattataatttcctgactgtgtcaccgcaccgtctttgcgcacctcgtaataaacttctttcagtcctgagtatgtctctccgctttccggatcttctacgttaatgctgaacggaacatccttattgtaaattccgtataacggttcagccgctgtaatcgtaatcttcggctctgcccacgttctgtctaacaccgctatttccttcggatacagataagtaacatttccggcatagtctgtaatcttcgcatatgtcaaaaactgctgttcttctgtcattgtgaacgacttattatttatattatcatccttttcgctatcacgattccactctcccgaatcagccaactttttccaatctgtgatcttttttacttcatctgcacttttaatcgcgtctttcgttgtataatactcgatcgtcttcacaccggacgttatatctgctcccgtcactttcacattataattgtcgtccttgaaaatattaaacgtaatcgtattccaaaattctgcataccagttttctgtaccatctacgagaatctttcccgacggagacgttttatctaccgtaaatttcagatctcctgtgtttttgcttctgcctgacaagtccgtatagtccagtttaaacgtgtagtttgcatcattctcaaacacaaaaccgatgcgatgctcatcgccattatgagtccaaccaaccgggtgatcatctgacgaagcagctgtccaagtgtccgcctgttcctgataattcggtatctttcctactgcctcttttgcggtaagcgctgtctttacctgcgtgttttcaccgcctttttcttcaaagacaaaattatcctttaaactaaagaagtgctctgttaccgtcacgttcactcgaatcggagcatttttcaacttaacagcattttcatcattaagcggcttccacttattgtctgcatctaaatattcatatgtgtactcgattaccggcgcttcggtgtcaactgcaaatttataagtttcttctgttgttccttcattaccaaacatatctacacaatatggtttgatttcgtatttatcctgatcatcaaatgtaagttttactgtaacgactctattatccgtataattttcaaaagaattcttgccctcttcatcctctatctcataagtaattccttctttttccagtccttcgagcatcactttccgctcttgatcgtcttcctctctcttcagtataaagtataggttgtctttatactcttcgccaactgggaaatttctatctgtgtatttaatcaccattacagtcgtgtcttgataatatgaaaactcatctttctgagttatcggatcaccattcttattttcaaagcttacagaaatttccggagcctttgtatcaaatgctaactgttgctcaatcgtctcagatacatttccggctgtatcatatgccttaatctttatcttagacttattcgttcccactccatttattgttcctttatttgccgaaacaacgcctttaaccactatggaagacttattttttaattcttcgtaactgaaacctgattccgatgtcggccattcaatgatatatgaatcttcatatgtttcgtctgcatcaaattctttcgtggtcggagttattgtttcaccgtctttgctcactattacttccagtttcgaaatacttgagaaatactcttctggatcttcaatcttaagctcgtatttagcatccccttgataacacagaattccatctttttctgatacataaccaccgtcttttgatgtatcaaaagtacattctactttcggcgatgtcacatcaactacaatgccgtttgaagcatatacggcttcatttcctgtattgtcaatcgtcttaacaagaatcagataattattttctgccgcttccttatctttcgcttttccgacagtgatttcgtcttttccgtttttatcgaattccaatttactccaagattgttcttgcccgctatctaccttttcaataatacttttcacagcatctttatctaattttaacgccgtttcatctgttcccatttcatatacgcaatacttctgcgtagtcgtgttatgcaggccgcttccttctacagaatctcccgaagtgtccgaaacgctgatttctgccgtatatatctcgtttttgaacatattgaaactcaagctttcaaaagcatctgaatattttgtcgtatcataatctttaattacagctctcggcgcttcattatcgatatgaagccaatcagttaaatttgttacttccgtaactgtgtttccactcttatcttcactgttcttaagataaacttttacgttctcaactactttatcctgtattccttcctcaggtttaagctgttcaagtatattctgtgactcatccgactcatcagatacgtttacataactatttccgttatctacactcatatacacttcatcataatattgtgtagcctttacattcatcttcagcacaggggttccctttttctcgccgagttcatcttttccgccaatgcttacccaaactttttccagctcgtcagcgccatttttcacgccgtaaatcccgtttgtcgttcctttaagatcaatttttttcaaaagatcttctttatttaaagtctgttttgtaactttaagatctcccttataatcatcctcttcaataaacttaaactcatagttttcgctgattttattttcatttgtaatattcggaacgattactttataagctgcctcattcacatgcagagtttccggcgctgttgcccccggcaatactgttatttgatcatttcccacaagtcctgtctctaatgaattcacaccttgcacttcttcaggaacaactccgttaccattgcaaagtgcaactaatcccgtcatttcttctatcgccgtttttaaattctgtccataagctaacgacactgtctctgcatttgcagacgtcaaatacaacggtctatgtgtaatagttgccgcattctgaactacattttgcccttcttctacaactaactgatagttttccgtgccgttgccttctactgtcatataataaattccggcagcaactgtcacgttctgtggctgtgcttcattctgctcatttactgcaacatctgatcctgcaatcgcagctttctctttcgggattgtgattttttcagtatttactgttcccgtaagttcgattccagtatttccgtcatatactttacttgctttattccatgttacattctcaaacgaaacttcctgcctctttacagtcagcgtataatctacgcttgcttctctgtagaagtttccttctcccgggactgctttaatcttaattgttacttttcctgcatttttcggaattacatggatcgtatgatctgcttccacgcgaacgaccgctacattttcagcaagtcctgtattcggcgcgtcttctgactgtgcaaatgcaacctctgtcgcaagcgttcttccttttaatgtattttcaatatcggcaagagcaattacgatttcatcattccagtgctccgttccgtaagtcacttcttttgaaacatcaccgtctatcgtaattgcctgtgttttcccataacttccggttgctgttgccgtcgcgccttcatatttttcattaccgctatacacggcttcaaactgtttcgcgccgagaagactgtctgtctcatatgtatattcgactgtagctgccgcttctgctttatagagcaaagttttttgaccgcctgtcacatcataaaatattacatttcctgaaacatcggctggaagacctttggctgtcaatataacagaactttgatcgtctccgcttggctctttcaccgtcatactaaaaccgttaatctgatttttagacacgtttacggaaactgtttttgttttcaccccgtttgtaacgctgatatccgcagagccttcgccttttgccgtaacctttccgttttcaacagatgcaacattcccatctgttgtgctccatgtataagcaagttcttgcaccggatttgttactgatatatcatatgtttctccgactttcagactaactgaatctgtcgtcggcaaaagtgtaatctctgacattgtaagcagaatgtcaatatccgctttctccgcctcaaccgtaaaccgaccatcttttgttgtctcatatccggttttctctacttcgtagttatattctactccttcttttaactcaatttctttacttgtctctccggctttaacctcgatttcctttttcttctcatagctcggatcatcattactttgtaatttcaaagtaagtgcgcctatcccgcgtgtttcctctgcggcatctttaaatttcagcgtaactttttttgcatcgccagccgccgcctgaaccgtcatacctgcatccggcagtacccaagtcagtaccatcgccagcgcaaggacgagcgcacatatcctttcttttagtttttgcttctttttcatgctttcatcccttcctgttcttctttgttttgccgttcttttgtctgtctcttcctctgtctgttccggctgttccatatatagaaatacacgtttccgttaaacagaaaatgtgcataaacccctgcaagcgcaaataccagcgccgtaattgccagaaaatcattcacttcgatatgaagcgcacaatagattgtcgctgcgatcgacacgatcataactgcgtctgccgcaatcgcaggcgtattactgaaaaagcagatcactgacggaagtttccgttttcctgcctgttctgtcagaggcttcgcctttctcgccaaaaacaaatatgctgcgattccaagcagaagaccgagccaaaacaatgcccccgccgcatatccgatctgtgtaagatcgccgtttttgtcaacggcaaacggaatcagcgccggagtcagtgcagacaggagaaataatcccatcacaccgagaaatcctttttttactgttcttggtttcaatctgtttccttctttctgctgcaagataaatcgattactatctttttttgttttctttaaatgatctcattcgtatggatttccataatttcttttttaatgacgaaattccattccggtttttcatttgtctttgcctgaacaaacgatgcttccatttccggcgtcaataaagttgtttctccgaatccggcatttctttgtgccgctgtgccgccgtttctgccgttgagcaatgtcgtttcttcacttccgctgttcagcaaagtcgtttcttcgcttccgctgttcagcagagttgtctcttcgcttccgctgttcagcagagtcgtttcttcgcttccgctattcagcaatgttgtcgcttcacttcctccgttatcagacgctgcctgctgtgctgtgtgaagctgcattgtatgttctcttccttccggatctgccgaatggtaaacttgttctgtgtacgccgcgccgtctgcctgtccgcctgctgcctgctgcgcagacataaccggaggtatccttccgcttggcgtcgtataaaggtctgaacttgtcggcgcggaataataatcctgtcttaactttcctgtctttgcattttcttcttccatctgctgaacgctctttcgctgcgcccttcccgtgatagcgttaaacacatctcgtattttaaattgaaagaaaaagaaaacactcagcgccgcaaataaaattgtcagcacaagacagataataaatccgatatgaagtatattgatgatctgttcactttgcatcagcatcccctcctgttccccgggattcaaatgctacctgcacatgctctttcgcgctgctgatattgttcagaatctcctgttttttctgctcgttgatatccgtctgatttgcattcgtcgatgcaaacgacgttgtctccagcatctttttcgtttcttcaagttctcccagaagttcgccttttgtcactcccgcacgtttgaaatcaagcgcgttttcatcgatcctgtatacaagttctttatacattacaagagctgtctcaggatttaccacacttgtaagatccccgtctgtcaggctgacaagatcgatccagtagtctccgtaagaagttgtgctatatccgctctcatccactgaatcaagagaagcatagtacgccgcgatacttgcgaatcttttcgacaattcctttttatctttatcaaggctttcgctttccgccgctttttcaaaccatgtttgagacattgattttccgctcttttctcctccctcatatgaataaaagtacgccagtcccatttgaaaagcgaattcgtcgtattcttctttatttccttcaaaataactttcatttgttcggtttccgctacctttatatccaagaaccgacgtaagccgcgctgtctcttctctgtcaaaatcattttccgacccgtctgctccgcggatgcataactgaagaagattgtgatacgcttctcctcttcgcgggtctatcttaattgcatctgtgtaatatttttcccgttcactttgttccggcgagttcgccgcctcttttatatatccttcataactgctctttgtcgtcatcgtctctccgactttaaatccgacgcatccgagaagtgatgcggcagtcagcgaacacattgcaacgaacgtccgccatttcctcatctgccgtttccggtattcctgatctaattctccgtaatgctccagcgcgtacatcaattccgcgcacgactgataacggtcgttcggatttctctgcgtacatttcagtacgatttcttccaatcctgacgagagcgccggattccatcttcggatcgggtacatctcatacggcggaagactcggattatgacctgtcagcagatggtacatcgtcgcacccagcgtataaatatcagtacgggcgtccgtctgcccatgtccgccgtactgttcgggcgctgcatatccctgcgttccgagacaagaagtatcttcaatacttgtctctttaaactcacgggctgttccgaagtcgatgatcatgatctgtccgtccggcttcagcatgacgtttgccggttttaagtctctgtaaatgatcggcggtttcctcgaatgaagatacccgaacacatcgcagatctgtttcgcccattccacaacccgttcctgcggctgcgcgccttcttttttcaaccagtaatcgagcgcctttccttcgatataatccattacgatcaggaacgtatcatccctgtcgatcacatcgatgatactcggtaaatgcggatgatttaaccgtttcaaaatgtcggtttccgcgatcagcccctgccgtacaacttcgtaatctttcacgccgtcttttcggacttctttgatcgcccattgtttatttgccctctcattcatcgcaagataaacgacactcattccgccctgaccgatcttattcagtattttatatttaccgtctataattgatcctatttccagcatatatttatcctctaacacaccttaaggagaacgactgaaatattatctttctcctgacgtgatttattcaattccgtacaatagaccgctgcatctttcagcgctctttccgtctccattttttcaggattcatcaatttataaaattcctcttccgtgatcacatggcggaatccgtcagagcagagcatataaacttcgcccgacttatattctccctgtgtaaactccggaatgatcacctcgcttgctccgacgcattgaagaagtacgttccgctgcggatgcactctcgcctcatccggcgtcattctccctgcatcgatctctttttgtacaaacgtctgatcttttgtcaactgagtcatcccctgcccgtcaattttatagactctggagtcgcccacattcatcgtataatatttcccttctgccatcagaagtaccgccgcagttgttcccatcgcaatatgggaaatctttccgtgatcggcgattctttgatttacatcaaggatcagtttatttatttcgttttccaattccatacggttaatcccatcagccgtccttctccgataaagaagttccggaaactgaacttcaaaccacatagaaaatgccttgatcaaagcggcgctggcgacctcacctttggcaagaccgcccattccatcacaaactacagcaagcataacgtcgccgtagtctgtggatgcctctttgattaagacagaatcctgattcgtattctttttaattcctctgtcactatgtacaacacttaaaaatcccattctgcctctcactgccctttactcttttgtcaattataatcagcgcttttatcgtttagatcatgatgcatgaaattcaaattcttcatccgaaatcttcaatgtcgatctgtctgtcagcagtgtttcctgatatggatttaactgaactccgtttacaaacgtgaagttgcttgacttctgatctgccgcatagtaatcagaacctttctttgtgatcactacatgatatctgctgacagaagtattatcggaaatacaatagttcactcttcttctttcttttccgattgcaaagttctgtgaattgatcgtaatcttctcaccgtttttctttctgatcagataagcgcttcctgctccgttaagtaacgttgtttcgcctgctcccgaatcaagcaaagtagtctcgcctgctccatccggctctgcctgatacggctgtgcgtaaggcgctttcggctgttccggtgcacggttcggaggtactacagctccgttcggctgctgaggcattcctgacggaggaacatttccgtttcctgcctgtgctttctttttcttcttgctgttagaagaaactacgataataatgattactactacaacaacgatcactcctgctgcgattccgccgatcaacaggaagttcattccgcttttttcttccagattttcaacagcagcttttacatctgatgttgccgatgtcacctgtgcgtctgtagcctctgtatcgttcgcaactttttctgcttctgagattgtatcgttgagaacttttacactttcttctgtgtaatttttcgtatcaactgctttcgcctttgtaatttcactcttaagcgctgttacaagatctgcgtccggtccttctttttcttccggctcttcttcatcaggagtctgtgttgttgcctgtgcccctgcattaatataggagataccgaatgtgtcaagaccactcttgatcgcgttgatctgtactgcgtagtatttctgatctgagctgtttccatatgtaaatgtattaacaccgattaccgacttgttggaatctacaagaggaccgccggaatttccatggttaagctgtgcagtgtgctcgaagaaatcagctcttcctccgactgtcagcttagaaatcgttccgtctgttgcagatacgtcagccgccgtattaaactctttattttcgatcgagtcttccgggaatccgtatgcgtttactgtctgtgtctgctgaactgtactgctgtctcccaaagcaagcggttttctgtcataaatcttatccgacagtttcattgctacatagtccatcgtctgactctgcacactgtcatggatcgttgccagcacgctcatgtcacggttcgcatatactctgatcttcagatgcggatcgttgtcttttaattcggataatcccaacgtttccattgccgcgcttctgatcgtcacaccaggagcaatctcttcattcaaattgaaaatatgatagttggaaagtacatactcttcattgatcaaaaagcagcttccgcctgacaacgctacactgtttccgttatcatcttcatactcaagccatacctgaagcgttccgtccgccggattttccgcagcgcttatcgctttggtatttcccgtcgatccagtttctgctgataccgatacattcatgccgatgatcatgcacatgagtgtaagaaataccaacagttttttcgttagttttttacccataatctcttcctcctgctacatataatatttgtcattatatgtataatatagggttttcctttgttctcaaagatgtgtcaacctttgtggtcagcttttttgtcggatttttatagattttttatatttgcttttatataattatcctgtattagtttgtctttcaaaaagtaatacccccccccctggtattttgccatgtgggagtattcttttttaccgaggaaaacatgtgagagggagattaagattatgccggattttgcgacattattatcagaacatatccacaataaaaacatcaaaacttacgctcttgcccaatactgtaatttggatcgatccaatatgtacaagattataaaagggcaacgaaaaccgtcttctttagaaatggtagaaaaaatgtgtaaatttatgcatttgtcgccttcagaacaggccgatatggaagaatcatatcacattgccctgatcggacgcgaaaactattacaggagaaaagccgtacaacagttttttgaagaattccgtattccgacactgcagcttccggcaacttcaccttccaatgcgtccgattacgccgacaatgctaccttgcttcattctcatcttgagatcaatcgctcgctcctttacatcatcgcctcggaactgaaaaaatcaggtggaaagatcagtctgctcatccagccggattacacgtttcttatgaacattcttacagcaggtggttatgcgtcctcttctgtagacatcgatcacattatctgcctgaacaataaccagaacgtgtcatttgcacggcaaaattataatctgaactgcctgagaaatattcttcctctgtacagtaatcattatcaatataactgttactattactatgatgatattgatgccgtaacttcagcgtttgctttatttccttatgcggttatcactactgaatatgcctgtctgatttcttcagatatgcagtccggctttattactaaagacccggagtcactaaaattattttcctatctgttcagtcagtacctggcgcagacaacacccctgcttcgcccggtcacagatttaggcggacaaatacagtatgtcgaaaatacaatgcagaacataaccgaaggttatttctttcaaatgcttccgtgcctgacaaggtttttgacaagagacatgttagagacttacattgtaaaagatcttccacaccgaagcgaacttctcgacagacttcagaactatttacatgaacttcaatcaattcccgcttctgccgaccttacgtttatctgttctatcgaaggaataagaaagtttttaaataccggccgcgtcggagagtatcctgcatatgcatatactccgctgaacttaagcgatcgcctctttctgattcggcagttggcaaactccatgctcaacgagcataatcggcttttgaagcgggcgatcggcatgatcgaccatgaattttacctctttgccggacgccagtacggctatttcatgtttcagacttcaaatacagaccggatgatctacctgaacatcgaagaacccggactgctttttacattttttgatttttgcgatacgcttgacgatgaaatattcttcacatctgaagaagcttatagaaaaatacacgatctgattcaagaatacagtaaataaaaaatcccctgaccgccgcagatgtttcttttgcatctcgctgtcagggaactttttattcttttttgcaacggcagattccttccaatattccgatcaattccggtatatctttttttaccgtatcatatacaatcgtaaggtctacatttccatattcatgtacaattcgattccgcaatcctttaatagctctccacggaatggatggatatgtttttttaaatttttctgtcaatttctcggaattttctgccacctgtattagccgaaacataatagaatcaacaagaatctcatcctcttccaatttcgattttgacaggctctctgtatgtgttctaataaaagtgaggtctgtaataatcttatcaatataatattggtcagtcttcttattatccataaattttaattccatcctttaatatttcatttatcaattccaaattagactctagctgttcacggttcagaatatcaactcttttatgaagtccttctcttattgcttctaccaaaccataaaaatgtattccggacaccgacgttccaattaaaagatctacatcactagtttctgtcgcttttcctttcgcataagagccaaaaagataacaatactctatatcataatctgcaaatacatcggtacacacatcttttatcttctgtatgcttaatataccatgatcttcatccacaaatccatattgttctagtttttcgagcatatacaaatattttattgacgtacgcttagctgcatcagtttcataattttgataagtacgcaatggcactcctaaatatttcgcacattccgcttgggttagttttttctgtttccgcagttctctcagcatcatatttttccacctcattcaaatgctaccataaaatatggaaacgcgcaattaaaacgcgcaaatttcgcgtattttttgcagtttaagcacgcatgttttgcgtattattacttatcaaaaaacgcaatttctatttcttttatatttccataaattcttgcacatttattatacccgtaatcacctcttattatcatctacataacattttcatccccacaaactgcacatccactctaatactttcagcatactaacccccacactcagaacatctttcacacagaaatgaattttccgttacaaaaaatcccctgaccgccgcagatgtttcttttgcatctcgctgtcaggggattctattattttactgttttattttgttgccttatagtagttgatcagacatccatccagaataatctgtctctcggcatctgtcagatccccgagtttcagctggatctctttcaattcatcaccaacaacatatgcgttgataacgtctttcttttcctcaactgcttttctcacattcggaacgaaaatgtaatctccgtttttaaacggaagcgcctcatgatccgcatctgtcaaaaatggaagcattccccagttaatcaggttggagcgataacgttttgtcgcatattctacagcaatgtttgcccagcctccgagaactttctggcaggaggcagcctgctcacgagccgatccatctcccggttttactgcgaagatcgtacttcctacaccgacatttccttctccgacttccggatacgctgcctggatcttagacataaccggtttcagttcctccagagcatcaagaggacatgttcctgcctcgattgctttctgtgctttctgaacttcctttgctcttcccacatatgcgggatcttttcttgaaagtgcaaactctgcaagtccaagcggattagaacgatacgaagacgtctctcctgacggaataagttcatctgttgtcgttaccggatcgtggatttcagatacgaccttcacgatcagattctcaggaagcgccgacatctccggccagtctttaatattcggaccaaactggatctctacattcggatctgctttgcctttgctgtcgaacacacgattcgcataaatattctgatcaaaatgatacttctgtcctttatattctacatcaaatgccgtagcaggcgtcagatatcctttatttgccgctgtcgccgcaatggaacgagcatccataagagcaacagaagaaatctgaccgctctgaagcttgcttccttcacggttcgggaagtttctcgttgtatgacggatagagaacgcattatttgccggtgtatctcccgctccgaaacacggaccgcaaaatgctgtttttacaactgttcccgcttccataagatcggctacgacaccatttttcacaagttccatataaatcggcgtacttgccggatatacgctgaacgtaaatgcatccgatccgatattatgacctttgatgatatctgctgccgcacagatattttcaaaaccgcctcccgcacatcctgcgataattccctgatctacatagagttttccgtctcggatcttgtcctgaagagaatactctacagctccgtcaagacttacgagagctttctgctctacgtcatgaaggatgtctgacagatttgcgttcaattcatcaatcgtatagacgttgcttggatggaacggcattgcgatcatcggtttgatctcacttaagttcacacgaacacatccgtcataatatgtaaccgctcccggatttaattctttatattcttcttttcttccgtgaatctcatagaattcttcgatcttttcatctgtcgtccagatggatgaaagacaggttgtctccgtcgtcataacatctattccgatacgaaaatcagcgcttaagtttttcacgcccggtccgacgaattccattactttattattaacatagccgtttttaaatgtagccccgataattgcaagcgcaacgtcctgcggacctacccctttcatcggctcgccttcaagataaacagcgatcactcccggcatcttaatatcatacgttttgttcaggagctgttttacaagttcaggaccgccttctcccatagccattgtaccaagtgcgccataacgtgtatgactgtccgatccgaggatcatctttccgccgcctgcgagcatctctctcgcaaactgatggataactgcctgatgcggcggaacatacatgccgccgtattttttcgcacatgtcagaccaaacatatgatcgtcttcattaatcgtaccgccaaccgcacaaaggctgttatgacagtttgtcaatacatatggaatcggaaacttctcaagacccgaagcacgggctgtctgaataattccgacaaaagtaatatcatgtgatgtcaatttatcaaatttaatctgcaggttcttcatatcagaagaagtattatgcgcctctaacacgccgtaagctatcgtgtttttcgctgcttcttctttagaaaccgaaacctgtgcgctccctgtatcttcaacaatctcagtgccattgagcaaatacacaccgttttcatataatttaatcatatgaaacctccttttcgtttgtcaattttacgctatttctatatattatcatacttattatgaaaatgtaaccaatacagcaaaaaaacaacttctgcatacagtaaaaaaacaacttcttccggaatcgttcagccatacaacgaaaagggcgggaatatcttccgcaaacgaatttccggaaagacctcccgccctttttcaggctatgatatattttttcaagctttatctctcgaaatctttattcataacactgcagggtaatattttcgacaagacccgtttctgcatctgtttcaactgtacatgagttgtcgtaactttctttgtcataccagtaataagtatttccatattcttcatctttatacgaatccgtcggttcgccgtaagctgcaagaacgtccgcttctttcgttccaaccgtaattccgcccgggaacaaaactgtcagtccgccttcttcaagatcataatcatctacagaaatcgctcctacgatacaatctttcaatgctttcggatcatctcctgtgtttaccatatccgccataatcgtatttccgttttcgtcttcaaaccatgccaactcatattcgcctgcatttacaacatagtcttcaggtgtatattctctgtcgagtttcagacctgtggcttccagatctgccagactgcacggaagcttaagaactttatcgttgatctgaaccgtatagctgtcccatttcgcgccaagttctttactctgctctgccggtttatccgcttttttatcgtcgtctttatcttctttgtcctctttatcgtcagacacttctccgcctgctttttcaatcacatcgttcggaactttaatctcgcctacactgtcatattcatggtatgtcacttcgatcgagcatgccgaaacatcaacgccttcttcttccatcgccttttccataatatcctgcatatcgaaagaaatctttgccggaagaatatcatcttcataaacggcgatcgtacacggaagttcaagatctttgatcacatcttcgtcaatttcagaacctaagctgtctgccatacctgattccatcatgcccacaatgtcagagcctttaatctcgcctttcatctcaaaacatttttcgccgtttacttccaccttttctttggacatctcaaaagattttgcgtgtcctcccatacttcctgtaagatccgaaagttctcccgccatatctgccgcagaatcatccatctcttctttttgccactgatcgttcgccatcgtatacacaatatactgatctttttcttttacagtatacatttcaatctctgttccgacattggtgcccatcattttcatgtctaccgcgcctttggcgtgactttctcctgatttaagatccatgtcgatatccatatccatctggatgccgatcgtagttgtatcgtctcccatctccatatccatcttcatgtttgccactaccgactctgtgtctttcatgtttttcgccatgtcttttaataagttttccggagtcgcctttttcccgcatcctgacataagcgccgctgtcatcatcgctgccattcccagtgtcactaatttgttcctacgttttttcataccttttcctcctcgttatatataaatttatattatatacttttatattttctgctctcgctctgttttcttttatttttctcttccttcttcgtctgttaaataaattaccccaagccagtaatatcctcccagttctccgcttccgtatccttcgactacttcttgtgcgatcttcataaactctttatcgcttaatgtataatctgtacgcaataccgcaattccctcttcttttaattcatttttaagcggctcaaaaattttatttttctcataaaattttccttctatccggtaaaactctttgtcatccgactttgattcataatctttcaccttatcgtcaagtacaaaacgttcgtcttctacaagcactttgtctgccgcgtaatcgggaagatttaacagcgcatttaagatcaactcattatcgttattcgtggaatctacgatcctccactccccgtctattttaatcttattccatgcgtggggaagttcaccgtccagatttcctgtcacaacgatacattccagtccggcctgctgcgccagaagtttgaatgctccggcataacttgaacacactcctgttttatttaacaaaacgccatacggtgtaaaggaatcattaaactttgcatcgactccggcaaaatcgttttcttctgcattttcaagcgcgtccatatcgtattcagcagtatcgcacagatattgattgatcgccatttctttctcaagttctgtcatatcgtccgtaataatactgtctacaacacgttctgcctctttcgagatttctttttgttttttctttatttcttccgattttgtatcatatttgacatgcagtgtctttccgccgtttgcgattgacgcccccgtcactccgagtaccattgggttttgataaaccgcttcttcccatgcatccaacagataatccgtatctgcactttccggaaattccttcaaactgatacttgtgttcgcattgagcatatttactgccagatattcactcaaagcgctatttgcagtgacttcatactttcgttcactctctcccgaagactccttttcctctttttcactttcggtctcgccttccactttcatctccggagtaaccgcacctgcacgatttcttaatttctcttgtctgattcgaaccttttccagttcttctttccaagtatcagtattataactttctacgacaacaactccgtcaaatcctgttccgtcaatcttatacggaacttttacgatattttcaccgctccatgaagccttctcttccttcgcgctttcaaaatcataattaatcagcttttgtacaagcgttccgtcgcacatcgtcacccatttatatgacggcatttcgccgaacgactgcgtataatttgaaccttcctcattcaggctcatcttcacttcttccgtaaaaggaactttacgcgcaatatctgtttccctgaacatattgcttaaagcagatgttccgtcctttgatactgctataacgcagtaataagtttcatactctgtatctttcggtatcgcttcgtttccctctccgtacttttcaataacgtatggctcccggcgatccgcttccgacacattataagtaataaactttgccgttgattcgggaatccattctgttccttctgtttcaccttcgacccagccgtctccggataatcccatcttttctgaggacgtcatgctcatcacataataacgctctgctcccggcacttttttccatctgaaaaccggaaatccttcctcattaatcccaagagtaactctcggtgcattcttaacttctgaatcgacggtaaacactgtcactatcggtttctccagtttttctccggtttcaagatccacatattgaaccatataatactgtggaagattaccccagtcattcaactctcctttatcaaacaaagacgaatctgccgcttgatatcccggcgcatcctcgtcaagaccttcgctcatgatcccgcctacactccatctcggaggtgtaactgataattcctttgttttttcatcccactcaaaatgtgatccgatctgataggtgagttccggatctttatacacatttacgatctgtgtatattccgtaaatccggcattcattatatcaaaccccattttcagcttaagcctttcgtcacgggccacgccgcggatcggatcggcatattcatacttttcattatatttttttctgatagaatccgccagttttgcagtctccatcgttgtcttcccgacgtttttctgctgcggacctccgcatgcgcttagcaagactgccgttactgccaaaacactgatacatgttttcaaatatttctttttcataagcatttcctctttgatgaacaacaaacagtttttttttgcgtttctgcttataatacctttgccgcatccaaaaggttacgtcttttataaagtttttttcaaatattctgtcagattttctttatcccctttttcttctgtcacataccagattttcccgtctttttcaaacactgcatgaagaattccgtcttccgtttttcctatatatactttttctccgtgaacccttcccggcttcagcttccacagctctttcgggatattctcgtcatccttctccgtatacttttcaacttgaatatcttcccactctctcgtctctgatatgtccttttttccgagatttaatccaatctccatctctgatgaagcaaatgtcacatcttgtatcacaatcttgtctttaaacgccgctccccatataccaaggcagacaaaacaaaagcatgccgctattgccgtatatttccacaatccgataattttgcggcggcgctcctctctttcagctgcttttaccgtccggttcactaattcttccgggacatgaatgctgtcatttactttcttatattcgtcccacacagtcaaactctcctttcaaagcttccttaagcatccccctgctgcgatacaggcgggtttttacagccgactccgaaagttccaacatctcagcaatctcagaaacagaatattgttcatagtaaaacaaatgtactgtactcctgtaatctgccggcaggcgaagaactgcctcatatatgagattctccggcagatccatctcataactgtccgtgctctgaacatccctgtctatagaaactgtctttttccgaaacgcactatcaaactgtttcttgcagcaattaacagttactctcaaaagccatgccttcaaatgctctctcccctgaattctttctttatactttactaatcggaggaacacttcctgaaacacatcttctgcttcacttttatttttcatttgtaccagagcaagccgataaaccatatttccatgaatacggatggcttcttctacattaatttcttcatgactgccctctgtttgacctctcatatataataccttttcccgtacttaaacgtcacatagattttatgtttattttttgattatatcttactttttttcttcatacaagaacaaagtaacaaacccggactttggctcgttgcacaatataaaaaagaatcctgctcgcaagattctccgcctgcggcgggtcgctttagcgacgtacttcttttccgccgcagtgcgctcctacacggagcgttttttatgctatggaacattacggagtaatttcctatagcataaaaaatccgaacactgactaatgccaatgttcggatctttatttaaagtggagaatacgagagtcgaactcgtgacctcctgcttgcaaggcaggcgctctcccaactgagctaatcccccatagcgttcttagaacttttataagatatcatattctaagaaacttgtcaagttttttatgaaattttcgacaaattcatgccaaaacatgcagcttccatttcccacttttcgtattcgttgtaaaaaatatataaatacaccttccagacaggggagaaatcaaaacttatcccccattttatagatttaactatgatcaatttatacgaagataaaactcttctatcagacgagcaatattttcttctgtatcttcaagctcatctgcaatttcggaaattgtttttcctttttcgagctttttttgaatgagagaacaggttttttgaagatttccttcttctcgaccttctttacgacctttattaagtccagcctgttctccactttgatatttttcgcattaaataatcagcaagtattcctttttcaatgcactcttttatcgcctttttataaggttcttccacaccggagatctgatagttctgcacgatttccataaactggctatactctttcagcacttgacatttctctaaaatctcatgatgttcttccggtcggatattaataacctttacttttaattccaaacttggttcattatcttttacaatataagcatctgacaagcacagttctttttcttttgcccacttttcttttcctaccataggctctcctttcatgtgcatgaatgagtcctatcgtacaagtaagaaaacactcttaagttttttctctcaaagctttttctcctaaagctttctcttataactttcggtgaaacttttttcttctgttaagaatcagtatacgaaaaaaagagacgttctacaagactatccatgcaaatctgtttcgttgtgttctgggtaattttgagggaattcctctgaccgacgaagctgtcggcatctttcacaaaaagaatttctgtgagtggatttatcataacatatctcttcttcagagacaatgatatattttatttatacattcccctagagcgtgtttgaaaaataaaaattgcacaaaacgcatgtttcatttccctttttcatgataaaataaagaaaaaggggtgttcactatgttgagacgatatgagttaacagatgaagaatggaaccgtattgtaccattactccctcctgaaaatacaggaaagcagggacgtccacgaaaagataaccgcatcattcttaatgggatggtctggttagcacgcagtggtgcaccctggcgagatcttccagaacgttatggttcctggcaaactgtatatagtcgttttcgtaaatggattgatgacgggattctggataatatttttcgcattctaagcctggaggctgaactggaagaattatctatagacgcttccattgttcaggctcaccaacatagcgcaggtgctaaaaaagggggcctcgaatgaaatcggacacagccgtggaggagccagtaccaaaatccatgcaatagtagattcttatggctatccagtgtactttatgatcagtgaagggcagcgtaatgatatcaattatgcaattcctttactggatcatatcgaaatagatggaagcaaagttctggcagaccgtggatacgacagtaatcaattgatagattacatttacgatcatggcggtgaaccaaccattccatcccgccgaggagctaaatttgaacgtcgctgcgattggtggttttataaggaaagacatctggtcgaaaattactttctgaaattgaaagcatttcgccgaatagcaacacgttatgataaattagcattcacctacttaggcttcttatgtattgtctcgatattaatttggttaaaatgaacaacttaaaatgtttttcaaacacgctctagtctcttttactgacaaaaagaaaactaccagaagaaaactatttatgctcataagaatcatcaatttccccatctctatttctccgcttataatcgggaatatgtataatacattttcttctgttaaaatatcgaattgacagaaagaccaatatcctagcgaagctagataacctataatgacattatttcctaattgtgaaaaaagaagtcctaaaatccccagaaaaacagcatacagaattgtcacggttacatattttaaaaatggaaaactgcagttttgaagccgcataatacttgcgaatatagtaatcataactgtaatcatccagaaactgcatatcagccgaatgcttacgctctttctatatgaccatactttcgtataaacaatctcttttacggaaacttccaattcttgccttattataggaatgaaaagaaatacccctatcagagctaacgattgtccgaatacatctgcggaatgaatgttgtctaaattagaaattcctcttataaccgggataatgaatgtatagacagccgccagtaataaactatttttgaatgtgagcggtaaatcgatccttaaaaaatccaaaatgcttttgcaaaaagaaatcataatttaactttccacctcttttcttgttatatactacaacagataatgctatcaatatcaaagacaagatcacaaacagtcctctattcaaacagatcaaattaaaatcttgctttataagttcagagcctcgtaataaattatgccgtatcatcagcgtaaatatttttgtatctcccgataacgctgtcaaagaggtgtcaataaaccaccatacaaactgtaccaaaatagctatcggcatagatgttaaaattgtcaagaacattcctgaagaagtaacaatcattgctgtcggtaataaccaccaaacaatatatttcagaaaagcaaacacatctattgcaataccggtttcagcagaaaattcaatcaatggaattaacgactcaaaactcaaaatagttatcggcaataacactgccgcaagcattgctaagaaacgaatcgtaataagctttgttgttccgatctgtttacagtcaatcagctcattcatacggtttcgtctatccttcagccaaaagataactactaagaacacaggatataaacctaaatctcttgtcatataatcgcaaaacaatcttgcaaaagcagcagaaactttatcatcataaatcgttttctcatattcattcattgcttcttcataagtcatttctgccagaccataatattgcaataaattttccatagaataattagaacctgttccaatgatactttctgcttttttcataagctcttgaaattcctcgtaagaaacttgagctacaaattgttttgtataatcagtattttcagttggttgttcttcatttcccatttcaaatgtaaaagctccattttcactttgtgttccgttactgccaaagtgaataacatttccatttacagcagggaaataatcatctggaagatgattgatctgctgttcatttaagcctgttatttctttgattatatttaaaatctctttttgctcgttctcatttaaaactacttccttataatagctaaaaggatatgttgcataggaatttgcaagatattccataattagcttgtcagtaccaccgcacataattttatctggtacttctttatttttcattccatagctttctttatttttttctggtttttctaaaatcgaaccaccagtcagcccggaagaaatagatacctcatttccttgcgaaccagttatttcttttgttgttacaccgtaaaaattttcatgccagctaaaaagcagcaatccaataaacaatacatatataaagctaaaacaaatttttttcaattctttaataaacagcatctattccacctcctgcttgaaacttgataagagatacatataactgtcctctatcgtaggctgacatgaaacccattctttttttggtgcagcgtttgataaaaagcgacaagatacatttattccattttgataaatactgataacacggtatttctgtttaaactgatttaattcattttgcagaatcgtggtagtatagacttttccgtttccaagctgtaacaacttttctatttgtccttcaaaaacaacagttccggaagataaaacagctgctttagaacaagtggcttctatatcacttgctatatgcgtagataataaaataattctttccactgccaattcagaaagaagattgtaaaagcgtaatctttcttctgggtcaagtcctgccgtcggctcatcaataatcaaaattttcggatcatttaataatgcctgtgcaataccgaaacgacgtttcataccaccggataaatttttaaatcttttattcttctcgtgttccaaattcacttgttttaaaagttcgttgatacgcctcttacgaatattgtttggaagttcagtcaaaatcccaagataatctaaagcagaataaaccgtcatatttggatatatcgaaaattcctgtggaagataaccgattatttttctgatttcttttttcctttttatatcaatcccattgatttctaccattcccgttgtcggctctgacaatgtagccaatatacgcataagcgttgtcttaccggctccgttttcgcctaacattccatacattccgatcggtatatgtaaagaaatatctttcaacacattttgtttcccgtagtttttattcaaatgttcaatactaatttccataaaaaaacctccttacgttttttgtaaggagattatttcatataaaagtcaaatttcagaaaagtttccgcctattttttaatcttgattgtaataattgctccacgatccggaagattgtctaaaaatatattccctccgaatttttcactaagtattttacagatagataatcctatgccaaaatttccaccgtttgaagcggaactgaagaagaaagaagctgcggattttaattcttcagatgtaaaacctactccatcatcttgcattgaaaaatacaaataatcctctttttctttgattgaaaatataatttcttcatgtgaaaagcggagtgcattgtcaaaaatattctctaaaacttttgataacatcgctttatctgtcgatataaaatcagagtttgaaaaatcccgtataacaagttttttattctctcgtgccgctaaaatagaaaattcttttgttatgtcggcaatcaactctttcaaattataattatcttttttgatctcaatatcttccattttttgtatatctttcacacactctacatatcgttttaatctatcgacagcttctgtcatatttttaatcgttgtctgtaaggtttcatttgtaagagtttctctttcgattgatttttccaaataatcaagatagccattgagcaccgtgatcggcgttcttaaatcgtgtgaaacagaagccgtcagcgcttttctctcttgaagcatattccacattttactattgcttttgtaaatctcatttttcatatgttcaaatgtatcacataactgccccagctcatcatcagatgtgtattgtatctgaaaatctaaatcctgctgtgaaatgtggtacataccatttttcagattttcaagcggtatcttcaatttccatttgtaatataattttgccaccataaaagaagcgattataatataggcaatgggtaaggacaccataagaatcgtaatgcaccaataatataattgattttcttttgaaagttctccatgtgtatatttctgcggtacggcagtaaccccgttattattttcggtgtcattactatctgcgtctctaattacatagtctgtgatgataataggtcttgtatcaagtatttttttctggatagatgaacatgtcaatattgtaattactgaaagagcgctgaccagactaagacaaaataccgccagcaatactaatgatcgttttagcgacatcttttgaaatacttctcttatttttcccatttatatccgactccccaaactgtagtaatataacctttatccgtaaactcattaaatttcagacgtatttttcgtatatgctctttgataacaacgctgtctccattgccgtcaatgccccaaatattttcataaattttttctctgtcaaaaacctgacctgcattagaagacaagagttgtataatttcaaattctttatttgacaattcaattttatgccctttgatataaagacttctatcagaataatcaataataagatcttctgaaaatttactttttgtcttgttatgacttctttgttcgcgtcgtaaatgcgccgaaattcttgccagcaattcatttacagaaaatggcttcgtaatataatcatctccgcctgccattaacccgttgatcttatcctgctcagatactctggcagtgagaaaaataatcggacaagagataaaatcacgaatagagacacataaatccaaaccgttcatgccatccatattgatgtctaataaaactatgtccggcgagtaagataatttatccaaagcctctgccgcattgccggcagtataaacagaatacccttcaaattcaagctgtaatttcaacatatctaaaatagactgttcgtcatctacgattaggatcttatatttttcttccacaaactttcactccttatcaatgagattaaaaatcttataacagaaaaaagtcaatttttcgccaatttttaatttccctattaaaattaattttatcacaaaataaaaaaagttactgtacatcaaaatacagtaactttcagttacaaaataacattttgtttatttttccaacagccctcttctatacagatttaaaattttaacaggcggatcaaaagcggatttgtttcatataagaaacgcagaatactactcttttcaaccatttcaaagcatgcgcttcccgcctctgtcgtataggcaagcgtcatgatgagaaatccgatccacacaatgacaagcgcaagcaaaagaccgagcgctcctccggcaatatgatttgccagtccaagcaccggaagttccccaataatattcacagcaaacatcagcgccttcacaagaatgatcgccagcaaaaatgtcacaagaaacgacaacagattcaatacaagatgcgatgcatatgccgccacatatctcggaaaacttttcactcccagctctccgtaaatcgtgctgttgttattttctataagctgatctttcaaaaaccggggaagaggggcttcctcaatcaagttgatctgcacatctttcggaatatctccgatcacacttaaaatatcatccgccgtaatgccgagcacatcccagtccatctcgtttaacttggagatgtcttccgccgtaagattttccaatggcgttcctgtcagatcgatcgactgaagctgctcagacgttatctccggcataaatttctcagtaactttactttctaagaaatcatctacaggcgtatactccttaagcgctcgtgtaacatgcggcgaaaggaacagcacaagaacaagagtcaatattgttgacaaaagggaaagtccgagttttaaaaatcctctaacatacccaaaagcaatacagataagaaaaatcgttcctacaatgatcaaaagccaattatccataatctctcctatttcgtcagataaattacccgtaattcatctgcgctcatcacatagtatctgttcaatcccgaagctttgaaaatctccagcgcctctgtttttatgtctccttcaaattttacgattccgtttgcggtcacgatacagcacttacttccttcatacataataacttcgctgccttctatctttgcattttcgtatcgtcccgaaatctctttattaagtatcctctccccaaaccgatcatacagccgcagctcgtatcctgatttttcactgttaagcaatataagccctatatattggtctgagtgaaatacgctctgtatctcctgtccgatcgatatctctttttcttttttcggttcggctttccctttatagatgacgatcgagttatctcctactacaacagagcggtcgcttcccataaagaaaatgtctgccatgatcgtgtctgaatattcatccgatgcaacgatcttatccggcttgtcctttccactctctccgaaattataatagatcacttttgacttcagcacggcgtcgtctgtatgaaaataagttaccgccagcatctttccgtcgtcagacatatccatcgcaacaggataacccattacaggaacagttacctgctgctccactaaaacattgcccattgcatcataagaaatgatcttcggcgcagtttcatttttcagcagaactgtcacaattccctgatccgaaatcgccatattttcaatcggaagacttgtctcaatctcgcctttcaaaccttcttcggaaaatacaagaatgctgtttcctccgatatctcctaccgcaaacgctttttctttcacctcaatgatcggatttttcagttgtgtcgactgaatccacttttcttcgtttttcttatttaaaaaaacaacgccatcccgattgtatcgcacgattccatttgcaaaatgggcataattacttgtatccgaactatctgtcgagtacctgaccgccgttccggcttcactatacgccttattcgtgagcatcagatatgttccgcttaccgcaagagcaataagaataaccggcacaacaatcttttttaatttttccctgtgtattttcttcgttttagcacgaacttcacttagatcatcggggggtgttactattttaaaatccgtttttttcttttgtgtcatataactccccttctttatatttctgttttatgtcctttttatttccgctaaatctattcgccaacatcttaccatactttcatggcaatagcaatttctgtccgatataaataagattgccgtccgtaatcccgttcattttgcaaatcgtgtctacatggtcaagatcgccgtatatcttacggctgataatcgccagcgtgtctcctttctctacaatataaaccccgtcctgaccgttcgcgcttccaatagtctgttcatctgccccctgcgcagaatcgcttccctccggttcttttttatcattgctctcagacaggctgttttccggattttcatttttctcatcttttccgtcttccttttgacctgacacactttcctcctttgttttgttttcatctgcggaatctgcatctgtctgtccttttactgcttcaatttctgcagatgtgggaacagatccgtcatctgttgtttcttctgacgttttcccatctgacgcaactgtctctttatctaaaaatccaagcgtgttttgtaccgatttcatcctgtcgaaactgttaaacaacgatacccccataattacaagtatcaaaatcacacaagctcccgcagcatacatcagactccccggccgtctgcctttttgatgctcgctccgttttctagccaaagaacgaaagtcctttgcagctctgtcttccactgtttccgacgctgacgccccattttttttccggctggagatcatataattctgcatacacggatttttttcataatatgtgtaatgccctccgatctccagcaagtcattcattttatgtacataatatgtctcttctttttctaccggatctttcataataaaaacggtatttttcttcggaaatgattttttatgaagctttacggtttccggttccggaatgagcggcgctccgggatgtactacaaaccatcctagcatttccccgtcttcaaaatactgtttgcagtcttcatatgcgtttttccatgcagcctcatcaatcacatattctttatccgacattttcagatcatgcatctgaatcgcaccataaatataaacataatcttcatcctcgccgttttgaatatctccgacaagaaaagcccccatagggtctgtgcctgctttctcacatttctcacacaatccggcaaaaaatgtatctacataatcttccacataaattttaggactgtcgcttacatttcctatttgacgcacgtttttcggtaactgtctttccatttatactcatcctcctaaatcaactgaatattttaaaaatcaacaatgtttctatcggcgttgatatgaggatagcacaataaaaaaaatgattttatcagttattgtcagaagaattcgacatattataaaagatgccgctcaaaatgaacagcatctccttttgtaatattatgatacgaacgcttttactttttcataaataccgtttatgccaagtccgtatttttcgatcagttcaagcgccggacctgattctccatacacatcgttaattccgatcttaagcacttttgtcggaacatttgcggaaagcacatcacatactgcgcttccaagtcctccgataaccgaatgctcttcgactgtaacgactttgcctgtttcctgtgcggccgcaatgataagttcttcgtcaagcggcttgatcgtatgaatattgatcacttttgcatcaataccttccgctgccagcttctccgctgcctgcagacagttgttgacaggaagtcctgtcgcaatgatcgttacgtcttttccttctcgaagcacaacgcctttcccaagttcaaacttataatccggtctgtcattgatcaccggaacagccagacgtccgaaccgcatatacaccggccctacatattcgtaagccgcgcgcaccgccgctcttgcctctatgtcatcagacggattgatcacaaccattcccggaatcgtacgcatcaaagcaatatcttcattacactgatgtgtcgctccgtcttcacctacggaaattccggcatgtgttgctccgatttttacgttcagatgcggataaccgactgaatttcttacctgctcataagcccgtcccgccgcaaacattgcgaaggaacttgcaaacggaactttacccgcagccgccaatcctgctgccacgccgatcatattactttccgcgataccgcagttgatgaaacgttcgggatatgcagcctgaaataaacctgtttttgtcgcagccgcaagatccgcgtcaagcacaacgatctcttcatgttccgccccaagctctaccagcgtttctccgtaactttccctcgtcgcaatcttctttacttctgacataacgcttcacctgccttttccaaatctgccatcgcgattttaaattcctcgtcgttcggcgcttttccatgccatcccgcctgattttccataaaagaaactccttttcctttcacagtcttggctatgatcaccgtcggacgtccttttactgattttgcctctttaaatgcagcgtcaatctgatcaaaatcatttccgtcaatattgatcacgtgaaaattaaacgcttcaaactttttatctatcggatacggagagttcacttttgtaatctcaccgtcgatctgaagattattattatccacgatcacaagaaggttatccagtttgtggtgagacgcaagcatcgccgcttcccacacctgaccttcctggatctctccgtcaccgagaagtgtatatacgcggtaatcatcacccgatatctttgccgcaatcgccattcctacagccgcagaaactccctgtccgagagaacctgaagacatatcaacacccggaatgcacttcatatccggatgaccctgaagataagaacctgtatgtctcagtgtgatcagatcttctttcgggaaaaatcctttctctgccaacgcggcataaagccccggcgctgtatgtccctttgagaggacgaaacgatctctgtccgcttttttcgggtctttcggatctacattcaattcctcaaaatacagataagtgaatagatccgccgcggaaagtgatccgcccggatgtcctgctttcgcactgtgaaccgatgtcacaattcccttgcggacttcatttgcagttttcatcaactttaacttgtccataatgtctcctctttaatgtctcctctttcttacttctgtttattacttctgtttattatttctgctctatcttacagttctgtcctgccttcaagcgctcttaaaagcgtcacctcgtcaatatattccaaatctcctccgaccggaacgccgctggcaatcctgctcacctttattcccgccggttttatgagtttgcttatatacattgccgttgtctcgccttccagacttgaattcgttgcaatgatcacttcattcacgtctccctgaagccgttccatcagttctttcagacggatatctcccgggccgattcccagcatcggagagattgccccgtggagcacatgatatactccgttatattttcctgtcttttcatacgctgccagatcccgcggtgtctcaacgaccatgatcgttttcttgtcgcgatccggatttccgcaaatcggacaggtttcccgatctgtaagtgtacagcacactttacaataccgcacatttttccttgcgtcaataattgattttgccaaaccttccacttgatccagcggcatgttgatcacatgaaacgccaacctttgcgccgacttgctgccaatccccggcaaacgggaaaattcttcgatcagacggctgatctgattactgtaatattccatccttaaaacatccccggaattccgccgcccatgccgcctgtcagcttagacatagcagaacctgtcgcctcatcgatctgacgcagcgcctcatttgtcgccgcaacgatcaagtcttccaacatctcaatatcatccggatcaacgacttcttccgcaagttttacttttgtcacttcgcgttttcccgaaacagtcacttcaaccgctccgccgcctgccgtcgccgtaaattcctttgcctcaagctctttttgctgctcttccatctgacgctgcatcttctgcgcctgtttcataagatttgccatatttcccggcatcgctccacccggaaaaccgcctctttttgccataatcaatcctccaccgttatcttcatattgatcttttgttctatatctatgaatgtatcctcaaaatgtctgccttcttctacatgacgcacttctacttccacacgttttccgatccgttcttcgattaatttttccaactcttcaacgtgatcttcccgccctacgacgcttgccgcaagactgtccggaagaacgatcaaaagccggttgtctccgcccagacttaagcgggcgcttttcagatacccctttataatacctgaagcttctccggcaatcattctaaaattctttacgacttcctgtacgtcttcgggaatcgcatctggaatttgcggtctctgcgcacgagcgcctgcaaaattgccctcggtgtttccattaatcaccgatccgcctgcgatctgcgctccgtctccgtttacatagacgatctgcccctgcatatttgctgaagcttccatgcttttttccactttttcttccaccgcacggatccgctctaaaatagtatcctgcttcgtttccattgccggagtacataatttaatcaaagccacctctagcatgattctcttttgcgtcgcatattttaactgcccggaaagctctgaaaaaacacggatataccggaataacgctgctgtctcgatcatcccggattcttcttttaactgcatcatattttccgtagacacatccagaacatcctctatattatcagatgtttttacgagaagcaagttccttaaataccatgtaaaatctgccgtaagctgcgtcagatctcttccctgcattacgagttcctccacaacgtcgagcacacccggcacatccgtattgatcactttccgcaaaagtctgctgaatacatccgtatccaccgctcccagcacttccaaaacatgctcgtatgtcaccttctgcccaagatagaatgcaatacactgatcaagaagactaagcgcgtctctcatcgatccgtccgccgctttcgctatatagcgcagcgctttatcctctgcttctacatgctctgtatccatcaattcctgcatacgttccgtaatcgtctcaatactgatcctcttgaaatcataatgctgacatcgtgataaaatcgtgatcggaattttatgaacttctgttgtggcaagaataaagataacatattccggcggctcttccaatgttttaagaagcgcgttaaacgctcctatagacagcatatgtacttcatcaataatataaaccttatattttccttctgtcggacggtacgtcacctcttcccgaatctcacggatattatcaacgccgttattagacgccgcgtcaatctcaatcacattcatagacgtacctgccgcgatcgacttacacatctcgcactcaccgcacggactgccgtcaaccggatgctcacagtttaccgctttcgcaaatattttcgcaaccgttgtttttcccgtacctcttgtaccgcagaaaagatatgcatgtccgatacggtttgccttgatctgattctgtaatgttgtaataatatgatcctgcccttttacatctccaaactctgccgggcgaaattttctataaagcgccgtatatgacatgttttacacctctgcctgatttcttagtttatttcgtttattcatcgccaaaactgatacctattgttttcgcttctttgatcaatccgcatttcggatctaccatctttaattttcccgccacttcttcaagcggaactgccgtcgtctcgccatctctcatagcgaccatatatccgtattttccttccagtatcatctcggccgcctttgctccgacccgagttgcaaatacacggtcgtatgcacacggagaacctccgcgctgtgtatgtcccggaacggtaattcttacttccttatctgtcgcttcttggatctgctctgccagctcatatgcgatagacggatattttctcttggagatcttctctttatattctttctttttcagttttgcatcctctttcgagattgcaccttccgcaaccgcaagaatcgtaaacggttttccttctctcgaccgtctgttgatcacatctgtgatcacattgatatcataagggatttccggaagaaggataatatccgcgccgcccgctatacctgcatgaagcgttacatatcctactttgtgtcccattacctctataataaatacacggctgtgggacgttgccgtcgtatggattctgtcaatcgtatctgtcgcaatatccaccgcgctctgaaatccgaatgtcatttctgttccccacagatcgttatcgatcgtcttcggaagcgtgatcacattcaatccctcttcccgaagaagatttgccgttttatgcgttccgtttcctcctaaaataataagacagttcagattcagcttatgatatgtatgcttcatcgcctctactttatcgagcccgtctttatcaggaactctcatcaatttaaacggctgtctcgatgttccgagaatcgttccgcctcttgtaagaatgccggaaaaatctttcggtgtaagcatactgaagtccgcatagatcaatcctttatatccgtctttaaaaccgtagatctccacatcgtcccgtttggagcagattcctttcacaactccgcgcatcgccgcatttaatgcctgacagtctccgccgcttgtcaacattccgattcttaacataacgcaccctccttgatcgtatcatccgtgcataacgcaccccaaaactgtttttctgatatttgaatagtttctataatgcaaataagcagccggtaattccgaccgcttattattatactctatttacggaaatccaacaagaaattttaaaactacagtctcttaagcagttcttctctttctttttcaaatcccggttttccaagcagggcgaacatattcttcttataactttcaacacccggctggttgaacggattaacgccgagtaaatatccgctcactccgcatgcaaattcaaaaaagtaaaacaattccccgagataaaactcattctgctccggaatctttaccataaggttcggcacattaccgtccgtatgcgcaaggatcgttccgttcatcgcactcttgttaatgaaatcaacattttttccggcaagataattcaatccgtcaagatctaccggttcttcgttgatcacaatctctgctcttgatttttctacattaagaaccgtctcaaaaagaattctgtttccatcctgaataaactgtcccatagaatgaagatctgtcgtaagatctacagatgcaggaaagattcctttctgatccttgccttcactctctccgtaaagctgtttccaccattcggatacataatgaagactcggttcgtagtttgccagcacttccacagtttttcctttacgaagaagaatattcctgacagccgcatactgcattgcgccattcttttcaaaatcagcttccaaagccgcctttcttcccgatgccgctccttccattaatttgtcgatatccgctccgcttaccgcgatcggcagcaaacctactgcagtaagaacagagaaacgaccgcctacatcgtccggcacaacgaatgtctcgtaaccttcttctgtggcaagatttttcaacgctcctttcgctttgtccgtcgttgcgtaaatcctctttgcagcctcttcttttccgtattttttctccaacagttctttaaatacgcggaaagcgatagccggttccgtcgtcgttcccgatttggagatcatattgattgaaaaatcacgatctccgatcacatcgatcagatcttttacatatgtactgctgatactgttgccgacataataaatctccggagattttctcacttcttttgatacaacgttcgcaaaagagtgtccgagaaattcgattgccgctcttgctccgagataagatccgccgattccgatcacaagaagcacttccgaatcttctctgattttctcagccgcttttttgatccggtcaaactcatctttatcataatcaaccggaagatcgatccagccgaggaagtcgtttccggcgcccgttcttgcaagcagcttttcctttgcctgctctgccagttcgctcatatactgcatctcatgatcctgtacgaaaccacatgcctttgaataatcaaatgttactttgctcatcacaatccatcctctctgatacttattttatgatttatcttttgtctgttttatagatccggcagaattactctccgccatatactcttatattaacaaatatacacttcctaagcaagaaattcctccagtatttgccgtatcgtctcctctctgatctgcggatgcccgctgtccggttcgtgttctccccctcctctgccgacattttgactgagcttttccgctttctttctctcttgcggctcgccttcgatattaataggaagccgtttctctaccatactgctccctgtctcatctaaaatctctctgactgcctgcgcccgccattgttcatgctccgtctcctgcattgttgcggcgccttttgcgttttcctttctatctgccctgttctcctgcaccggtactgtaccggcagacgctccttctttcttatcgtccgccccggcaaatgttttttgttcttttacttttccacctccatttacattttctgacgggattacgtcaataaattctttttctttcctgttctgtcttcttaccctgacagcgcatacattttccaaataatcgaccatatacattttaatcgcttttatcttatacggctcgtccgacatacgaatgatcaccataagaagcaccgcttccgccgccccgcctgctatgtactgataaaccgtttccgtaagtccgccttccatgtaagaaagcgccgcgccgatcaccgctaaaataccgacaaaccaaacagacaacagctcgatctgacgccatgtgtgtatccgaaacaaaaatcctctgtattcatagatatatttttctacaaatacaccgacattttccacagactcatgcgccatacaggcatgttcgtattttgcctttacaagtttcatcagcttatgcgtacttttcggcatatttccagccgcttttatcaatctgtacaaggtcatccggtttacgatctttgccagcaccccaagtatcccgactgccgccatcacatacatgaccgatccggaacttaccatcattgtctcaagcataacaagccctcctgtttttttatctttcacacgccccgtctgtcaacgtccgcttgtgtttgtagccattataaggcaggatttctgtcttgtccgcaaaaaccgttctacatttttctacaccgcgcagccttttcttttgtaggtttcccgattttcttctttctcctttttttcgtgccgcgcatttttttgcagatcatctcatactgttttagatatactttttatttttcctctcaactgcaagcatcctctctctctgactgtaatatgtataaatacgtctcccttgtttttctctttcttcctttctgttcccgttcgattttcaaccgactgcactcatgtcgacttttctcgaaaacagacgcacaaaatttgtattttcttcctctgtttgttataattccttttataaaaatgaagaaatctgttttcaggaggtaaaatcatggaatacaaaccaaagggcgtctgctcacgtcttattcattttgacatcgtggacaataaagtaagaaacgtatcttttgtcggaggatgcagcgggaatcttcagggaatttctcacctcatcgaaggtatggatgtagatgaggcgatctcgcgcattgaaggcatccggtgcggattcaaaccgacctcttgtccggatcagcttgccattgcattaaaagaagctcgaaacgcttaataagatgcccggcaagacaaacgctttattttttgcacgttaatattttactgttattattacttttttaatcatcaggaaggaaatgctatgaatacaaaacctgttttccacggaagcgatatcgaaaaaatatgtgaatactatcatcttaatcaggaggatatcgtcaacttcggcgcaaatgtaaatcctatcggtatctccacccatgtaaaacaggttcttgcatcccatttggatcttctttcctcttatcccgaccgtgactatcaatctcttcggaataccgtttcagaatactgcggcgttcccgcagactacgtactgcccgggaacggctcgagtgaacttatctctcttttaatcgaaacacgcgccccaaagcgcacccttctccttggaccaacctattcggaatactccagagagttgtcactttcaaatagcaaatgcaacgagtttcttttaaaagaaactgatgagtttattttaaatgtagattttctctgtcagtcgctccttgccggaagttatgattttcttatcatatgtaatccgaacaatcctacgtcatctgccattctccgatctgatatggaacgtcttcttacattttgcgaacagcatgacatctttgtcatgatagatgagacttatgttgaatttgcccctgttatcgaagacgtcacagcagtaccttttacgaaaacattcaaaaatctaatggttttacgaggcgtgtcaaaattttttgcagcgcccggagtccgcttaggttatggtatcacgggtaacatgccgtttttaaaagcaatgaaagaaaagcagattccctggtctttgaacagcctcggcgcttttgccggagaactcatgctgaaagacgaagaatatatcagacagacccgccgtctcattctttccgaacgggaaaaaatgtactctgctttaaaagagcagcctgcttataaaacatataagccatacgctaactttctgcttgtaaaacttctccaaaaagaaacgaccgcctttgacgtatttactcactgcgtcaaaaacggtcttatgatccgcgattgttcttccttcaaaagtttagacggagaatttatccggttttgtgttatggacagcaaagacaatcaacgtcttctcgacgaactctctttcctatgccgtcaaaaataatataaaataaaatatggcgattgcagcggctatgatcccgagtacaagcaagattttatttttcatttgtattccctccttctcctccttcaaatgtgattttataatcatctaaatcatatgcctgagcaaagtatcctttcaggatcgtctttgcattacttcttgcattctcataaagcccgtttgccaccgcgtctttttcggcctgttcttttagtttggcaaacgccgcgttattctcttccagacggatctgattgaaaatgctttccttctcatgatatacacgaaacgaatcttcatcaacctgcgaacttaagattctgacttcaggaagtttcactttgatagaatctttttttacttcatatcgaatctcgccaaaatcatatcccgcctttacgatcacattgtaactatagatatatttactctgcgtaaacggaatgtcaataccgaacaattttcttacatcttcggtaacatttacttctgtgcaatttgcctcctgtgtcgccaactccccgatatcttcaaacccaagtttggtcgtctggctttcatgagtaatatagcgtttcataccgatcgctcccgcgcctcccgcaagcgcgataatcgctataataataagtatcttttgaattttccacggaatcttaattttgagtttcctattttgtttctttatttctcttttaatttcctttttcaattcttctcttgtatctttttcctcttcactatatcttttgtccatacattctcccttcacacacccgtactgtctgcagcggatacgatcttacacatactgttttttatgcagatttcctgttctttaccggatatctgctctccttgattataccagatttctttcgcctttgctccgctattttgcagaatatgactgcagcccccgtacttgccaccgtagctaaaatccccgcgcctacgattgccgccgggttcgcgcttccatactgacttcgatatgcgatcacgttcatcgggatcaactgaagagaagaaatattcatgatcaaaaacgtacacatttcattacttgcgactcccttgcgcctcaccggaccgggcgcttttcctgcccgcctttcctcttccaatgtttcaagttctttcatcgcctttaatcctgccggagttgccgcccacccaagaccgaggatattcgcaataaaatttgttgtaatatgctcctgcgctttatgttctttcggcagatcaggaaaaagaaaacggatcaccggacgcattttttttgccgcacttccgatgatccctgcctgtgccgcaatctccatgatcccacaccaaaacgacataatccctatcatcgtaatacaaagtgtcaccgcttcttttgaagaatcgagcgcggcatttgtaataacttccatcctgccgttaaacgctccgaatataattccgatcaaaatcatgcctgcccatagataattcatacacttctccgctgtctatgattcatttttcattctttctgaattatattctcttctctctttcttttattccgatactccgaaaatattttttatcgtcttttttatcacatctaatcacaattttcctttgatcagtatcgttcctcactccactcaagaatcgttcctgtagacgcatctatttcaaactcatactctttcccgtcataaatgatatcgccttcgtatttatattttccgtcatcgtagtctgattgaatgcgaatatcgttttccgatgcccccggaactctttccaatgcgatcttctctgcttcctctatactgatccccaaagcttccgcattattttgagaatttccgcttttttctttatctgttgtgcctgctgtatccgctgtgcccgctgtatctgttgtgcctgctctgtctgttgtatctacagttgaaatccgctctgtatctgcgcttaatatttgaccgtctcttccgcttatttcataatcatactctgttccttctacgtcaaaccgcacttcatatactttcctgccatcgtcgatttccgaagacactctcagacgggtcgtatctgattctcttactcccgcatcagccaatgccgcttccaatgccgcttcttttccgatatctttgccgccttttagtccacaccctgcaaatacacctgctgtcaccatagtcatcactgctaccgttgctatttttgtaaattttttcatttctattctcctttctttatttcacatcagcatttacttttactttgaaaacattcgattccaaacttcggtttatgcctttattttctttgatgagattactatatcccaaaaagattaaaataacattaaagaacgaaaacaaatttacattgtcctgtcatgacttcgattttcttaaatgaaaaacaaactcacttccttcgccttctttactgacaacttctacacttcctccatgtgcctctgcgatccatttcaccatagacaaaccgagcccgcagtgacttcctcctgttctggatttatccgcacgataaaaccgttcccatatatgaggaatatccccctttgaaatgccgatgccatgatcttttacttttccgataatatccgaatcattatgcacggataaactcacttctatatcccgtccttccccgtatcgcagcgcattagacagaagatttatcatcattctaatgtacagcgtctcatcaacttccgcccatatttcaggttcaatgtgacatatgatctgaccggcgtttccttttgattcagcaagaaactgttgttcaccgacgatcatttccgtcagttcacttaaattaacgttttctttctcgatctgctgacgcccctgatcggctcttgataaaaacagaagctgcgcgatcagatctgacatattttccgctttctgttcgatcagtttcacctgtgctttttgctttggctttaacgcttcatcttttaaaagctgaccgcactgagccatcataacgcttatcggcgttcttaattcatgcgaaacgtccgaagtgaactgcttttctcttttaaacacggcttccagctcatccagcatctcgttaaacgtctccgcaaggatataaatctcatctctgttttttttgtatctcttttcctttgtttctcttactgtatcgatattgtcaattcttctcgaaagatccgcatccatccgtatcttacacacagtatccgtaatatctttcacaggcttaagcgttctttttgtgaagcgatatcctacgaacgctgtcgctgcggcaagcagcggaagaagaataaacgcgatgcgaagtatcgtctgaaaactctcctccgattccgtcacagatatcactccgcgtacatatatctccttaccttctcccggtctgaaaaaaagatcgtatatataccagtcttcttctcctgccttatctttaatctctcttacttctccatccaaaaagtccggctgccgatcgaatcccccgggaatctttccatataaaaaatatccggttgagtcatacatggaaagatagactccgttttccacagaataaaaatccgaatcaatttttaattctccgtcctgcatttcaatttcttccagactctcctctactcttctttccagtgacattttcgtagacgcaagtatctcacgtccactcaaagaaaacaatattccaagaaccgttccgacaaccacaagaataaatatcgtatataaaagagttaattttatctttaaagaaacttttttcattcttcctcctttaacacataaccgactcctcttactgtatgaatgagttttttctctcttccgtcatcaatttttttcctcaaataccggatatacacatctataacatttgaacttcccatatagtcataattccacagatgctgctccaatctgtctcgtgaaagaacaattcccgcattttggaccatatatctcagcagcgcaaactcttttcccgaaagtctgatttcttctttacctcttattactttatgcgtatcaagatgtacttccagatccgcaatcgtgtaacatgttttcggcatttcctccggctttctcaaaagcacccgtacccgggcaagcagctcttcaaatgcaaacggctttacaagataatcatttgcacctgcgtcaagccctgccacccgatcttccacactgtcttttgcagtcagtaatataaccggtgtagaatcctttttcctcctcatttccttcaaaacggataatccgtcttttttcggcatcataatatcaagaattaccgcatcgtattttacggcagtcaaatattcctcggcttccttcccgtcaaaacatgaatccacactataatactcatctttcagacgcgctgttataattttgttcaggtccttttcatcttccgcaagcaaaattctcattttatcaactccctactacaatacttcgacctttcatttctgtttgtcttattatatgaaaatcatcggatcaaatcaattccctcttttcccttgacagaaggcatcgcgacttatattctgaaaacatcagagaagatataaaaggagccgattttatgaattcaaaaacaacaagtgaaaagcttatccaatttattgaaaacagcccatcagcttttcatacggtagaaacaattaaatttcttcttttaaaaaataatttctcggaattgtgtgagaacaaacactggcacataactgccggaggaaattattttgtgacacgaaataattcatcactgatcgcattttccattcccgaaaatccacttgcaggaatgcgtattatcgcaagccacagtgattcaccgacttttaaaatcaaagaaaatcccgaaatggaatgcggtcatcactatgtcaaactaaatgtagaacgctatggaggaatgatttacgcaccttggctcgatcgtccgctttctattgccggaagagtgattattaaagataaagaaacaaataaattacaatcgaaattaataaacatcgacagagatcttgttttaattccaaatctcgcaattcatatgaatagagatattaacagcggatatcaatataatccacaaaaagatctgcttcctctttacggcaatctttctgcaaaagacacttttatgaaacaaatcgccgatgcagccgaagtgtccgaacaggacattctcggacatgacctctttctttacaacagacaaaaagcaagcatatggggcgcttccaacgaatttgtatctgctccgcggcttgatgatctgcaatgtgtgtttgcctctgttgaaggatttcttgcaggacaaaaacaaacttatatgccgattctctccgttctggataacgaagaagttggaagtcagacaaaacagggggctgcatctacatttttatatgacacacttacccgcactaactcctgtctcggactttctgatgaagactaccttattcggcttgcagacagctttatgatttccgcagacaatgctcatgcgatccatccgaatcatcaagactgctctgatccggtcaatcatccgtatctaaacggtgggatcgtcattaaatttaacgcaaatcaaaaatactgcacagacggattttcttctgcggtatttcgtgatctgtgccgcacagtcaatgttcctgtccaaacatttgtcaaccgttccgacatggcaggaggatcaactctcggaaatatatctaacacccaagttgcagtcgacacagtcgatatcgggctgcctcagcttgccatgcattctccctacgagacggcaggagtatacgataccgactattttatcaaagctgcagccgaatttttcagttgagcaaagaaagaaatcaaaaaatataaaaatattccaaaataaagaaggaggatacaaatgactttaaaaataggtattatcggaacaaactttataagtgatgatttttgcgatgccgctgcgcaggttgacgggatagagctgtacgctgtatattccagatccgctgacacaggaaatcattttgccgaaagacataatattcccactgtattcactgactatgaacagtttcttgattcaccgatcgacgcagtatacgtggcttctcctaattttgcacactgctctcaatctataaaagcaatggaaaagaaaaagcatgtactctgtgaaaaagtaatggcatcaaatgaacaagaggctctttccatgatcgagtgtgccaaaaaaaatcacgttgtccttttagaagcaatgcgtcccgattttgatcccgcatttgatatgatcaaaaacgcgcttccccgcattggaaaaattcgaagagcatcttttgaattttgccagtattcaagccgctatgatcgtttcaaagacggaattatagaaaatgcatttaatcctgcactcggaaacgccgctgtatcagacatcggagtttattgtattcattcccttgtccgccttttcggtacacctaaaaacattcattctatgtcttcctcattggaaaacaattttgaatgcagcggcattgttctgatggaatatcccgatatgatcgcagaagcaatctattccaaagttacggtttcctatcgtccgagcgtcattcaaggagaaaacggttctatcctgatcgactacataagtcatccgacacaaatagaactcagactgcgggaaggctctcgtgatccgatcaacggtggaatcaaagaaatactgccttattcacctgtaaacaacaatatgatttatgaaataaaaaattttctttcacttgttgaaaacaatggaatcgagcacgaatacctacaatattcgcttgatacgatccgcattatagatcatgtacttgcttcacatacttccgtacattaaaaaatagatccatctattctactaaaaataaatcgatctattccagtcatcttgagttaaactttaatacaacaaattaacgttgcaaaaaagactgtatatcttactcttacaagaatttcttctgtttgatatacagtcttttcttttatcttagcactttttctttgcttttcctatccgcagtgtacaaaggataatgtactttctatccttttcttctctttctctgaatcaaagcaagtactgccgcggctgtcattgctgctcctgcatacagcatcggagaaacattatctcctgtttgaactgctccgtcattcttctccggtgtcggctgtggatctggatttggagtaggagtcgcagtttcttcttcaacttcaatttccacactgtccgtaactttaactttcttttcaccctgcactgccgttgccgtgatcgttgcttttccgactttcagcgctgttacttttcctgcttcatctactttgagcaccgtctcatcagatgttgtccatataattgtaacatcttttgcatctgtcggatcaacttttgctgttactgtcgtttcctctccgactttcagtttcttgctctctgccgttactgttacactcttaagctccggcgtcggttctggttttacctcttcttcaacttcgatttccacactgtccgtaactttcttttcgccctgcactgccgttgccgtgatcgttgcttttccg

SEQ ID NO: 7623 - DNA, 56329 bp, Unknown
  gut microbiota DNA sequence
ctgctgttgacatgcaattttgtaactgttatatataaagcaagggcgaaaagctgattttgtttaagcctatcgctcattcttatcatagaagatcatatttacagacttttcttcatagtctcctgcaaccatctactcagaatcagaacacgaaacagaacacttgaacagctgcaatgagtaccttcaaaacctccaatctgatttagcagaaaaagaagattatgaaataatggaataaaaatgtttaataacaacttaaaatatcgcatcttaaacctgtcatttaagatgcgatatttttatgcccccctatccattcaaatgaactgttcctatatagcttttttcaaatttccatccgctcttcaaatctgtacttgtaaaatcagcttttttatttccatactccccctgaccgagggttaagtaataaactccattctcatatttcaaactgtccactttattcagaaacatcacttcttccgaaacagtatcccacggaagctctatttccgcaaatgacgccccgccgttttctgtcacaagtacatgcggccacgaattttctccaaattgttcatccatcgtaagcatcccggctgactgatcggcaaatgcaagtcccgacaaaatccatccgttttccacagctacaggtgttgtctcccaagttgcgccgccgtcatgcgtccagccgatgtaagtagctcctccggttcccattgaccagtctgttccaagacctacatatccgttttcaggatcaagaaaacgaacaattctcgaagtgcatagtctcggatactcctcctgaaatacaaaatcagtccaagtctcaccgtcatcttttgagacatgaagcgtcggggtctcgccccaaaatactgcaaacattccgtttccgtctgcgtaaacactgttctccggaatcatatttccttgaccgtataccgctttcgtttcttccaactgctttgtcgtcaaaccgcttgcaacccatgtttccccactgtcatctgtcagcataagttcctctcccctgaaataataatcggtctgcatcactgtctccgtctgaccgacaagcgcattttcatctgccggagcacagatatattcgatcctctctcccatcactcctccaccgtcagtcagagagatcacaacctgcgaacttccgtcgcttgcccctcctgctccctgctgatattctttctgtgtcagcacggaaaatccgtttccgtctcttccgtctatcactacatccgcatcttgaagccgtctgtcctgactgtattccacgacatatctgtcaaaatccaactccttcatctgcgccattagcgggagcatttttatctggctgtccaaataatccacttctgcattcgggtcatactcagtcggaaacgcctcgtttacattttctgttttactaagctttccttctctgctgtcatacctgtaataaatatctttcatgtattcatctgattcgtcaaattcttgaatattaaacgcaaagtcgtacacttctccgtttttccacaactctgcctcgatatcggaaacaagaaattttttcggaagtttctctttttctttctcagacatccattcgatcattcctttcagtccgtctttttctaaaaccacttccgtactttgtttcgacgcatattctatgtactcccttaacaaatgataagcatactttcctgcaaaaaatgtaactgctgccattatgatcactatgacaacaaacacaataagaaattttgcgcctcgtcctgtttttctgttcattcccatattttctcctctctattctaagcgctccgaatctgatttactctttttgacattccatcctttcattccaaatggatttctctaatgcataatgatcggagctgttttttccatcgctactttgcacaaagtaactgttccgccttcttctatccggcttcctcccgcttccactacgcagtctttatttaacacaagcgtccatttcggatcatcactgggaaatacaactgcaagcgttccatactgaagacattcttccggttcataatgctctttaccttccggtgtttcaatatcgattccgccgttttctcctgttcctacttccaacttataattttctccccggtcttccggcatccatgtaccataagccacatttgccacataataataagataccgcttcatttctgtctccgtaagtcgccacaaactgatgcacctgatcatcttccggcgactcatatgtaagagcacacacatcgttttcaagccactgtactttcacatcatctttcacagtaaacggaaatacatcagactgcgctccgaacagcagcccccgctgccgataaaaaaccgctcttccgttttcatcaattttcagacacattgtatttgaaaaatcaggtgcaagatcaacgatttccctctgctttagaaaacaaaatggacaaacctcaattcctgcagctaataaaatcgccgttactgcaataacagattttcttttccatatcgggcggagtttttcaatgcacatgccgccggccccaaaaaggaaaactgccgccgcgtttatcacatatggagttacattccttatatagatcaatccaagttctcttccctgagtcagagtccaaatctgcactatgatcaaccccgccgcagacaagattagcagacagccaaaaacatctttccatgtgatccgaatcgtttccgcctttctttcggctcgctccaacacaatttccaaaagcttcttatcctcatccgatacggcagtttccgctcttttctcttgttcaatctgttctcccattaaaatttcatcaactgtcactccaagcgcctttccaagttcaggaaggattccgatatccggcattccctgacttgtctcccattttgacacagccttattcgtaaccccaagcagctctgccatttccttctgagtcattccgcgttcctttctctttcgcgcaataaattctcctgtcttatttcctcctttattttttactcttttctccggtctgttttctattacattttccgatgtattatcctgtccgctttttctcccatagtcaacttctttttcatttcctgcttcactgttttttctttcttgcattttgttcctccttccgcatcgtctcgcagaaagtaaaatattttactgacctaatcatatcaaactatgaaaattttacaatacacgttcattttccatcggtctacgctgcgtagactccctaaatcaaacgtaaatcattcggttttcataaaattttgagaatcccccggctgatcatacaaaaacagacaagaaaaaacagaatacaaatacaaatttaacactttacaaacatcttttcttatgataaaatatcatttgtcgagcggaagtggcggaatggcagacgcgctagattcaggttctagtgggagtttatcctgtgagagttcaagtctcttcttccgcattgctgacgaaagtcgagaaaccttattaaatctaaggtttctcgtttttttatgcttaattatcccatccatttttcgcaaaaactttattcatccgcagcgcccccgatcaactcttccatccgaaataagccgtcttctaattgtttcttagacttcataagccatttatccaatattacaagcgcacctttttcctttttaatatctcataaatgatgatatacttatttacaacaaccgttaaaactttttatatcaaacaagggggaaaacagatcatgaaaggaaaatacttaaaaaaatggatgtctgtctttttatcaacagcactggcaatcagcagcatttcaggttgcggaaattcagacaaagaacctacagactccacagacaaatctgcgaacgaaacaacagatacagcaaataaagacaccgcatcggacgaagcatcagatgtacaagatggcgatacgcctctgatcggatcatggatcgatcttagttacggtatacaagtgaaaattgaaaaagacggaacttttgtcgtttggaatgatgaacaaacagccaaaggaacgtacacatacgaaaacaactatttagtaatgacatcaaaagacgtccaaaacgaagaaaaaggatatgtgaaactttcagatgatcattttgcgttatttacttctgactctatgatcctagattacactactgattgttttgtacgcagcagcgccgctgacaaatatgatcctgcaaaagattttagcagatataaccaggcatggactatagcatccggtcctgaccaatttgtaatcaacaatgaaacatacgacgccaacgaactgtatattattttaacagaaggaaaccgattgagaataggaaaacctgaaaaaatcggcgattctaactacgaagtactgacagaaggtctgattgagttttcagataactataataagctggaatttattttcagcgatccttttacaggacaagacggaactgactacagatccgaattaaaagacggtcagtggatcatttcccctgaaggagagattgccgacaatcctcagcttgttttatcacctttgtaaaaatgctctaaggtgatcattgcaatcatcagaagcgccaaaagtacgttccaagattgacagacgctcaccacgtaaaaaggagctgtcagtaaatactgttttttagctgctaaatcttaaaataagagaatctcctacagaaatcaacatttttgatacttgatcttccatgggagattcttatttttttgtatatgttttcgagcgccccttcaagatgataattgaacgttcctctctactttatgtcaaatcctcttctaatcgcctctatgtattgtttttcaccatcgaacatctccgccgctaacaaagaggcgccttctaccggcgtatatttaggcgcgcataaccggacgccttctgttttcaactgttctcgtaacgggcctaatataaactctcctgcatgaaacaaacctcctgaataagatacaagtgttccttcgccgaatttcaacttccggtatacggaaccaacgatcattgccaactcatccgccgcaatctcatacattttcacagcttccaaatctcctttttgggcagcttctaacaaatatttttgaaggcctgctattttcgttcgatcatttcggtaccgccgattaaaaatatcaataatatcaaaatcacattttaactcaaatctattccgaaaaatctccaaaagagcgcctttttccgcccttccatcgctttcttttgaaaaaagttctaaagatttcataccaagccagtaacatgatccttcatccgaaaatctttcatcccatccgccggcacgagcttcctcacccgcgtcatttcttccatatgcaatcgatccggtgccggcaacgagattaatcccggaagataatccgagggatcccgcccaccccaccacactatcgttcacaattttcacagggagttctgttatttctttaatacgggacaaaaattcaccatcaccgtctttcgactctccccagttaggaagagcgagacaaatgtacgcttcccggtcattcaaaatttcgtgaaccgtttcttttaaaagcgcaatcgaattgtccattcctacatgtttgtaagatactgtagcaatcgtctttgcttcaataatatctccattttcatttataagcaaaaaggccgttttcgttccaccgccatctatccctaaaaagaacaccccgtttcctccattcaacaatgtttttcccaagcttccggaagcaaatcaagatttgcacggataagatcttttaacaataattccggatatttgcaattagatacaagcggatccaaaaacatcgcctgccgtgcaagctcataattacatgttgccgccgcttctaccattaacagatattctctcccaaggcgatcgcactgtgctgcaatcgcatccggaagttttccgattttctgcggatgaagcccaaactcatcaatataagtaggtaattctacaatgatacccgaagagacattatcgatataaccattgttgatcacattgaccatttcatcagaaatatctcctgttgcaagcgaacgaataaaataagtcgctgtttctcctgagcctttcaggaattcttcatatccctctttttttgtccttacttcatcaaacagaactcttgcctcttctctccaaccgtcaacaactttaaaatcattgtttttccactcataatcctgttccataagaacttcttctttcatgtaatacggaaaaaactctcccacatgacgatcaccgggcgccggatataaaccatatatgtcatataactgctttgaaataggttcttttttatcaaatccgctctcttttaatttgtcatgtaacttaggataaacgtctttgccatcaatcttcatatccgtaaaccacgttaaatgattaattcctgcggcacgatatgtaaatctttctatcggaactttaaaaacttcttctgcaagttgttttgccatatccggcgttccatgacataaaccgaaattcttaatttttgtatatttctgaagcgcaaggcagattgccccctcgggattggcataattaattatccatgcatccgggcagatctcttccattgttttagcaacatcaaggatgaccggtatcgttcttaatgctcgaataatcccgcccggacctattgtatctccaaccgactgaagtactccgtgttttgtcgacacctctatgtcactcttccaacgctcgtaccctcctgttgcaatcgtattaaacaaataatccgttcccggcagcgcctctttatagtcaatatgcgctgtaacttcaaattcctgacccgaaaatgcaacaagctctttcacagcttcttccgtctctctaagcagcttttcatccaaatccacaagtgcgatatgcccattttttatagtatcttctttcagaatatctcccacaagtctcattgtaaaaacagaacttcccgcacccaaaaaaacaaatttaaaaaactcttttttcattctctccagtcccctttctatttaattccagtcattgtaattccttctataaactgcttttggaaaataaaatatataataataatcggtatcataaccaaaacacccgcactcatcgaagtacagtaatccgttaacaagctggaattaaagaaattcaacgccagcggcaacgtcattttatcttcatctacaatcgctattaacggccacaaataatcattccatcttcccataaatataaaaatgcacagtgccgcgattgcaggtttgatcgtatgaattacaatgccaaaaaagattctccattcccctgccccatcgatcctagccgcctctaatatatcattcggaatgctttccgcaaattgacgacacaaaaatattccaaatcccgataccatgaaaggtataatcagcgctgacatagaatttaaaatattcaacttgctgcaaatgatatatgtgggaatcatcgttacctgaaaaggaaccatcatcgtaatcaacacacaaacaaacagaaaatttttccccttaaaattaaatttaccaaaaatatatcccccaagacaactcgtaaatactacgatagctgttgatacgacagatgaaaacaaactgttccacagccaggtcataaatggggcttcagtcaatactttcttatatccggatacgatccattctgatgggaaaaatgttgtcggtatactcataatttccgcattgcttttgaaagacagcatcaaacaccaaaaaaacggaaatgcaacaactataaaggcaactgctaaaataataattttccctattcgcacaagctttttcaccttcgacacctcctagtattcccagtcttgctttccgacttttaactgaactaatgatactattaatataataccaagcaacacaactgccatcgccgatgcatatcccatctgcgaatatctgaacgcataattatagatatttaatcctatgacattcgtatggttttccggtcctccctgcgtcataatctgcacctgagcaaaaacctgaaaatacgaaatgcatgtcataatgacaacaaaaagcatattcctcgacatcaaaggcaatgtaattttaaaaaatttctgtatactgtttgccccgtcaatttcagccgcttctaaaaacatattcggtatattatctaaccctgacatcaatatgaccaaattgtatcccaaatcgcaccaaagcgtaaccagtacaatactaaacaaagccgttctcggatcatttaaccagttaatcggatgatccattccaagtgccatcagtgcctgatttaaaactccgttcgcaggatcgaacataatcaaccaaacataacacactgcaacaatcggcactactgccggcaaaaacatccagccacgaaaaaagcttctttcccctttttttcgaagtgatttaatcaataccgctaaaaatgtggaaatacaaatatttaaaactactgcgactaaaacaaatactactgtatttttaagcgctcctaaaaactccggatcttgaaataacatcttataattcgccagtcccacaaagggagctcccggaaatccattataattataaaatgacattacaatgctgaatatgataggaactacagaaaatataaaaaacagcagcattatcggagtaagtccacatacaataaatcgtctttgaagacgttttaatctgcttgtctttttttccaccgccactcctccaatcagtttgagaggagacaaacgtctcctcttaaatacttattttgcctgtttcaataattcctgaatatggttattgatacttgtctccatttcctccaacgcttcatctgtaccaatacttccagatgccgcttttgtaaatgtatctaataaagttttcttaacaaagtccatatcctgaacaggtcctacgcttcttgcatactgtaaatactgatactgatcgctcactcttacatttctttcatccgactgataaccctcatcatcaataatcgcttttaaggacgcaactgttcctgttcccaaattaaactcttttgcattttcaggttccatacaatattttacgaaatcccacgcggtatctttatttttactgttttcagaaacaacatatccccagcctgattcaactgcaaaatatggaatatcgccttttacaggaggcataaatacatatttccaattttcattttccaaatcatctccaactgcagatgcccaggaaccttttactaattgagccgctttgtttgcaaagaaatactgctctgtcggcatttttgcagtaatgtgtttcgtatctgttactttttccaccgtaacgagatctactaatttttgccacgcttctttcgcttccggagaagtcagaacaaactttgtctgatcctcattccaaaaatctccaccattttgcataatccatgacaagaataatgccgcaaagttatctccgttataaaactcaagtccgccatactcctgaacatccccattgaattttgcgctatttttcgcaatcttcatcacatcgtcgaatgttttcggtccgtcaggaacgcctgccgccgccgcatcttcccgattatagaatagtccatactcaacattcatctcaatcggaactccatagtaagttccgtcctttgcatatccatctacagcgccctgtaaataatctgtctcaaagtttgcagataattcttccggaacttccgccagcagtttctgattcatgtaagtcggaatccacgctccaaacacttgcataatatccggttcatttccggcagtaaaagctgctttcattttctgactcatggcatcataaggaaatgtctgaatattaatctttactcccgtttccttttcataattctccgcaagtttctttgtctcgtcaacaaatgcctgtccattatgcatccacaaattcaattccttagacgcctctttgtttccgccgttttccttgtctccacctgcagaacatccgcctaaaatcattcccgtagtcataactcccgccaatactactgacataatctttaacgatctctttttcattttcttacttcctcctttttaatgtccttttttgttccaaaatacaccttcaggcaaatcattaattgctcttattttttccggatttaccttaaacctcctttcttccgtcagaaaaccgtttttctcttgctgtacgtcggataattgcgtataacagtatccgcaaacatatggcagagatttgattcctaccgtaagagctttatatctttccagaaaatcttcctctgtttttactttttcaccgtatccccatgactctttatcattatcctcaaaggcaatgcctccgtactcactaatcagaacaggttctcctttataaccaaacccttgcgcataagctgccctgaaattattatgataaatctcgcagcttaacacttcttcttttttagttaagtatttacgccgcattatttctccgtcttcttcataatcatgaagtgttaaaatatccgacgtagtgtgttcccagccatcattagaaataacaggtcttgtgctgtccaacgattttgtcaaatgataaaccgcctgcgaatagttttgctggcaaacatctctttcaatcgcgggcactccccatgattcatttagcggagtccatatgataatgcaggggtgattataattttgctcaacaatctcagtccactctctcacaaaatttttcgcagctttatcagaatatttatagaaagatggaccttctccccaaacaagaagtccgtgcacatcacaccagtacaaaaaacgatcgctttctgttttctgatgttttctcacgccattaaatcccatccgttttacatattctatatcctttagcagcacgtcatcgttttccggcgttaatccggtatctttccaatacccttgatcaagaaccaatctctgatacaaaggctgcccattcaataggacaagaccgtttctgattcggatatctctcataccaaaataagattccacttcatctttacagttatcatcctcatctaaaatcgagatttttaatgtatacaagttcggagcgtcaggactccacagttcgatcccccactccccaacgtacttgttatatacgtctatatccatctgacagacacctgcttctaattttccggaaacactattaataaatttcccttcaaaataaacgtccgatttcattattaaattctctttatttgaatgacacattgtatgaatggtaactgtctttttataaatatcgggcgtaatctttattttttccacataatcatcagaaacctgttcaagccatacgtctttccatataccagtcgtctgaacgtaccagcatccataattatcagataaccaacgttgttttccccgaacctgctcttcactatgcggatcttcaactcttatgctaagaagcacttcttcgccttctgcaaattttccaagttcaaacgcaaatcttgtatatgctccgtcatgtgatcctttataaactccattcacccaaagatctaaatgataatcgcacccctcaaaattaatttgaatactttgatcttttttaaactcatttgttatggttatgtttttccaataccatataactccatgcggtctttcatctccgatcccacttttacccgtttcatatgtgaagggaacattgattttacgatcccctctgacggtatgactccatccctctaaaacccctatattctcatcatcaaacgcaaaatcccactgtccgttcaataagaaaaaagactctctttttaattgtggccttggatacaaatctttcgttcttattttggatcacctcctctaattggtattataataatattacatttattcaatatttgcaacaattagatattaaccttagtatttttatgcgaattgcatatattctttcactactcattgtgtatttcgataatttttattctatttcattgatttttttgtgcgtttattatattattttattatcagtataattagcactcacccatgaaatgatattgtttcaattatttactattacgaggggcttatgaaagaaaataacaacaatacaatttacaagtattctcagctatatgacattttgcttgagaaaatactcgcaaacgaatggaaggctaatgataaaatgcctactgagcgagaattgagcattagatacaacgtaagccgagtcacagtccgagacacactaaaccggctggctcaagccggatacatttatcggattcaaggaaaaggaacttttgtatctgttcgaaaaatagaaaaaaaattaacaaaactgtatactctcaggaaacgttttgaagaaaaaggcgttgtacatgaagttaagacacttcaatttgaagtaatctctccctctgacgatatccgagaaaaattagaaataatagaaaacgaagatgtgtataaacttatacgctgcttttatgcagatcatattccatatgctattgagatttcattcgtaccaacaggcccttatcctgatttgagcgcaaatgatatagaaaagcagggattgtataaaagcatgcaaatgtataacattattccggaacatgcaagcgaaaatattttcgctgtaaaattaacaaatgaagatgccctaatattaggtctgaaaccacaggacatagcaatacaaattgagagaacaacccattcaaacaatcgtatcattgaatttacaacatcactaataaaaacagaatacttttattacacatcggaacttagttctacataaatacccggcagttccttcgggtgtccctgtgcatagaaagactcttcgactgtaatacaacaaaactgccgctttaacgattcatgaaatcgtaaagcggcagttccatattctcattccgatgtattcctacaatttcgcattttaacaaaaccgtatttaatctattctgtcaaaatccctgatcttagcacctcttccaacagacactgcgtttcttttttcgtctgctcaagagaatttccttccctccggcattcattcacaaatcctaacattccgaaacagacaaaacctgctatcttttttgcggaatatttcaatttactccgcacatgagctgtatgcatctcaaccgtctctaaaataatactgtaaaggcgagatgccagatacggattcacctccggattcgtatactgaaagaaatcaaaccgggcataataaagatccaaaatcgcattcagcatatttacatacccgagtacaagttccccctccggattattctccttctgccgtctgtaataatcttctctgcctatactacgcatatcgttaaagatatcgtccaaaagagattgcttgtcactgtaatgcgagtaaaacgtaattctgctgacctttgcctctttacagagttccgtaacagaaatgtgttcaaaatcttcgatcgaaagcattctgatcatcgcatccttaagattatgctttgttcttatgatccgcttatcttccatatccggtaaaattccttcctctatccactccttttactattgataataatatcgaaacttctattgatagtcaataacatcgatccatttcatcaggaagtctttctccagttcattgtcttttgtaagctgcgctgccgccacgatcggaagccactgctgtacatactgtcttgccgtatcgctctttttgcagaacaatttcaaatacagatctgctgtttcctgatctttcaatgcaaagagaagatatgtcatagccgcgtccgcacttgcatttccctgtgttgcatgcgcccagtccacaaccgtcatcttgccgtttttacctacgatcacattactcggattgaaatcgccgtggcatactttattatgtttcggcatactttcaagtcttgtaagaagctcgtatcttgttgttgcatccaaatctttcaggctgttgatctggcgggcaagcttatctttcattcctttcagaagaggagatgttttgccgtgaatctgaagctgaaggtctacaaaatcttccatatacttctcaatattctttttgtcggaattcatcatatcttccattgtctttccgtctttatactcgatctcgagcgcccacttgccttcaaccagggaaactcctttcaccttaggaatatccagtcctgtttcttcgatccgcgccgtgatcaaagcttcgttaaatacatctgacttcggatgctcttcgttaaatactttcacaatactgtcgtcacatttatagacggttttatacgaacgttttacgataatgttgttttcttcaagtttcatggtaggttcctccttaaatgggtttttgtttttcgtttttgatgagctcattatacaccgtaattttcaggaaagaaaccccttaaagcaaactttgtgcaatttttaactatttttttattattgatctaattgttaattttttatcattccttctgttttgtttttattttgtacatagatttatatgtttgaaccgaaataatttgaaaaaagcaaacagagcgctgtgaaagcagcgctctgttattattcgcagttacggttcttatttaccgtagtagcatttcaggtagatttctttgatctccttcataagcggatatctcgggtttgctcctgtacactggtcgttaaatgcctgttcgcacatatcatccaaagtatcaaggaagtatttctcgtcaataccgtaatctttaattgttttcttaataccgatcttttctttcagatcttcaagttttgcgatgaagttctcaaatacttcttcgtctgtgtttcctgtgcatcctgcaaaacgtccaagctctgcatatcttgcaagtgcatgcggatactgatactgtgagaatgttcccatctttgtcggaacttctgccgcattatatctcataacttccgtaaggattacagcgtttgcaacaccgtgcggtaagtgatggaatgcaccaagtttatgagccatagagtggttcacaccaaggaacgcatttgcaaatgccatacctgccatacaggaagcgtttgccatctcttcacgagctttcggatcgtttgctccgttctcgtatgctgacggaaggttttcaaataccattttaacagctttcattgcaagaccgtctgtatagtctgttgccatgatagatacatatgcttcgatcgcatgtgtcataacgtcgatacctgatgcgcttgtcagtcccttcggagctgtcattgcattgtcaacgtcaacgattgccatgttcggaagaagttcgtagtcagcgatcggccatttaacgcctgtttcagcatctgtaatgatcgcgaacggtgtaacctcagaacctgttcctgaagatgtcggaatagctacgaagtatgctttctctcccattttcgggaatgtaaatactctcttacggatatccatgaagtccatagccatgtcttcaaagtttgcttccggatgctcatacataagccacatgatcttagcagcatccattgcagatccaccgccgagtgcgataattgtatccggctcgaatgctctcatctgagcaacaccttcctgagcacactgcagagtcgggtccggagctacgttatagaagcatgtatgctgaattcccatctcatccagtttcttctcgatcggatctacatatccgtttttgtaaaggaatgtatctgtaacgatgaatgctttctttttgtgcattactgttcccagctcgtcaagcgctaccggcatacatcctttcttaaagtaaactttctcaggtgttctaaaccacagcatattctctctcctctcggcaactgttttcacgttcagaagatgttttacaccaacgttttctgatacggagtttccaccccatgatccacatccaagtgtaagtgacggagcaagtttaaagttgtaaagatctccgataccaccctgtgaagccggtgtattgatcagaacacggcaagttttcattgcttcgtaatgtttctggatcttctctttctctgccggatgtacatacagagaagatgtatgtccgtatccgccgtcagctacaagctgtgcagctttatcaagagcttcgtcaaatgtttttgctttatacattgcaagtaccggtgacagtttctcgtgagcaaattcttctgcgatatctacagactcaacttcaccgataaggatttttgtatcttccggaacatttacacctgcaagttttgcgatttcatatgcagattttcccggaattttgctgttaagagctccgttaatgatgattgttttacgaaccgcatcaagctcttttccaggtttcaggaagtagcagcctctgtaagcgaactcttttttcgcctgctcgtatacgctctccagaacagttacagactgctcggaagcacagatcataccattatcaaatgttttagaatggataatagagtttacagccattcttacatctgctgtgtcatcaatgataaccggtgtatttccggcgccaacgccaagagccggttttcctgaagagtaagcagcttttaccattcccgggccacctgttgccagaatgatgtctgcgtctctcataactgtgtttgtgagctccagtgacggtgcatcgatccatccgatgattccttccggcgctcctgcttttacagcagcttcaagtacaacttttgcagctgcgatcgtacattcttttgcagccgggtgtgggctgatgatgatcgcatttcttgtcttcaaacagatcaatgttttgaagattgccgtagaagtcgggtttgttgtcgggataaccgcagcaacaagaccgatcggctctgctacttttttgattccgtaagctgtatcttcttcgatcacgccacaagtttttgtgttcttgtatgcgttatatatatactctgcagcatagtggtttttgataactttatcttcaacaatacctctctgcgtctcttctactgccatctttgcaagcgggatacgctgtttgttggctgccatagctgcttcatagaaaatcttgtcaacctgctcctgagtaaatgtcgcgaaaactttctgtgcttcgcgcattgctttcatttttgcttcaagcgcttctacactgtcaacaatctcaggtacgactgttttttctttctttgccatttgataattcctcctgtaattgagttccggtttatcttttcaaccgttatctatcttgtttctcacaagttcaagtatatctgtttgttaaataattgtcaacaacatatttgttaatattttaacggtattttttttgtattatttgtgcattttctacaaaacagtaaaaatcctatgaaaattatcattgtaaaaaaactcctcctatgaatttcatagaaagagtttctcattgattcaatattaatctgccgaaaatattcgggaactcagctattatacaagctcaagaagaacttccatcgccgcgtcacctttacgctgaccgatcttcacgattcttgtgtaaccaccgttacgatctgcatatttcggagcgatctcatcaaataattttgcaaccatatcgacttcttttgcctttttgttctcgccctctttaaccgggtaaagaactttcagcatctcacgtcttgcgtgaagtctgctcggctgatcttttttgatctttttctctacttcatcgtaaacagtaactttctttccgtctacaacttcttttactctcttgccgtctttatctttgcgggcaacttttgccattactgttacttcatcgaaattatctttctctttcacagccaacgcgataagaccttctgctgttttacggatttcttttgctttcgcctcagttgtaacgatctttccgttgttaagcagagctgttacctgatttctgatcaatgcttttctctggctggatgttctgccgagttttctatattttgccattcttatatttcctcctaatctttccgtcataattcggatgcgccgtctgcagaaccgcgcttcgcacgtctgccgctattgtttataaacaaaaccttaacgcatactcgttctttttgaaaaacacgccggcacgcattttccctcccggtatatgtctgaactatgactacacattcaattatgcatcttcgggcttattaatcaaatgctcgcggatcgtcctgtattccgaacaatccacgattttctataaagcgattattcctcgccctgattcaactcaagattgagttcttttaacttagcaagcacttcctcaagtgatttacgtccgaggttacgaactttcatcatatcttcaggagtcttattagtaagttcttctaccgtattgattccggctctcttcagacaattataggaacgaacggaaagttcaagttcatcaatgctcatctcaagaactttctctttctcatcgtcttctttctcgatcattacttccgcaacctgagcaacttccgaaagatcaacgaaaagtttcaaatgttcgctcagcacttttgccgcaaggcttaccgcctcatcaggaagcattgttccttttgtccaaacatcaagtgttaatttatcataatccgtaatctgtccgacacgagtattctcaacagtcagattcacacgttcaaccggtgtatagatcgagtcaatcgcaatcactccgatcggcatatcttctgttttgttcttatcagaacttacatatcctctgccctttgtgatcgtcaattccatattcagcctgcagtctttgccgccgctcaatgtagcgatcacctgatccggatttacgatctcaatatcagggtcattaatattgatgtctgctcctgtcacaacaccttcgccttcaaactcaatatatactgttttcggctcgtctgactcagacatatttcttatcgcgagagatttcaaattcatgataatctccgtaacgtcttcttttacgcccggtatcgaactgaattcatgaagaactccgtcgatcttaacggaactgatcgcagaacccggaagagatgagagcatgattcttctcagagaatttccgagtgttgtaccatatcctctttcaagcggttctacaacaaatcttccatattttttatcttccgaaacatccgtaatctcaatattaggtttattaaaatcaaacactacacagaccctccttttgggttttaaaatgttgaagggatacgctgttgcagccgatattatttagaatataactcgacaatcaacatctcatctaccggaacatcgatcgcttctcttgccggaagttcttttacagatcctttcaggttctctgcatcaacatcgagccattccggaaccatgttgctgccagtcgcttcaagaatgtctttatatctctgtgagccttttttgttttctttgatctcaatcgtatctcctgcttttacaaggtaagacggaatgtttacctgttttccgtttacgagaacgtgtttgtgatcaacgatctgtcttgcttcttttcttgttcttgcaagtcccatgcggaagattacgttgtccagtctggactcaagaattctcatcaggttttcacctgtcattccttccatctgttttgctttcgcatagtagtttctaaacggtttttcaagtacgccgtagatgaatttcgctttctgtttctcgcgaagctgcagaccgtactcgctcatttttctgtttgctctttttaactgtctgttagattttttattaattccgaggtaaatcggatccatgcctaaagaacggcatcttttaagaacaggaactctgtttactgccatgtctatcctcctaatttatacatacgagcggtttcataccgctttccaagttactttccggtgtatgataatgttcagccgtcgattacactcttctgcgtttcggcgggcggcatccgttatgcggaaccggtgttacgtctttgatacttactacgtcaataccgcatgcctgaagagcacggattgccgcttcacgtcctgatcccggtccttttacgaatacatctacagacttaagtccgtgtaccaatgccgctttagctgctgtctcagctgccatctgcgctgcatatggagtagattttcttgaacctctaaatcccagaccgcctgcacttgcccatgaaagagcatttccctgtgtatctgttaatgtaacgattgtattattaaaagatgactggatatgtgcctgtcctcgttcaacgtttttcttgacacgtttttttgttactttttttgcaactttctttgccatttaaactaacctactttcttctttctctttgatttaattccttgttataacaagtttgttcgctcagctaagctcatgcttcgcatttgctaagatttgcgaacggcttcgcactaaattcaaacttcgttttcattaagttgctttcagcttattttttcttgtttgctactgttctcttcggacctttacatgttcttgcgtttgtctttgtcttctgaccacgcaccggaagtccttttctatgacggattccacggtagcatccgatttctttcagtctcttgatgttaagctggatctctcttctaagatcaccttctacaacctgagtttcatcgatcactgcgctgatcttttttacttcttcacttgtaagatctcttacacgagtattcggatctactcctgcatctgccaaaatacggcttgcgcttgttcttccgattccataaatataagtcaagccgatctctacacgtttgtctcttggtaagtctacacctgcaatacgagccatgtgtctttcctccattttctttgtttatactgtctttaattgaggctgcggacgctctgcttattataatgccgcatcctaccggccttttgccgatatcccagcccagacgcgttctcctcgcgccctttcccggcacggatcttatccgtcaatgcaaacgccgggtattagaagcaatatacaatcgcatccgttcaagccatatgccggctctgcctatgatcgtcacaaatggacgaaacgggcaaactacggaagcgggacacacgcactgccggtacctgatgggcagatacggtgtaaccttactgtatattaaacagctctacacacatcctcgtgtgtcatgctgtcagccgcctaaatcacttcacaaacttcctgtcaattaaccctgacgctgtttgtgtttcggattttcacagattactctgatgcttccttttcttttaataatcttgcatttttcacaaattggttttactgatgatctaaccttcatgtcaaatcctccttcccttctttgcttacctacaatttccggtcatttgggcacacctcaccagaaatgaccatttcatagtatatcaccaaccccgcatttaagtcaaccctctatttcttatactttcctatttctttttcgctccgctttttaatcgcaaatattacgcaaaaaagttgttctgtacataagccctgactcttcgtcactgcagtctcacagaacaacttcccgtaaatactcaaattccgcccggctttattgcaccggcttcctttatgctttatttatctctccagataattctccccttgctaagatcatatggcgacatctcgagcgtcactttatctcccggaagaattttaataaagttcattcttaattttccgctgatatgtgcaagaacgatatgtccgttctcgagttccactttaaacattgcattcgggagcttctctactactactccctcgatttctattacgtcagcttttgacatattatttaatcctcctgaatttcggcatcacatgccgtttcacatttttactctcccagaatccttacaatttccgcaaatacatcatcaatatcgatcgttccgtctacttcctttaaaataccggactgtgtataataatcgatcaaaggctgcgtctggtcatgatagacgccaagtcttttcagaactgtttccggcttgtcatcgtcgcgaagaatcaaaccgcctccgcatttatcgcaaattccttcttctttcgtaggggcatatacgagatgatatgttgccccgcagtctacgcaggctcttcttcccgacattctgtttacgatattttcatccggaacttctacgtcgatagcataatctatcttctgtcccatgtcggcaagagctttgtctaatgcttctgcctgcggaatcgtacgcggaaaaccgtcaagcacatatccgttcgcacaatcatcctgattcactctatctacaacaagatcgactactaattcatccggcacaagaagaccctgatccatatatgtcttcgcctttttcccaagctccgttccgtttttgatattggcacggaaaatatctcccgtggaaatatgtggaatcgaatatttttctgcaatctttttagcctgtgttccttttccggctcccggcgctcccagcatgataatcttcataacttctacctccgatcgatatgcaaacagttcttttgccccgaaatattttcctgcatacagaactgttttttgttttatcttaaaatacaccttgagcccgctgcgttttgcctttttcaaggcaaaacagggcgagctgttaaacattgttatttaatatccaagaaagctgtttgacgcgttgcttcctttattatttaagaatcctgtgtaatttctcacaagcatctgcgactcaatcttcttgatcgtttcaagcacaacacctacgataatgataagcgatgttcctccgaaagaaacgtttgcgccgaacataccattgaagaagaatgggattacctgaacgataatcagtccgcatgcgcctatgaaaataatgtaattcaaaattttctgcaaatattcaactgtcggttttcccggacgaatacccggaacaaatccgccgctcttcttcatattatttgcaatctccaaaggattaaatgtaatcgatgtatagaaatatgcaaagaagattgtgagcagaatatatacaagcagtccaaccgtataaaccggttttgccggattacaccagttgtttgaattcattgcagcaaggatctggcttccgatgcctgttccgtttccttttccgaggaactgggcaatgacgatcggagtctgcatcaaagatgatgcaaagataaccgggattactccggcagtgtttacacgaagcggaatatgtgtagactgtccgccgtatgtttttcttccctgtacttttttagaatactgtaccgcaattcgtctttctccgctctgaagaagaacaacaaagactactactgcaagaattaccgctaaaataatcaatcccgcaagacctgcctgagcaagtttctttccactcatgaatttctcgtaaagtgtgtataaatcactcggaacacgagaaataatattgatcagaagaacgatagaaataccgtttccgacaccgttttcagtgatgcgctcaccgatccacatcataaaggcacttcccgccgtcagtgtacatacgacaactgcacagcttacgaaattgtattcttcgagaagaccctgtcgaccgaatccaactgccattgcagtagactcaataagcgccagcgcaactgtcacataacgtgtaattgcggcaatcttctttcttccttcttctccttctttttgcatctcctctaatttcggaattgcgattgtgagaagctgcataataatggatgaagtgatgtacggtgtgatgctcaatgcaaaaatggaaaagtttgtaaacgagcctccggtgaacgcttcaaaaaagttgaaagcgtcccccgtctgctgtgcaaaaaattccttgataaatgtcggatctacccccggagtcggaagctgtgatccaagtcttacgatgacaagcattacgaacgtataaaaaattcgttttctgatatcctcaatctgaaatgctttacgcactgtcttcagcattagatcacctctgcttttccaccaagcgcttcaattttctcagcagcttttgcactaaatgcatttgcctgaactgtaagcttcttagttaactctccatttccaagaattttaactccgtctctcgggtttttcacgataccgctctcgatcagtgtttcaacagatactgtagctccgtcctcgaatctttcgagttcgctgatgttgatacctacgatcgtcttagagtttctgcaagtgaatcctctcttcggtattcttctgtacaaaggcatctgaccgccttcgaatccgggtcttgtagcgccggaacgtgctttctgtcccttatggcctttaccggctgtcttaccgtttcctgaaccatgtccacggcctcttctgaaattatcactctgttttgaaccgtctgccggtcttaagtttgataagtccatgacgttacctccttatctttttatgcctcttcttcaaccttaactaaatgtctaacctgctgtaccatacctctggtagctgcattgtccggcagtacgactgtcttgccggtcttcttgagaccaagagcctcaactgttcttttatgctttggtatggctccgattgtagactttactaacgtaacttttaagtttgccatttcaatcttacctccttatgcgataggatagaatctgttattcaacattttctatcgtcttagcccatgatctcctcgatcgatttgccgcgaagtcttgcaacatcttccggagacttaacgtctttgagtccttcgatcgtagcaagtacgacattctgtttattgtttgatccgagagattttgtacgaatatttttgattcccgccatctcgatcacggcacgagccggacctccggcgattactcctgtaccatccggagcttttttcagaagtacggatgcacttccgaattttccgagtacatcgtgtgtgatacttccgttctcatcgaatgtgatctcgatcattttcttcatagcgtcttctttccctttgcggatcgcttccgggatttcagtagcttttcccaaacctgcaccaacatgaccattgccgtctccgacaacaactaaagctgtaaatctgaagttacgaccacctttaacaactttggtaacacgtttgattgataccactttttctaataattccatctgactagcatcaatgcgttcctgtctcatctgtgttctcccttcctagaaattcagcccggcttctcttgctgcgtctgccagtgctttgatcttaccctgataaatgaagccgcctctgtcgaatacaacttctgtaatacctttttcttttgctttctcggcaattacttttccgaggcatgctgctgcttcaacgttgtttgttttctcaagttctgctttcacatctttctgaagagtggaagccgcaaccagagtatttccaacagtgtcgtcgatgatctgagcatacatatgattattacttctaaaaacagctaaacgcggtctttcagcagtgccgctgaaacggttgcgtaatttcatgtgtttttttctacgaatttcgcttcttgatttcttactaaccattttcacactctccttatttatttcttaccggtcttacctactttacgtctgattacttcgtcagcatatttaatacctttgcccttatatggctccggtcttctcttatctctgatctcagccgcatactgtccaactttttctttgtcgattccttttacagtgatcttgttctgaccttccagaactgtctcaacgccttccggatcgatcatctcaaccggatgagaatatccaaggttcagtgtcagtttatttcctgattttgatgctctgtaacctacaccgtttacttcaaggactttctgatatccttctgtaactccgacaaccatgttgttgatcagtgttcttgtcaaaccgtgaagagatttcattttcttgagatcgttcggtcttgttacagttacttcttcgccttcaaccttaatttccatttctgtcggaagctctcttgtaagagttcctttcggacctttcacagtcactacattgttctctgcaacttctacagttactcctgcaggaattgcaaccggcagtcttcctatacgtgacataccctattcctccttaacttagattttcggaggagctgctttggctcctctgttttcagttgcattgagcacttagcgaggtactttcgagcttagtgcgaaagtacacctcgacgcttaacgaggtctcccacgagtttagcggcgatggtgtttcctctgtactcaacggatttaaattaccaaacgaagcaaagtacctctccgcctacgccgagttttcttgcttctttatctgttacaacgcctttgtttgtagaaatgatcgctgttccaagtccgccgagtactctcgggatatcttctgtgtttgcataaacacgaagtcccggttttgagattctcttaagtcctgtgataactttctcgttcttatcagcaccgtatttcagtgtgatatgaattgtctgaaagtgtccgtcttctacaagatcatattttgcgatatatccctcatcaagaagaatatttgcgatagcaagtttcatcttggatgccggtacatcaactgtatcatgttttgcagtgttcgcattacggattcttgtaagcatatctgcaataggatcgctcatagtcatgtggatgtatcctccttttatattctatctgttctacattttctgccccgcggaaaatttctttgcgatgcgccaaactgctttcggcttaccagctggctttcttaactcccgggatctgtcctttgtatgccagttcacggaagcagatacggcagattccatattttctcaaatacgcatgcggacgtccgcagattctgcagcggctatattctcttgtggagaatttaggcttgcgctgctgtttgattttcatagatgtctttgccatgattttcctcctttattttgcaaacggcatattgaactgtttcaataattcacgtgcttcctcgtcagttttggctgttgtaacaaagattacgtccatacctctgactttgtcgatcttatcatattcgatctccgggaaaatcaactgctccttgattccaagtgcatagtttcctcttccgtcaaatgcgttcgggtttacacctctgaagtcacgcacacgcggaagcgcaaggttaatcagacgatcaacgaactcatacattttctcgcctctaagcgtaaccttacatccgatcggcataccctctctgattttgaagttagccacggagttctttgctcttgtaacaacggctttctgacctgcgatcttttccatatcggcgattgcagactctaaaacctttgcattttcttttgcttcgccaacgcccatgttgataacaactttgtcgagcttcggcacttccataatatttttatatccgaattttttgatcattgcgtcaacgatctcattctggtactgttctttcagtctactcaaagtccttggtcctccttcccgaattaatcaataacttcgccagtcttctttgcgaaacgaacttttttgtctccatccattttgaagcctactcgtgttgcctgacctttgtgcataagcattacgttagatgcatcgatataaccttcctgatgtacgatgccaccgttctggtttgctgcgctcggctttgtgtgctttgtcagcatattgacgccttcaacgaggactcttccgtcttttttatttacggcgataactttgccctctttgtctttatcttttccggcgataacctttacagtgtcgcctgttttaattttcatagttgacattcttaggcacctccctacagtacttccggagcaagagaaacaattttcataaagtgcttctctctaagctcacgggctactggtccaaaaatacgtgttccacgcggattcaaatcgtcttttataataacagcagcattttcatcgaatctgatataggaaccgtctttacgacgagcgccttttacagaacgaacaacaacagcttttacgacatcgccttttttaacaacgccgcctggtgttgcatcttttacagttgcaacgatcacatcaccgatgctcgcatatcttcttgtagaaccgccaagcacacggatgcacagtaattctttagcgcctgtgttgtctgctactttcagtctgctttcttgctgtatcatgcaggtaaacctccttcaaaaattattttgctttctccatgatctccacaagtctccatcttttgtcttttgacagaggtcttgtttccataacttttactgtatcaccgatcttacactcgttattctcatcatgagctttcagcttgtaagttctttttacgatcttcttataaagcgggtgttttacatggtcttccacggcaacaacgattgttttgtccatcttgtcgcttacgaccttacccgtacgggtttttctcagatttctctcttccacttctattctcctttcaatcattctggcaaagaagctgatatccgcttatcgtccagcctctgtgatcatcgtctggatacgtgcgatattttttcttacttctttgattctgcttgtattgtccaactggtttgtggcattctggaatctcaagttgaagagttccttcttagcagctactaattcctgatttaattcctctacggattttcctcttaattcttttacaaatgtattagttttcactgttatcaccgccttctaagtctgcgcgagaaacgattttgcatttgcaaggtaatttatgcattgcaagtcgaagtgcctctctagctgtttcctctggtactcctgcaatttcaaacatcacgcggcccggttttactacagctgcccaatactcaactgtacctttaccgctacccatacgagtctcagccggttttgccgtgatcggcttatccgggaaaattttgatccaaactttaccgccacgtttgatgtaacgtgtcatggcaacacgggctgcctcgatctgattggaacgaatccagcacggctctgccgctacgataccgtactcaccatatgcgatcgtgttacctctgagagcttttcctttcatggtaccacggaactgtttacgacgttttactctttttggcattaacattatttatctctcccttccttatctgctttagtcggaagaacttcgcctttgtaaatccaaacctttacaccgacttttccgtaagttgtgtcagcttctgcgaatccatagtcaatgtctgctctaagtgtctgaagcggaattgttccctcgctgtagaactctgtacgagccatatcagctccgccgagacgtccggatacagaagttttaactccaagagctcctgctttcattgttctggacatgcaggatttcatagcacgtctgaatgaaatacggttctcaagctgctgggcaatgttctcagctacaagctgtgcgtctttgtccggtcttttgatctctttgatatcaacgataagtttcttatctgtgaactgagcaagctctgcttttactttttcgatctcggaaccgcccttaccgataacaacgcccggtttagctgtataaacaatgatcttcacgcgatcggaagctctctcgatctcgattttggagattccggcgctgtataatcttttctttaaaaatgttctgatctcgtggtcttcaaccaagttgtcagcgaaatctttctctgcgtaccatttggaatcccattctttgataacgccgactctcaagccatgaggatttactttctgtcccatattgtcctcctatctttcattcagcacgattgtgatgtggctcattctcttctcgattctataagctctaccctgtgctctcggtctgattctcttcattgtcggtcctttgtttgcgtagcactcctcaatgtaaaggttgtcaacgctcataccgttgttgttctcagcgttagcaatcgctgatttcagtaatttctctataactgctgaagcatatctcggattgtaagctaaaataccgagtgctgtctgtacatccttacctctgatggcatcaagaacgtagcatgccttctgaacagatattcttgcgtaagaaatcttagctgaaggtcttgtatctctctgctcgtttctttctctcttgatttgggatctgtgtccttttgccatggatgaaccctcctttcaaaatatatgaatcttatctgactttcgacttcttctcgtctttgccgtgtcctctgtaagttcttgtcgcaacgaactcaccgagtttgtgtcctaccatatcttctgtaacatataccggtacatgtcttcttccgtcatgtacggcaaatgtgtggcctacaaatgacgggaagattgtagaacggcgtgaccatgtcttaataactgatttatcacctgcagcgttcatagcgtctacttttttcagtaagctttcgtctgcaaatggtccttttttaagtgagcgagccataggttctaacctccttgtgaatctaattatttaatcgctttaccgtctcttcttcttacaatcagcttgttagaagctttgtttttcttgcgggtcttaagaccaagtgccggtttaccccacggtgtacacggacccgggcggccgatacctgtcttaccttcaccaccaccatgcggatggtcgttcgggttcataacagaaccacgtactgtcgggcggatgcccatgtgacgcttacgtcctgctttacctacattgatcaggttgtgctctccgtttcctaccacaccgatagatgcgcggcagatgatcggaaccattctcatctcacctgacggaagtctgagtgttgcatattttccttctttagccataagctgcgcgctgtttcctgctgaacgaacaagctgtccgccttttcccggataaagctcgatgttatggatctgagtacctaccggaatctcagaaagcgggaggcagtttcctactcttacttcggcatctgcaccgttcataactgtcattccgtctttcagtccttcaggagcaaggatatatgctttttctccgtctgcgtagcagatcagcgcaatgtttgcagatctgttcggatcgtattcgatacctactactgttgccgggattccgtctttctttctcttgaagtctacgattctatattttttcttagcgccgccgccgcgatgtcttacagtaatcttaccctgtgcgttacgacctgcttttctttttttggaatcaagaagtgatttttccggagttgtctttgtgatctcggagaaatcagatcctgtcatctgtcttctggaaggtgtatatgggttatatgttctgattcccattactttctctcctttcatttcgtctaattatttgtttcacggatttgcaccgtatatagtttctgatcttacagtccttcaaagatttcgatttctttactgtcttctgtaagctgtacgatcgctttctttgtcttagctgtttttccgactaccattccgcgtcttctgttttttccttcaaggttcattgtgttgacacgagcaacctttgttccttcaaacattttttcaacagcttctttgatctgagcttttgtagcctctgtgtgtacaaggaatgtatatttcttgtcagccatcagatccatgcttttctctgtgataaccggtttaaggattacatcataatactgaatgtttgccattatgcgtacacctcctcgattgttgcaacagcagctttcgttgcgatcactgtgttgtatttcaggatgtcatatacgttgatcgtatttgtgcgtgctgtcttaacgccagcaatgtttctagcagaaatctctgcgtttgtatttccgtcttccaaaacaacaagcgctttgtttacgttcaggttgttcaggacattctggaatttctttgttttgatctcatcgaagttcatctcgtcaactacgatgaatttgttctcttctactctggaagaaagtgcggatttaagagcagctctcttctcttttttattcatcttgaatgagtaatctctcggaaccggagcgaatacaacaccgccgcctgtccactgcggagctcttgttgaaccctgtcttgcgtgtcctgttcctttctgtctccacggttttcttccgccgcctgaaacctcagaacgtgttttggctttctgtgttccctgacgattgtttgcaagctgatttacaactgccatgtgtacgaggtgctcatttacttcaacaccgaatacagcatcgtttaattcgattgtatcaacttctttaccttcgatattgtaaacagatacttttgccatctgtgtgttcctcctttcttattgtcagcttagtttccttttactgtttctttgatcgttacaagacatttcttcggtcccggaactgaaccttttacgagaagcaggttgttctctgcatcaactctcacgatttcaaggttctgaacagtaatcttcttgttacccatctgtccaggcatttttttgcctttgaatactttactcggatcagatgccgcaccattggaaccagcgtgacgatggaacttggaaccatgtgtcataggtcctctgctctgtccgtgacgtttgatcgcgccctggaaacctttacctttggagattgctgtcgcatcgatgtgatctccctctgcgaagatatcagctttgatctcctgagcaagagcatattcctctgcattgtcaaatctaaattcttttacatatctttttccggatacgcctgctttgtcaaagtggcctttttcagcttttgtcacaccgtttctgtgtgcgatcgcttttcttccgcttccgtcttttgtgacaatcttatctttcttgtcaacatatccaacctgcacggcgctgtagccatcgttctcaactgttttaacctgtgtaaccacacacggtccagcctgcagaactgttaccggaatcagaactccgtcttcgtgattgaagatctgagtcattccaacttttgtagccaaaatagctttcttcattataaatacctcctgtgatttacagcggaacgctttcgcgctcatcctaaatgttaggattgttactgttaatttgaatgttcagcggtttttcgcttacttatttttcattttgatatcgatgtaaacacctgccggcatttccagtctggaaagagcatccacagttttctgtgtcggtgtaacgatatcgatgagtctcttatgagttctctgctcgaactgctctcttgagtctttgtacttgtgtaccgctctaagaattgtcactacctctttctttgtcggcagcggcaccggtccgctcacctgtgacccattcttttttacagtttcgatgattttctttgcggatgcatcaacgagctgatgatcatacgctttcaatgtgattctcattacttgacttgccataaaaaaagtcgcctccttttcgtacttttgacttcagtacgacaagcggtgactgtacactctcccgtgtgtgtcgtgagaaactcacacgttgtttcatacttttcccttgtggtaatcagtaatcagttgtgattcgtacagtgacttgtcgccagtttcctaacttgacattcgctccacggaaaacctgcctcagcttatctttttgccgggcagcaacctcacgcttcacagctatcatgtcacagcttttttagtatataggaaataacattgtatttcaagctatttttatgaaaaattgtatttttttcaatacaatatcatttttctctttttccctattatatatggaaacaacagatgtcatacagttcggacatctgttgtttttctcaattttgacttttataattcccttccatttttagctattacattttgataccagccaaaactttttttcttccaacgctttaacgttccgcttccgtcatcatttctatctacataaatcatcccataccgtttactcatttgggccgtagacgcgctcacaagatcaatacatccccaaaccgtatatcccataacatcgacgccgttttcaatcgccttttccatttccgcaatatgttttcgtaaatactctatccggtaatcgtcggcaatttccacgcttccgtcctctttatgaatcggataatctttcgctccaagtccgttttcgacaacaaacaacggtttttgatatctttcccagtatatttccaatacatatctcaatcctttcggatctatctgccatccccattcgctcgatttcaacatcggattaggaacgcctcccaatatatttccttcacctcttcgcatcttttccgaatgtgcagtcgcgcacgcgctcatataataactcaatgaaataaaatctaccgtctctttcaaaacttcccgatccgcttcttctatctctaaagaaattccatgttctctaaaatatctcagcgcatatcccggatattttccccgaacatgaacgtctgcaaacattaagcttttatgctcctgttcttttgccgccaggacatcatccggttccggagtcagcggatatacaggcacgcttaaaatcatacacccgattttaaaatccggattaattttatgaccgatcttcactgcccatgcgcttgcagtcagttcatgatgcgccgcctgataaagctgctcttccgtcagttcatctttcggagtcatgatcgctccactcataaaaggagactccagtattgagttgatttcattaaatgtaagccagtatttcacttcatctttatattcttcaaatactgcctttacatatgttttataaaaatcaatcatctttctgctgcgccatccatcgtatttttccgctaaatacaacggagtttcgtaatgcgacaatgtcacaagcggttcgattccgtattttctgcattctgcaaacaagttgtgataaaattctattcccttctgattcggtttttcttcatctccacgcggaaaaatccgactccatgcaatcgatgtccgaaaaactttaaatcccatctcagccatcatttttaaatcttctttataccgatgataaaaatcaattccttttaactttaaattctctttcaccggctcttctgtcattccacctttcaaccctttcggaagtacatcttgtatggagattccttttccctcttcatcaaacgcaccttcgcattgatttgcggaaaccgctccgccccaaagaaaatgttcaggaaacatatccacatcgcccctttcgccaaagtcataatcccgcgctaatataatatccgtcctccatcgcattccataccgttcctacccgatttgcatcgccgattatattcgtgtcctgcgcgattccgaaaaatgtattcgcctcatcggttctagccttcatccctgccgcaaaaataattgtatctgcttttatttcaaattcttccccatccttagatgccgcagttacgaatccctcctctatcgaaacacatcgagtctctgtcagcacggttaatgttctgcatttttccatttctgtttttaaagcagttttcataatatcattcaaagttcggttcaacactttttcaatttcaagaatcgtcacctgttttccttttctgctcaattcaacccccaactcacatccgatagatccgccgcctataacgaccacattttcaccaatcttttcctgatatttataagcttctatgcatgtaaaaacatgatcattcttttctgtgcccggaagatttaactgtatcggataagctccaagcgcaaggatcagactgtcaggactcaattccttaaccatttccggtgtagcggttacatttaatcttacttctacttccgccttttgaacttgaaggatcaaataatctttcaatctctttaaatcctgctttacctcatcatactctgagcagatcaactgtccgcccaattccccttctcgttctaaaagaatcacctgatgtcctcttcgtgccgccgtcaacgcagcctgcattccggcaggacctccgccgactactactgtctttttctttacagacgcttccggcagttcattcgggacgcgatcttcatgcaaatatctcggattcaccgagcagcacggaactgtattgagcccgacatgctttcttcgttcttcctctgttttatattgatatggattataacagttcatgcatctgatacacggaacaatatcttccgatcggccttcccatgcttttttcacccaccatggatcggcgatcaactgacgtcctatgacaacagcatcggcacatccgtcctcaagtatttcttccgcctcttccggagtcataatccctcccaccaccgctacaggtatcttcactttttctttcacaagttttgccattttcgcattgattttatgcggtgcatatgccgtaggcgacatgtagatttttgtacgattatctatttccactccgcaggaaatatgaaccatatctatcttatcttcaatcctttttataaattccgcaacttcatcaatctccatgccgccttctatatgctcttctccacttatccgcatatccaacatataatctcgtccaaccgcctgccgcaccctgtctacgatcatcatcgggaattttattctattttcaaagctccccccatactcatcttttcttttattaaaatacggagaaagaaattgtgccggaagccatccgtgtccgaaatgaagcaataccccatcaaacccatactcttttgcgtcacatgccgactttgcaaatttatctgcgatttcatccatcattttttcatccatagcccgcacctctgttccatcgtttcttacgaaggataccggccctatggcataatcaccttcttccacaaccgcaaactgaccgcagtgacacaattcaaactccgctttcgcaccgcgctgtctgatcaatgaaacttcttctctgactttagccgcctggaataaatctgcaaaacaatacgttcccggagttaaacgcatacgcgtatcatccaccgatccgctcgttcctctgataatcatccctatcccacttaatgatttatctgtattacttcccaatggagccgaaataatcctgtttttcaaaacaattttgttcactttcaacggttgaaacaaaagtggatatttacattttcccctttccctttcaatattcatttttacgcctcctcttccggtatatctttaaacccgatcaatatcgtaatcaaaaatgctccgacaaaagaaaccgccatcaaaatacaccaaataacaaatgtatctccgaagaatgccggcaggccgccaagtccacacatacttagtgccgtacattttactccgaacatcaaagaaaccgccgagcagaccgctcccataactcctaatgcgatgagtggttttttcgcagggagcaacaccccaaacaatgccggttctgtaatccccactacagccattaagcaagacgacattgctgtcgttttcaaacgattatttttcgtcttaaaccaaacgccaagagcagctcctccgaccgctatgttgccatatgccaacaatggaaaaaaataggaaaaaccctgactcgcaagttccgacaaagttatcggcaaagcaattccattatgaacgccggtcaaaacaagatacggcgcagcccctccgataagcagccctcctacaaccgacatctttgtaaatataaacgaaacaactccgcataatccgtttccaatccacgttgccacaggacctgttacaatcaaaacaaccggtattgataaaatcattgtaataatcggaatcaaaagacttgacaatactttgggactaattttttttgctagtttgttgatccacatgacaaccggcatagaaatcaaaataggagtaattgatgacgcataagatacaagcgtaaccggcactcccaaaaatgatgccgtaccccctgcgcttcctgcttcgattatcgcaggataaaccattaccgctcctaccaatgccccaagataaggattgatccttaattttttggcagctgcaaacgcaaggaatatcgggaggaaatagtatcccgcctgtcctatagaattcaatacctgatatgtatatgtcgtcgtgtcaatatcaaggtaattcagcatcgccaacacactctgtaaaaatccagacgctatcaagatcggaacaacaggctgtatcgagtttgctatatagtcaatcactaccgcccatacagactgcttcttaacaatactcttttcaccgttcgcttccgtctccgtaatatgaacaattttctctaattcatcatagacatcattacatcgtccgccgaaaataatctgcactgtatttccgacccaattcacgccctgacatccatccgcttcttttagctttttctcatcaacctttgttttatcttttagttccacacgaacacgagtaaaacaactcataatactgatgatgttctcctctcctcccacattttccaaaacttctcttgccgttcttttcagatccatatgtcttctcctttcttttaactttttatttttatataagcaaacagacccaaaggcagaggcatattccacctttgagtctggcctaatctaatagtgaccacctcatcactccatgttttattatttattacatttccattattctttattggcaacacagtttctcaaatgcaatacaagataattttcttctgacacagtaaccggtcttccatacttcctatataacatttccgataagccttcaatgcagcaaacttctctttgaaaccgttcttttatcgtctgatccaaaagttcgtcttcatccatactttctttgttatctacataccgttgcgcaaaatattttacatgagtaaccaatcttgtataagccaatgaatcttcttttacatctgtcaaataattgtcccgtatatatttcagcgccaaatcgatcacttcaaatgttttgcttacagtacgtctgcttttttgaaattccgaagcaattatatgcattgctatatatccgacttctgcatccggtatctctatcccaaatcttctttttatacatttcttcgcatataatccaatttcccactctttcggataaaactgcctgatttccgtttcaaacggattatcaagcaccagattttccttcattcgctttatcgcaaaatgtatatgatccagcaatgcaagagtttccttttctttcggcaaaaatccatactcctttttcgccttctcaaaaatctcttctacaagctcaaagtattccggcggtatcgcccctatcatttccagtaattgtttattttctcctgtaataaacattttttgaattttactttcatcaacctgatcacctttttttgcccgaaacccaatgcctgttccgataataataacttcgcctttttttctgtcatatcccatgacaacattattattcaatggctgtactattttaatcatttcatatgatcctttccaacgtcaataatcgcccgcctgcccgaatttgtttatcccttgtacatgcaactttaaactcgtctgttttttctaagatcaccataactgtcgcaggatggtgctttctgataaacgggagatttattttcatcaacaactgccccgcctctactttatctccctgttccactttcacatcgaagccttttcccttaagttctaccgtatcgatcccgatatgaagaatgatattagccccttcttccgtcgtaattcccactacatgctttgtcggaaacacaaccgaaacagtacctttcaccggagaatagatttctcccttatccggttccacagccactccgtctccaagtattttttcagaaaacacagcatcatccacttcgtctaacggaattacttctccttcgacaggcgcatacacttcgttcgattttatattttctatctttactttttctacatgattcttcaaaaaaaacatttttattcctccaaaagcaaaacgtttattaccatttggctggttcttttaccgctaatattaactcttaatatcaaaaaaaccaaaatcagctctgctgattttggtttagcctgcattaccagtgacattcccaatgtccctctttaattaaattcattataacaacaacatataatattgtcaaccaaaacaattcctgttttacagttttacagtatttcataaagctcgggaaacaattctacgcttcgctttaaaataccgttcacataggcgatcaaaattccgtaattcgttatcggaatcccctgatccgccgcgcagctataacggtacttcatctcccgctcattcagcatacagccgccgcagtgaatgatcaacttatatttacttaagtcatccggaaattccgttcccgatgttgtctctatctgaatctctttgcctgtatattccctgatccagcggggaatcttcaccgttccgatatcctcgcactgtcggtggtgcgtacatccttcgctgatcagcacgacatctccctcttttaatcgttccagttctgtcacacccctaactgcctgttccagattgcctttataccgcgccatcaatattgaaaaagaagtaagcggcacatcggcaggagtatcctttgacacctttttaaagacctggctgtccgtaatcaccattctcggattttcttttaattgatcaagaatatttttcagtccgttttcttttacaactaccgataccgcctctgcttcaagaatatcacggatcacctgctgctgaggaaggatcagtctgcctttcggagctgccgaatcgacaggcactacaagaacgacgatatcagaaggatgaagcagatctcgaacaagaacattctccgtctcctcctgatgcactgctgccgcaatcttctctttcagctcacaaataccgtcgcctgccgccgcgctcacttcgatgatccagccaccatccgaatcaagttctttcttgatccgttccatatcctcttcttctgcaagttcttttttattcagcgcgacaacataaggaattttctttgccttgatcttttcaaggagctttttgtcttcccctgaaactcccgctgccgcatcgataacaagtacagccgcgtctgtcttattaagcgtctggtaactttttttcacccgcagtttcccaagttctccttcatcgtctattcccggtgtatctatcatcacaaccggaccgatcggaagcagctccattgacttatataccggatccgtcgtcgtacctttcacatctgatacaactgccagatcctgccctgtaacggcattcataacactcgactttccggcattcctccttccgaaaaatccaatatgaacccgttcagacatcggtgtgttattcaatcccataccgccacttcctttccttctttgatctgatccgttcttttttcgccgcttcttactctgcaacaacccggcggaagtttttctttccttttttcaaaataattccttcgcccgagaggtcctcttttccgaaagatgcggcaatatcagaaactttttcaccgtctacggcaacgcctccctgctgtaccgcgcgtcttgcctcggatttagatgtaacaagtccgctcttcacaagcattgtaagaatatcgatctttccgtctgtaagatcttcttctgtaagctgtgcagtcggcatctccgccgcattacctttactaaacaaagctcttgcgctttcctgcgctttcttcgcttcctcttctccatggacaagttttgtcagctcatatgccagaatctctttcgcagtattaagctgcgctccttcccacgaatccatcttatctatttcctcaagcggaaggaacgtaagcatacgaatacatttcaaaacgtctgcatccgcaacatttctccaatactgataaaaatcaaacggcgatgttttatttgggtcaagccatacagcacctgactgtgtttttcccatcttctttccttcggaattcaaaagcagcgtaatagtcatcgcgcctgcatcttctcccaattttctgcggataagctctgttcccgcaagcatgttgctccactgatcgtcgccgccgaattgcatattacatccgtatttctggaacaatgcatagaaatcataagcctgcatgatcatgtagttaaactcaaggaaacttaatcctttttccatcctctgcttataacactctgccgtaagcatacggtttaccgaaaaatgcggtccgatctcacgaagcacttctacataattcagatcaagaagccagtccgcattatttaccataagcgcttttccttctgagaaatcaataaacttgctcatctgctctttaaagcaatcgcagttatgacagatctgctccggcgtcatcatgcttctcatatctgttcttcctgacggatctccgatatatcccgttccgcctccgatcaatgcgatcggcttatttcccgcttcctgtaaacgtttcataagacacagcgccataaaatgtcctacatgaagactatctgccgtaggatcaaacccaatataaaatacagcctttccactgtttactaaatcgcggattcgttcttcatccgtcacctgcgcaatcaaacctcttgcctgaagttcctcgtaaattcccattttctttctccttattctctgtaaaatatcaaatgtttctaaatcaccggaagtgccaaaaggcacattccgggattgtaagcagtcgccaaggtctcgggcaagcccggactttggctcgttgcctatacaaaaaaaccgcccttatcgctcacgcaataaggacggatatttccgtggtaccaccttaattcaccgaatcgccgaacatcggcgctttcagtctcattccggtacgataacgtataccactccgtcacagcctactcatcatctgccattttacatccgcggtaatggtttctcctgtaccgcaggacagacttcttttcagtgcgaagctccgggatgtattcacagattcgtctcacgcgcctctcatcaaccggctgctttctgtcatcacgttcacctgttacttcttcccttcaaagcctatataatatgaagcatatcttagcttacacttcttcttttgtcaagagccgactacatattgatcaaccacaaattcttcaccggtcattttttaacgactcttcttgtaaatcaatcaatatccgctttgcattcccgaccagcccggcatccgtctgccaaatgtcaaattcaggaaaacccggtattcccatcggcacgtcttctctgcgaaactccatcttactgtcagtcacttttttgcccgacatatgaaaagacgtcacgcctgcatagtctgccagttttccgattacttcaggacttatcccggctcctgcaagaatctcaatctccccggcagcttccctcacaagttcttttaaaagttccctgccattccatgcgctgtctttctgcccgctcgtaagaattgtatcaattcccagctctatacactgcctcagcgcttcatacggactccggcacacatcaaaagctctgtgaaaagtgaccgcacatgggcgtttcccacttttactttcggactttgcacattcgacaagttccttcatcctatctgtatcaagccttccgtccggttttaaaataccgataacaacaccgtcggctcccgcctctctaaacagacagacttcttccttcagcgtctcgaattcatatccgtcataacagaaatctccgaatctcggacgaagcagcactcttacaggaatatcgacatttttctttacctgttcaaacatcgcgaccgacggagacagacctccgatcacaagacccgaacacaattctatgcgatccgctccgcccgcctgcgcctcaaccgcagatcttacactgtcggcacatacttcaagtaaatacgacatcgccgcgcagccttatctcggaatcttcgacagagccgctttgtctccgacgatcacaacatcgttatgaagctgaagaatcgatgccggaacttccggagttaccggtccgaaaaatgcctttgcaacgatgtcggcttttgcctctccgtttacaataagcaagattttcttcgcacgcatgatcgttccgatacccatcgtatacgcctgacgcggcacgtcatcggcagatgcgaaaaatctcttattcgcttcaatcgtactctccgtcagatcaacacagtgtgttgtctgtgcaaaagcgctgtccggctcgttaaatccgatatgtccgttgtgtcccagaccgagaagctgaatatcaacgcctcccattgattcgatcagtttttcgtatctttcacattctttgtcggcatccggctctgtaccgttcggaacatttgtattctcaggatcgatattcacacggtcaaacaaatgctcatgcataaaatagtagtagctctgatcgttatcacgagtcagacctctgtattcatccagattcactgtctttacttccgagaaatcaagatcacctttttcataccactctacaagtttatcgtatgttccgatcggtgtagatcccgttgcaagaccgagtacacaatccggtttcaaaattacctgtgcggaaagaatatttgccgcttttctactcatttcttcataattctctgtttcataaattttcatatctttcgccctcctatcgctacatttaagtctaacaatctgccttataaaagtcaagcagaaagaacgctcttcctacctgtctatgcctgtatctttctgtatctatctgccgtccgcatcttcccgcatccggctgctgtctgtatctttctgtatctgtcctctttctgtatcagcctgcccgtcatacacgattcctaaaaggacaagaccttgcggcggcgcagtagctcccgctctgcctctttctttttgctcaagcatctcttttacttctgaaggagcaaatgcaccccgtccgacttctacaagcgttcccgcaatgatccgaaccatattatacaaaaacccgtttccgctgatgcgtatttttattcgttctccctttttttcaacatccagactgtcgatcctgcgcaccgttgtttttacaccggtatgaacgctgcaaaatgttttgaaatcatgttcgccgataaaatacctcgccgcctttttcatatcatcaatatccagcggaaaagaaacgaaccacgagtctcttcttctgagcggatccggcatttcacggtttactattgtatattcatacgtttttatcgagttttgatatctggggtgccagtcacatccgacttcttccgaccgcataactacgatatcatcgggaagaagcgcgttgactgcatacgcaatcctctccggcggaatcggcgactttgtatcaaagacagccacattcccccgcgcatgaacgcctgcgtccgttcggcttgcaccgatcaccttcacagtttcttttgtcagatcggacagcgctttatttaaaacttcctctaccgtaatcccgtttggctgtatctgccacccgcaataatccgttccgtcgtaggcgacagttaatttaatccgtctcatatttttattcgttcccctttattctgtcagatcatatgcgttttcaactttccaccgtgtcttttccttcttcgccgtctatccccggaaaagcagacctgcacagacctgtcatgccaaatactttttcagcctccgcatcgggctgcctttggagaatccacaactgaaaccgaagtccgccagatactctgtattctcctccgtcaccaggctgcttttagaaaatccacaactgaaacggcacgaattttccgaccgcaaacactcccgctgcatagagaatcgtaatcagatacgccgctttgtctcttccgttatatttcagcggcttcatcctcgtccttccctctcctccgtgatagcagcgcgcttccatcgccattgcaagatcgtttgcccggcggaaagcagaaacaaacaacggtacaagaatcgggatcatcgcctttgccctctgaataatattcccgctctcaaaatctgctcctctggcgatctgcgctttcatgatcttatccgtctcctccaaaagaatcggaataaagcgaagcgcgatcgacatgatcatcgcaacctcatgaaccggaagatgaagcttgttcaaaggattcagcagtttttccattccgtccatcaatccgttgggagatgtcgtaaacgtcataagagacgatcccgccacaagatacattaagcgaagcgccataaacaccgaagtacgaacgccttcttccgtaatcgtaaaaatccaaaaatgcagcagcgtttcgccgcctcttgtcaaaaacagattcataacgaccgtaaacatcagaaggatcacgatcggttttaacccttttacaatatatttcagagggactttcgacatatagattaccattccgagaaacaatgtcgcaattacatacccaaggaaagaactctgaacaaacaaagagacaagaaataaaagcgtgcagataatcttcacccgtgggtctaaactatgtatccggctttttaccgggtaatactgcccgatcgtaatatctctgatcatataaaactcctcattatctcatccgcagcttcttcaatcgttgtcgcatcaggcgacacatcaaatccgcggtctttcaagtcatgcatcacataagtaacctgaggcgccgcaagtccgacctcctccaactctttataatgccggaacacttctttcggagtactatccagcatcttttcccccttattcatcacaatgatacggtctacataccgcgccacatcttccatactgtgcgacacaagaacgaccgtcatccctgtctctttatgcagttttgcaatctggtcaagaatctcgtctctccctttcggatcaagtcccgccgtcggctcatccaaaataagcactttcggcttcatagccaacactcccgcaatcgccacacgcctcttctgtcctcccgaaagctcaaacggagactgcttataatacttttcgggaaatccgactaattccagagcttccctcgcatttttctcactctcttcctccgacaatccctgattcttcgggccgaaacaaacatcacttatcacatcgacttcaaacaactgatgctcaggatactgaaacacaagacctacctgactgcgcagttttctcatgtcgtacccttccgcataaatgctttgtccatcgtacagaatatccccggaagtcgccttcataagtccgtttaaatgctgaatcagcgtagattttcctgatccggtatgaccgatgatcccgacaaactgcccctgcccgatctccaaactgatatcattgagcgcacgtttctcataagccgtgccgggactgtatatataatttacatgctctaacgcaatcgacataacgcttccaccaactcttcccttcttagaattcctttcggaatatcaagaccacgttttctaagttcctccgcaagcatcgtaacttgcggaacatccatcctgtatgatttcagctcatctgcacggccgaaaatttctctcggcgtcccgtgcattacaatatgaccgctgtccataacaaacacctgatccgcatcgatcacttcttccatataatgagtgataagaatgaccgttacgttcttctcttttctcaaacgcgcaaccgcctgaagcacctccttgcgcccgttcggatcaagcatggcagtcggttcatccaaaacaatacacttcggctccatcgcgatcactcctgcgatcgccacacgctgcttctgaccgccggaaagtttattcggagaggacgcccgatattccgtcatcccgacaagacgcagactttcccctactctttcccatatctcatctgtcggtatccctatattttcaggtccgaaaccaacatcttcttctacgacagttccgatgatctggttgtcaggattttgaaataccattcccgcactctttcgcacgtcccacagattctccggatctttcgtatcctgtccgtccacccatacagtaccgcctgtcgggatcaatattgcattcatatgctttgcaagagtagactttcccgaaccgttatgaccgagaaccgccacaaaagaaccttgcggcacatcaatatcaaccccgtcaatggcgcggtttgttccgatcacatttccttcctcatcacgtttatcatattcatatacaagcttttccgcatgtatcatattcataggcagaccgcctttcccggttttatttcaccttaattcttctcaatctctccgcacttacaaaaactgcgttttcagacagattatggattccattttactgcatgaaaatgtttttttcaacccgccacaaacgcattttttctccctgccagaaacaaacgcttcaatccgaactgctccgaaacccttctccaaacacttcactcgtctccataaacattaaaaacatattctcatccgcttcttccgccgcacatttcacgagaaatgcctcagatttgctgcatgcacaaagcaagacattctttttctttcccgtgtatgttcccgtcgctttgacagacgttacccctctctttgtcagctctgcgatctttgccgccacttcatctcccttttcggttacaacaaaggccagcgttcctgctccgagtccatacaacactttgtcaatcacaacaaccgatgcaaatgtagagaccaatccataaagggccgcatctacatctccgaatacaggccatcccagaagaatgatcccaagatcaatgatcatcgtaattttcccgacagatagatgagggcgttttttcttgatcggcatgatgacaaaatcaagacctcccgaagaagagccccgcatatagaacataaccatcccggctcccatcagcgctccggaacaaagcgcagccatcatcctctgtccttcatacatcggaaacaccggaaaaacgacatcaagaaaaaatgttgtgatcaccattgatttcgccgttttcaaaagaaaacgtttccccagtgtacgataactgatcacgataaggggcagatttataaaaagagtaagtgttccgaccggaatcccgaaaacatgattcagcaatagagatattcccgtaattccgccgggagcaaaatcggcgtttcccgcaaacgtatatacccctgccgcaaacaataccgcccccgcaatatcataaaataaatcgccccacaataattttgcagttttccatttcatttcctttgtttttttccacataaaaacctctgtatgccatacttattcacaatgcttagttacactgtattcagtatatgcaaaacagaggtttctaatcatgcgctttttctgcgttccgagcttcttcccgcgcatacattttcaaattcacgaagcttttgctcagcttcgggattcagatatttcggtactgcaatctggactgttacgtattgatcgcctctcacttccggatttttcatcgagacgattccttttcctttcaggcggatcttcgtccccgactgcgttccctttgcgatcttacataaaacatccccgtacagcgtctgcactttcgtttctccgccaaacactgccgtcgtatacggaacaaaaactgtcgtataaacatcgctgcctttccgttcgtagcctgcttttactcccacatttacttttaaaaacagatctccgttctctccgccgttcacccctggcattccttttccgcgcagacggatactcttacccgtatcaatccccgcaggaatatgaacctgcaaactcttagaaacgccctgactattcggatctttaaaggtaaacgttttatcacatccaaagacagcttcctcaaaagttaccgctatctccgcgtgcaggtcttctccttttgcatccctctgccgctcatatccgcgaaatccatgaaatccgcgaaaatcctcttcccctttgcttccatgcattccgcggccgaaaatatctccaaacatatctccgaacatatcatccatatttccgctttcaaaatggtactcctgatatccgccgtttccgttcgtataagctctgtgataagaacctcccgaaaacggattgcctgatgtatctttgccaaacggatcagccgatgctccctgatcaaatgccgcatggccaaactgatcgtacatctttttcttctccgggtcgctcagtaccgtatacgcctccgtcacttctttaaacttcttctccgcctgtttatcgccttgattcgtatcaggatgatatttcttcgccagctttctgtaagccttttttatcgagccggcatctgctccttttgatagaccgagcacttcataataatctctttttactgacattttccttccctcccacaattacaaattcaagatcactgattttattcttgttccattctactaaaaatcattatttacacaaattatctctttgatataaaaccaccccggagaaatttccggggtatctttagttctgttctatttgtaatatagcagttgtctttttaaatgtcaatattttcgtaaatatttttccgaaattacaaaaacccgcagagcaaacactctgcgggtcatatcgctatatcaaatctatattcagattatgattactcgatgatcttagctacagtacctgatcctactgtacgtccaccctcacggatagcgaaacgaagaccttcttccatagctaccggatgaatcagttcaactgtcatctctacgttatctccaggcatacacatctcgataccagccggaagttcgcaaacacctgttacgtctgttgttctgaagtagaactgtggacggtagttgttgaagaatggagtatgacgtccaccttcgtcttttgtcagtacgtaaacctggcatgtgaatttcttatggcagtttactgtacctggtttgataagaacctgtcctctttcgatctctgttctctggataccacgaagaagtgctccgatgttatctccagcctgagcctcatcaagaagcttacggaacatctcgattcctgttacaacagtcttcttaacatcatcatggataccgatgatttcaacttcgtcagatacgtgaagtgttccacgctctactctaccagttgcaactgttccacgtcctgtgatagagaatacgtcctctactggcatcaggaatggcttatctgtagcacgctctggtgttgggatccatgtgtcaacagcgtccatgagttccatgatcttgtctccccactctccgtctggatcttcaagagccttaagagctgatccctggatgatcggtgtgtcatctcctgggaagtcatactcgctaagtacttcacggatctccatctctacgagttcaagaagctcttcatcgtcaaccatatcacatttgttcatgaatacaacgatgtatggtacgttaacctgacgggacagaaggatatgctctttagtctgagccataactccgtcagtagcagctacaacaaggatagctccgtccatctgagcagctcctgtgatcatgttcttaacgtagtcagcatgtcctgggcagtcaacgtgtgcgtagtgacggttagctgtctcatactcaacgtgagctgtagaaattgtgataccacgctctctctcttccggagctttatcgatgttctcgaaatctacagatgcgttaccttctactctgtgagaaagtacttttgtgatagcagctgtaagagttgtcttaccgtggtcaacgtgaccgatagtaccgatattacaatgcggtttgtttctttcaaatttagcctttgccattttgaatatcctccttaaaaatatagcccgatatggggcaacctagttttggtttcgattttaaacctggctaagtttgattatatttcaaacttagccgattttcaagccttttataatattttaggcatttttattggataataccttctcctgtacagacttcggtactggctcgtatttctcgaagaacattgagtagttaccacgtccctgagttctggaacgaaggtctgtagagtatccgaacatttctgacagcggaacatacgcacgtacaatctttccaccaccgagatcatccataccttcgatacgtccacgacgtgagttcaggtctccgatgatatctcccatatattcttcaggcattgtaacctctaccttcatgataggctcaagaagtacaggtgatccctgcttcattgcatccttgaatgcaagagaaccagcgatgtggaatgccatctcactggaatcgacttcatggtaagatccgtcgtatacgttagcatgaacaccaactaccgggaatcctccaaggataccagatttcatagcttcctcaataccttcacctactgccgggatgtattccttcggaatagctcctccgactacagtagactcgaacttgtatgtctcctcaccgttgacatccattggctcgaatttaactttacagtgtccgtactgtccacgtccacctgactgtttcgcatacttgctgtcaacatcaaccggttttgtgatggactctttgtaagcaacctgaggtgcacctacgttagcctcaactttgaactcacgaagaagtctgtcaacgatgatctcaaggtgaagctcacccataccagcgatgattgtctgtccagtttcctgatttgtatgagcacggaatgtcgggtcttcttctgcaagttttgcaagagattcaccgagtttaccctgagaagcttttgttttcggctcgatcgcaagctcgataaccggctcagggaattccatagactcaaggattaccggattctgctcgtcacagatcgtatctcctgttgtggagaacttaaatccgatcgcagcagcgatatctcccgagtatactttatccagctcttcacgtttgttggcatgcatctgaaggatacgtccaacacgctcttttttaccttttgtagcgttgagcacataagatccggaattcactgttcccgagtaaactctgaagtaagcaagtttacctacaaacgggtcagacatgatcttgaatacaagcgctgagaacggctcttcatcagaagaatgtctcactgtatcatttccgtccatatctacaccctgaatagccggaacgtcaagcggtgacggcatgaattcgattactgcgtcaagaagcttctgaacacctttgttcttgtaagctgtaccgcagcataccggaacagcagtacattcgcatgtcgcttttctcagcactttcttcagctcgtctatcgacggctcttcaccttcaaggtacatcatcataagctcgtcatccagctcgcagatcttctctacgagttctgtatgatacagctctgcgtcatctttcattgcttccggaatctcttcgatggagatgtcatctcccttgtcatcgttgtagatgtaagctttcatttcaaaaagatcgatgattcctttgaactcgtcttcttttccgatcggaagctgaagacaaattgcgtttttacctaatcttgttttaatctgctctactgcgttgtagaaatcagcgcccatgatgtccatcttgttaatgaacgccattctcggtacgttgtatgtgtcagcctgacgccatacgttttctgactgaggctcaacaccgcccttggcacaaaatacacctaccgcaccatcaagcacacgcagggaacgctctacttctactgtaaagtcaacgtgtcccggtgtatcgatgatgttgatacgatgctctaacgcgcctgctttcggcttgcagttttcctgcagcgtccagtgacatgttgtcgcagcagatgtgatcgtgatacctctttcctgctcctgggccatccagtccatagttgcagttccttcgtgagtatcaccgatcttatggttaacacctgtataataaagaatacgctctgttgtcgtagtctttccggcatcaatatgcgccataataccgatgtttctggttctgtctaatggatattctctaccagccaagatcttttcctcctctatttggtcattcttcgggataatttccgaagaatatgcctcgcacctgcctcgctaagaggcgcagcagtgtccggctcttagaaacgatagtgtgcaaacgctttgtttgcctctgccatcttgtgcatatcttcttttctcttcacagctccgcctgtgttgttcgctgcgtcaagaatttcgtttgccagtctctcttccattgtcttctcgcctctctgacgggaatacatagtcaaccagcgaagagcaagcgcctgtcttctgtcagctctaacctcgatcggtacctgatatgttgctccaccgatacgtcttgcttttacttccagaaccggcatcatgttgttcatagcttcctcgaacacttcgatcgccggtttctcagcctttgcctctactctttcaaatgctccgtatacaattttctgtgctacacctttcttaccgtcaagcatgatgttgttgataagtttggtaacaactttattgttgtatatcggatccgctaatacatctcttttctgagtatgtcctttacgtggcacggtccttccctccttaatcattttttccggttataccgggattaattcatcggtactcacatgtgtcttctatgaaatcacataccatgtgctcgcggccgcgggacgtctatctttgtccgcacctccggtactccttcggagcggaatctcaaatccgcaaccctttctcactgaacgatcaatgaggcacgataatcatagttctgtttgtgatacgatttaactacttagttactgctcttgttcttttacgcttatcgtccactcgaaaatccgattcgcttacgcagcctttcgtactgacgtacttccgatcttctcatgaaaacctcggatgaaaacaaatacgccgctgtgcttatacctgttttcctttctcagttttttattttgcgtctttcggtctttttgcaccgtatttagaacgagcctgtcttctcttagcaactcctgctgtatcaagtgtaccacggataatgtggtatcttgtacccggcaggtccttaactcttcctccgcggatcataacaacgctatgctcctgaaggttgtgtccttcacccggaatgtagcttgttacttcgattccgttagagagacgaactctggcgatttttctcagagctgagttcggtttcttcggagtagctgtcttaactgctgtacaaacacctcttttctgcggtgcagatacgtcagtcgcacgtttcttcagggagttgtatcctttctgaagagccggtgctgtagactttttctctgaagtctggcgaccttttctaactaactggttaaatgttggcattctttttcacctcctatgaattattcgtttcctcatgacttatgtcataaggggctgcggataatatgtct

SEQ ID NO: 7624 - DNA, 13834 bp, Unknown
  gut microbiota DNA sequence
caaatatatattttatgatattatttaattaaattaataaatgtacttaaataaaagaaaggagaaaagtatgaaaaagatttctgtggtgttgattgcggcgttggtcgtatctttgctttttggatgtggaaagagcgacgatgcgaaaggtacagggaaaacaactttgagcgtttggtattggggagaacaagaagtgccgggatataaggcgtatatggaagagatggtaaaacggtatgaaaaaaagaaccctgatattaaagtggaagctgttcttcaggaaagtgataatctgtatacggcatttcgtacggcagaggcggcaggggaaggtccggatattcaatatatgtggggcggaactcaggcaatggaagatgtttggaaaggaaacgtagctccgattagtgactatatttctgaagaagaactctcggttattccgaagtcggcattggctcagacgaattggaacgggaaacaatggggaatcccggcatatggatttacatatgggattgcctatgataaagaagcaatgcgtactgccggagtagatccggaaaatccgtttactacatgggatgaatttttagagtgttgtgagaaattaaaatcatcaggaattacgccgttaggaatggggttaaaagacggatatttaccggcgtggatcgggatttttttgggacagcaaaatatggacagcgtgaatgatatgatttcccttatgagtggacaagaaagctttacagataaaaaatactctgaatggctggaaaaaattgcagagctgaaagaagccggatatattaacgaagatatactttcattagacttatatcaggggcagcagttgatcgaaagcaaaaaagcggcaatgacacttcatacacagccgtatgcggtatcattggaaaaatcattagggtcagatcagatcggttttgcaaaagcgccagtattcggaaccggaaaatttgcggattcagttgcaactccgagtcaggtatatgtaataccaaacagtgcgaaacataaagaagaggcggcagacttcttattgtttttacaggaagaagataatattaaatatctgtatgaatcggcaaatgcgatgatgccgaataataactttgatgaaagctgggtatccagcgaaattgacagaaaagttttggaatggcagaaagaagacaataatttttgttatcagttgtattttgcacctatgtttgaaacagatggtctgattccgacggtacagaagatgttttcagaagggttagcgccaaaggatgcagcggtggaattagatgaggcactcgggaaatgtatggaacaaaatcctgaggttcatgatgcgtttttagaatggagtgtagaagaatagttctgaaaagaggaaagcctctgtttcaaaggaagggattgatatgaaaacgaacaggatgaaaaagttcacgccgtatttctatatattaccaacctttatcattttggcggttgtaattgtaattccgattatttatgttattatccaaagcttctatacgacctttgcaaatgagagtgtttttgtaggtctgagaaattataagatggcatttgaagacgaacttttgctgactgcgttgaagaacaacttgaaattatttttatgcgttccgatattgacagtgctttcacttgccattgcatcaattttatataacaaaatcagagggtggaggttttacagaagcgttatttttattccgtacatactggcaattccggttgtgggcattgtattttcatatttactgcagtacaacggagttatcaattctattttgcggacaatcgggttggagaatatggcgttggattggttgggagatccgaatttggcattcccgagtgtggcaatagttattatgtggaagcagatcggtttcggagttgttttgtttttggcgagaatgatgtcaatagataaaacattgtatgaatcggctgatgtagacggagctacatggtttcagaaatttatgcacattaccgtgccgcagacaaaatcgattattgaattttatgtgatcatcactcttattgaaatgttgagttgggtgtttaatttcatttatgtcatgacggcaggcggcccgggaaataagacgcttgtgttggaatatttgatttataagaaagcgtttggcggtggtgatttcaatattgcaatggcgatcagcgtagtacttcttgctattgcggcaatattgattgtaatacatcagattgttatgagaaaagaggagtgaaagaatgaaacgaaaaagaggaggaatagtctcccagctattgatgattttacttgtggtcgttattatctttccgttatattttatgacagcgaattcgtttaaaacgcatgaagaatatgtcaataatatggcaggccttccgcaaacatttacagtacaaaactttgtggaagctttccggggaaaaccgttcggacaatggtttatgaatagtttgattcttacagttgcagcggtttttattacgggaatcattgcactgctggcaggatatgcctttgcaaagatgaggtttaaagggaaaaaagtgttgttcaacatgatcgttccgctgatgtctgttcctccggttgttatgattataccgcagttccggattattaaaatattgggtctggtaaatacacgtgtttctgtgatattaatatatataggaattatgttgcctatgacgatatatttgatgagaaatttcatgaaaacagtaccggattctttgttagaggcagcggagattgacgggtgcagtaagcggaaggcgttgacaaagattatgattccgctgagcgttccggcgcttattacttcatcacttgtaaatcttgtatgggtatggaacgagctgttgatttcgcttgtttttcttcagaaagaagaattgcgaaccttaatggtagggattactttatttaaaggacgtttcacattaaatatacctgttattatggcagggttggttattgcgacagtgccgatcgtgttgatatatatatttgcgcagaaatatcttgttgaaggtatgttggcaggttcggtcaaagagtaagaaataaagggggatatgctttgaaaatctataatccgacagatataggagatcgaaataaactaatgatcttacggctgataaaagtatatgatggaatttccagacaggaaatttcaaaaaggatgcatttaagtgcaccggcggtaagtaataatgtagcggccttgatcgaaaacgggattgtatatgaaaacggctgtgacgatacgagcttgggaagaaagccgagacaattaagttataaaggagacctttattatgtgatttcggttgaattgatgcctaaaaaagttcgtgcaggtattgcagatctgtacggtgaagttcagcagtggacagaaaaggagatcatagtagaaaacggagtggacgaggttctcgggcagttggattctgcgatagacgagttgcttgaaaagcgaaaaaaggatgtagatgtgattgtgatcgcagtaggtgttcctgcgctgacaggccagaatgatttaaacgatctctttggaacatatttgccggaatggaaaaatgtcgatttgaaagagcatattttacagaaatataatgtagaagcgattattgtaaatgacgttgaattggcgctgatcggagaacgtgaaagaggcgtaggaaaaaaacagacgaatattgtttacataaaatacggagaaggctttgcggcaagggcgattgtggacggatatcttctaaaaggaaataatatggcggcgggagaattaggttattatctagaatcattggaagagatgacagatgagtttgtatgtcccggacgatttgaaaaaaaggtgtgtcaaaatattttctcagaatgcggtgaaaaaaacggcttgtcagatcttattttgcgagctgaacaaggtgatgaggcggcagatgccattgtgaaaaaaattataagaaaaatcgccgttgtcatcgccaataccgtattgatgttaaactctgagatggtgatattaggcggagattcagaaatttttacagaggaaaatattgttgagatcaagaaaatattagaaaaagtttgtccgtttgttcctgaagtcgtaacttcaaagttaggcgcagatgctccgatcataggtgggataaaagttgcattggattatgcggaagagcagatcattatgctctggaaatcataggagaatgatatggaggcatatatggacatattactgaaagaaagactggtatcttattatgaaaaacatattttagaagatgtgatgccattttgggatcggaggtgcatagataaagaatacggcggatatattacttgttttgacagagaaggaaagatgacagatgataagaaatatatttggtttcaagggcgtcagctatatatatattcactgctttataacaaagtacgcaaaaagaaggagtggttggaaaatgcaaagcatggtttttcatttcttgtaaaatatgggtatgcgggcgatggaagatggaattatgtattggacagaaaagggaatgttttggaaggtacaatctcaatattttctgattttcatgttttgcagggggtggcagaataccttaaaatagaagaagtaagaacgccggaaaatatggaacttttaaaaacttgttatgaaacgatggaaaaaaatgtatttgatccatggtttaaagaaatatatgaaaatacatggagcccggtttttatatggcatgacatgtatctgacatgtctgtctacaacggaaacatgtgcggaagtattggggacggatgttacaaaaaaacttttgaatgaatgtgtcgataagattgctaactggtttgcaaatgatgaatataacgtagtgtttgaagcggttacaagagaaaataaaattgatattgagtcagacaaaggccgctttattaatccgggacatatgcatgaatcagcatggtttcttatgaaggcaggagtattgctggaagacaagcagattactatgcgcggtatacagattgcccgttgggcaaatgccgtcggaaaagatgaagagtatggtggaattatttcatatgcagacgcattgggggaaacacctcgcccgatcgactggtttaaagaaacgaactctttatggaatgaaaaagtatggtggccgaatgcagaggcgttgacagcttatgcacaggcgtattgctatacgaaagacagttattttcttcaagaatttttagatcagcataattattgtaaagaaaagttttttgattcacaatataaagagtggtttgaacgactggaatatgacggaaccgtaaaaaacagtgcaaaaggaacaccgtggaaatgtgcgtttcatcttgtgagagcgcttgtgtttacattagaagcattttcggaaatggaggcggtatagtgtattttctggggattgacggagggggaacaaaaactgattttttactgttagatgaaaacggaaaaacgattgcacagcgcaagataggaactatttcttataagcacgttggaatggattatgtgacagaattactgagagaaaatataaatcaaatattagacgggaatgatgcctatatatgtcttgcctttccgaattggggagaatcaagagtaaatgatgaacgctttttatgccggattgacaaaattacagataggccgatgaaaattgtaaacgacagcgccgcgggatgggcaggatctttgggattagaagaggggatcaatcttgtggcaggaacaggttcgatcgcttatggacaaaataagtttggcacagaagctcgtgcgggcggatgggatgatggtttttctgatgaaggctcttgttattggttgggaaagaaagcgttggagctgttttcaaaagagagtgacggaagggtaaaaaaaggaaagttactcgagattttccgatacaattttaatttaaaaaatgactttgaccttatagacatttttgatgaagtgtataaaaataatcgtacaaaaacagctgaacttcaaaaattgcttttacaggcagcgatgcaaggagatgaagaagcaatacgtttgtatgaggctgcggcagaagaattagcgctgatcataggcgctgtttatagaaaactggaattttcgggagacacgatcgtatcttattcaggtggattgtttcatgcaggagattttatattaaagccactggtgcggaagctcgaggaaaatggaatttgtctttgtcctcctaaatattcgcctgtacagggagcggcgcttttggcggcgagagaatatagcagagacggtgaatttttatcacgaataaaagcaggcttagaataagaaaaagagaatatccgcggcagattgcgattttttgctgcgagatattctcttttattttatattatgtttataattattttgccggatatttttatttggtgataaaatcacagacataatttctattatgtgttattatacttatataatgtgcaatgaaaattataagagagtaagatcgacacataaaaacaagagaaaaacaggaggaacgatttatgagattaaaagataaagtagcgattattacaggaggaagccgtggaatcggatttgcgacagcagatgcatttttaagagagggtgcgaaagttgctgttgcggcgagcagtgaaaaaaacgcggaagcggcagtcgagaagttaaaagcgattcatccggatgcagaagtggtagggatcagtccgaacctcggaagttttgaaagtgtgaaagaagaatttgataaagtagagaaacagttcggacgtattgatattttggtgaataatgcgggggtttccgagagcactccgtttacatcttatacagaagctgattttgatcgtgtgatcgatctgaatgtaaaaggtgtatttaacgcaacacgcgcggtagttgacggaatgattaaaaatcacagcggggttgtcctgaatacgtcttcaatggtaagtatttccggtcagccgagcggatttgcttatccggcgtctaagtttgcggtaaacggtacgacgatctctctggcaagagagcttgggccaaaaggaatccgtgtcaatgcagttgctccgggaattacggaaacagacatgatgaaagccgttccgaaaaacgtgatcgagccgatgatcgcacagattccgcttcgcagactcggacagccggaagacattgcaaatgcatttgtatttcttgcatctgatgaagcgtcctatattacaggcgtagttcttagtgtagatggaatggcgcgcgcgtaaatatggcgttgcaatattgtttgcaaaataatttaccgggaagggattccttttcatatatttgaacatgtgctaatataatatctcagcggaagttgttccgttgagatattttaaatttctgggatggtgaatatatggcgcgtcaaaatgagcggaaaatgaaattatatatggaagcgggtctggcggtacttcttgttttaacgattgcactggcatcagtatcagggcggctctcttcgcaggcacatgagaaggacaagaataagcaggaagcggctgtacaaggagaagcggaagtttacgaaaaaaacaaaggaaatgatcaagagaaaaatgaagtgaaagaccaaagggaaaacaacgctcaaaatacagcgggaaatgctgaagaatcacaggaaacgatcgctgacggacagtatccgattatgggaaacagccgcgtaacagttgatgagatggtagattattttcagacggcaggaaaaccttatccgaaagaagctctttccaaaggtggagcagagtctatagaagtgttttgcaggatgtattatgatgaagcggtggcagaaggcgttcgtccggaagttgcttttgtgcagacgatgaaagaaacgggatttttgcagtatggcggagatgcttctgtcgaacagtttaattttgcgggattaggtacaacaggcgggggtgtgcccgggaactcttatcctgatgtgcggaccgggatcagggcgcagattcaacatctgaaagcatatgccacagcagaccctttgaatgggaagtgtgtagatgatcggtatgagtatgtaaaaaaaggaacggctccatatgtggaatggctggggcagcaggaaaatcctgaagggcttggctgggcaacgggagataactacggatatgatatcgtccgaatgatccacgatatgaagaaatagaaatattgttagctaaaattgtgtaaaatacacaaaaaattgaagggaaacactgttgtttagcacgaaaaattcagtggttttgtcaagggcaatctcattgaaaaacaatatggcgaatagtataatttaaaataaggtgtaaaatggaaaatcgtagatggtttaatacggtttttcttttttgtaatggcgataagccaaagtctgagttcgccgagaacttggcgatcgcttacaatcccggaatatgccttttggcacttcggggggattgacatgagcctaaaaataaacggagggaaaaagtatgaaaaaaagaggaagggctttagcgcttctgcttgccgcggttttaacggtcagtagtgtgccgggaacagttatggcggcagatggcgtgaagccccaagacggaacaacgaaagaacagccattctggagtggaacgggaggaagtacaaggtttagaattccgtgtcttgtatctcttgatgacggcacattggtagccggctgcgatgccagatggaatacgagtttagacggtggtggactggatacgatcgtatcccgttcgacagacaaaggaaagacatggcactatacgtttgctaattaccttggtgataacgggaacacgcataataacaattctacagcgtttatcgatcctgccatggcaacggacggagaaaaggtgtacatgattgcagacctttttccggcaggatatgcgctgaatggcgcgagtcatgcaccggtcgcaggtaaaagtcatgatgagaacggaaatattcttctggcagacgcaaggaaatggcagaattgttgggtaaatgatcgtcagaatgaagctaactatacatatcatttggaaaagaatgataagaaagaatctgattctgcatatgtgattaaagatgcgaatgacgcaatcgtagaaggttatacagttgacgcttattttaatattaaagggaaagatgtagatgcgaatctgtttgaagctgattcgccgtttcaggtatggccgacagattatttgtacctgacaacatcggaagatgcaggagcaacgtggtctgtacctacgattgtcaatatgagaaaagatcatgagcagtctcttttagtaggaccgggacgaggtatggttacttctaaaggcaggatcttatttacggcatatgaatttacaggttcagataaaaatagcgtggctatttattcggatgatggcggtaagacgtgggaaagaggaaagtctgtatctggatggagttcagaagcagttgtaactgaggcagatggaaaattgtatatgtttactcgccatggcggatattatacatcggatgattttggagaaacatggtcaacgcaaaaaaatatggggattagttactggctgaattgtcagttgacagcaattacatatccgaagaaaattgatggtaaaacagcaatcttgtttgcaactccatcgtcttcatcgggacgtgcggcgggaaagattttcgtaggcttagtgcaggatgacggaacacttgactggaaatataactacagcattaacggatctgcatattacgcatactcttgtctgacaattcttcctgacggaacgatcggtcttctttatgagagtgacggaactgtgattacgtatgaagattttgatattgaagacgttgcaaaaggcgcagcaatcggaaatatctggtgcacagacgaaaacggtactgtggcagatgttacaatgacatctgatatatcgaaaaaactgacagtaaacggcttaaaagatggcgcaaaagtggaagtttcttctgacaatgaaaacgcagtaacagcagcatatgctgacggcgaagtgacattgacatctaaaacagtaacaggaatggaaaaagcgactgtaacagttgagtctgaaggtgaaaagacgacagtcgatgtaatcgtaacagatgaaaaagattatgagatcgtagatcttcgtgtaggagatacgaaaacatatacagacaagacaggaaattacagtgacagcacattagacggtcttgataaaaatattgcagatgtgacattggtaggagaggatgcacaggcagttgagaaacaggtaaaagcacagcttgcaactgcacaggcgaattttaatggagagaaagtctccttggataactgcatgtttacatttgagagtgtggcaaataaagaaaatacatataaaatttccgcacaggctggagataagaaagtatatgtgaaccataaaaaagcaccgtcacagtgtgtaagcacagagacagagacagaaattttattagagtcacatgaggatggaacggtatctttaaaagatatgacagaaggaacaggcggtgcatatctttatttctggaagggcgatacttctaagctgcactttgacagatacagcagtgatgtggcacagtgtcacatggaattatggaaagcggcgccaggtgcaaaaaatgatctgggaatgccggggtatgagaaagtgacagatatttctcaacttacaagcggtacgaaatatttaattacggcaaaggcggatgatggaacttattatgcggtaaatccatctgctgcaagcagtaattttaatcatgttgcaaaagtagttgaagaaaatatcccgataaaagaagaggcttcggtagcgcttggaactaatgcacagtttgataatggcggtgagaagaagatcagtaaatgcctgtttacgtttgataaacaggagggaacagaaaaccagtataagatcacagcagtaacagaggatgggaaaaaggtttatctcggaccaaaatcatcatcaggagctaacagaccacttgtcgagacagaggcggttattacggttgctaaaaatggagaagcatttacgttacagcaggcagaagacgcttcaaacagcaaatatttgtatttttggaaagatgatgcaagtaaattccatttcgatagaaatggttctgtagatagtaaaggcaaatgtgattttgaactttatcgaaaagatgacaatgtagttgatagtgagatcccaggatatacaaaaatcagtgaactctcagaaattgagaacggtggtcaatacttgatcgctatgaaggcaactgtagaaggcaataattactatttgttgaatccggcaacgggaaatgaaaaatatagctatgttgcgaaggtaacaggcaaaatgtatgaagatgagacaatcggtgctaagacagatatcacaattaccggaaaagcagaaggcaaaacatctgtgaagatcggtaacaagacatacttcatcttcgtgaaaaatgatgtggaagaagtaacaatcaagatcggcgagacatataacgtaccgggcaagattttaaatgaatccgaagtgacaaaagacggtatcgtaagtttggaaaaacgtgagaacatgccgccttacaaagcaatttcagaaatcacagaaggaacatatttattcggaaataatagtcatatcatgctgaatacggtaagtacagcagcaggttctgaaaaaggtcttggaatgaaagcggtcaactttaataatgatgagactgcgaaagactttatgtggacgcttaccaaatcaggcgaaggctatacgatgaaagatgccgcgtcaggcaaatacattaatatttctggaaataatgtggaactgaaggatgcagagcaggtattgacgatcagagcaagagcaaacggaggattctctgtttcggcaaataattattatctgaacaactgggcaggaaataataataaagttgcagcttatccgagtgatgataacggatggagcttctacaaagcatctgccggaaacgtagtaacaggtgtgaaagaaggaacagtaactgtagcggcatcagaaggaataaactataagatcacggtggtaaaagacgttcctgaagtaaaagagtacacagtaacggcaacagtaaatgatgaagcgatgggtacggcaaagcttagcccggaagttgataagtacaaagaaggaacagaagtaacggcaactgcgaaagtaaaagacgaaagcaaatatgagttcgtaaactggacagtaggcgatgaagaagtttctaagaaggcagagtacaagtttacagttgacaaagacatggagcttaaagcgaacttcaaagcaaaagaagagccgcagccgcctgtagaaaagacatacacagtaacggcaacagtaaacgatgaagcgatgggtacggcaaagcttagtccggaagctgataagtacaaagaaggaacagaagtaacggcaactgcgaaagtaaaagacgaaagcaagtatgagttcgtaaactggacagtaggcaatgaagaagtttctaagaaagcagagtacaagtttacagttgacaaagacatggagcttaaggcgaacttcaaagcaaaagatcctgtagaagaaacatttacagtaaaagtaaaagcaaatgacgacaagatgggaactgtagcggtcgatccggtgaaagaaaactatgcaaaaggcgatacagtaatcgtgatcgcagaagcaaaagaaggatatgagtttgtaaactggacatcggaaggtaaagtattctccgattctgcagcgtacgagtttgctgtagaaaaggatatggaactgacagcgaacttcaaagcgaaagaagagccgaaaccgccggtaacagaagatacattcaagctgaacgtaactgtaaacgacgacaagatgggaacagtaaaacttgatcctgcaaaagaaagctataaagcaggagatgtcgtaacggcaactgcaacggcaaaagacggatacaagttcgtgaactggacagtagacggtaaggaagtttccgataaagcagagtatgcatttaaagtggacagagatgtaacattgaaagcaaactttgaaaaagtagcggcagatccgaaacctgaaactccaaaaccggaggatccgaaagatgaggataaagcaattcagacaggagacaacggcgtatcaccgatcattccgcttgcaggattagcattagcggcaggagcggcagttacagttcttcggaaaaaagaagactaatcgccggatattcaaactgatgagaataatttgaaatcagaatgaaaaaataaagatttaaaacagtgagacggcgctgatctattttacggatcagcgtcgtttttacatattaggctttagcctgtctcaaataagtgcgtggtgtgcagttatttgagactaaaatccacctgctatgcgggcaatgtcatcaacttaagatatatcaaaaatataaaataaaaatgtctaaaagcacttgataaaatgcgaaaaaaatgttgccttgcgttgattactttttcaatgcgag

SEQ ID NO: 7625 - DNA, 24265 bp, Unknown
  gut microbiota DNA sequence
ttaataattttattttatatattttttatgatattgtatttccggaaacaggaataacaacacatcattttgcaaaggagattttattatgaactttttaaaaaagaacggcgccggtcttctgctatgtctcgccatctccattccggcatggtttctcggaaaatcatttcccgtcataggaggacctgtctttgccattctaatcggcatggttttgacactgatattaaaagaaaaagaaccgtttaccgcaggaattaactatacctccaaaaaaatactgcaggccgctgttatttttcttggattcggaatgaatttatctcaaatacttgcaggcggaaagcagtctttgccgatcataatttccacgatcacaacatcgcttatcattgcatttattttatataaagctctgaaactaaagacaaacaatgcaattttagtcggcgtgggatcgtccatatgcggaggaagcgcgatcgccgcaaccgcgcctgtcatcgacgcgacggacgaagaggttgctcagtcgatctctgttatctttttattcaacgtgctggccgcactgatctttcctacgttgggcgctgtcctcggactaagcaatgaaggtttcggattatttgccggaactgccattaacgacacatcatccgtaaccgcggctgccgccgcctgggacggaatccacgcaagtcatactctggaaactgcaacgatcgtaaaaatgacccgtacgcttgctattatcccgatcacattagccctagctttttatcgggaaaaaaaggagaaaaaagaagaaggctcttcttttagcttcaagaagtccttcccgttctttgtgctttttttcatccttgcatctgtcgtaacaacaatattccaccttcctgccgcagtcacaggtcctcttaaggaactgagcaaatttttgatcgtcatggctatggcggcgatcgggctgaatacaaatatcgttcaccttgtaaaaacaggcgcgaaaccaatcttcacaggtttttgctgctgggtcggcatatcgcttgtaagtcttggaatgcagcatatgatgggactttggtaaagaatttaattgtccgttttccccaaaaatggtatactgtctataaatatctgagaaccgaaaccacatcgtttttaacaggaaaactgccggagatgatcaggcaaaatataatgaggcagaaacatgaaattaaaaaacattttacttgttgtaaaagatatcgaaaaatcaaaacaattttatcatgatttatttggtttagacatgatacttgacaatgacggaaatatcattttaacggaaggtcttgtccttcaagatgaaaagatatggagagactttttgaaaaaagagatctttccgaaaagcaattcttgcgaactgtattttgaagagaaaaatatagaaaaatttatcgaaaagctggaaaaattatacccgtcaatccaatatgtcaatcggctcatgacacatagctggggacaaaaggtaatccgtttttatgatttggacggtaatttgatcgaagtaggaactcctgtctaacagcacagagtcttttttcagaaaagatgatataccgttttcaaaaaacagtctgtaacgcatgaaaaaatcctactctcaaattttgtcgtagtagaaaggagctgtcatatgaaaaaatttatgaaagaaataacattatttataattcaattattgattttttatctgtttcctttatttgcaaaacagattgacgcaataggcatggttctcttccttatcactgcgacatttgtattatctgctctaatgggaatcatctcaactaacaagatcaaatatttctatccgcttataacagcaatactttttattccttccgtgttcatttattataacgaaagcgctcttattcattctgtctggtattttgtcgtttccgttgtcggaacagcgatcggaacggtcataaccaaattatttgcaaaataatcatgaaaccacagcatgatagatgcaaatagggagacacattaataaaaaatatctgcttctattcacctgaataagctatgaaaaaaggatatattctttttccatagcttattcttttcgtttaacggattttgcatctatcactgccggatttgactcatatattataccgtcatatttaacaataacttgatcccccacaagaaagtcatcgtttctgttttccttgcctttttcaaaccttatcacaaaatatttcccgtgagaatccacaaaatctttttctgtagcttctattttaagctgattcttattttcgattactacacctgtcatcgaatgcctgttaaaacatacattccacaataaaatactcaaaaaagcaaaaatcacaaccgccaaaaatatttttattcttttaaaagaatgactgtctgtcatgcgatacaccttcctctcttttcgcaaataacaaaaatgggagacgcacttttttcatattcaactgtctgctcaacagaaaaatatcttttttgtgcaatctcccattttatttactgtatttaaaatcgtctgttttataaatttccgagcaatttatctatacttacaagtttcacactcagtacaaaaatttccgccgcaacggacaattcttccggagtcggataagacggcgcaatacggatattactgtcatgaggatcttttccatacgggaatgtcgcccctgctccggtcattacaagacctgcctctttcgcctttgcaacgatcgcctttgcgcagccttccattgcatcaaaagagataaagtatccgccgtgaggcgcgatccatgatccgatttccagtcctcccaattctctttccagaacatccagaaccgcctcaaacttcggccggagaatatcggcatgtttcttcatatgctctacgattccgtgaatatttttgaaaaatctcacatgacgcaactgatttactttatcatgtccgatcgtctgaactttcatcatattacgaacgtcttttaagtttgcttccgacgccgccaaagccgcgatgcctgatcccgggaagctgatcttggaagttgaagagaacttataaaccatatcaggatttcccgcttttttacattccatcaaaatctcaagaagatagtcctgcttatcttcatacagatgatgtacgcaatatgcattatcccaaaaaatacggaaatcttttgcagccggtttcagattagcaaaacgatataccgtatcatcagaatatgtgattccctgcggattagaatacttcggcacacaccagattcctttgaccgactcatcttcactgacaagtttttccacaagatccatatccggacctgtaggagtcatcggtatattgaccatctcaattccgaaaaattccgtaatcgcaaaatgtctgtcataccccggaaccggacataaaaatttcactttatctaatttacaccacggtgtattgcccataattccatgagtcatggcacgggaaaccgtatcatacattacattcagacttgagtttccgaagatgatcacattatctttcggcacttccatcatatctgcgagaagctgttttgcctcatcaataccgtcaaggtttccgtaatttcggcagtctactccgtcttcgcaaatgagattcgcatcccctgcaagcactttcatcatatccattgataagttcaactgatctgcagccggctttcctctggacatatccagctttaatcccttttcttttacttcttcaaagcgcgcttctaattcgctttttaattccaacagctcttctttacttaaatctttatacgcagtcattacaggactcctccgttttattttttcatcactgtatcgtattgtatacattttttgatatttcgtcaatgctttccgtcatttttttaattacgaaaacactttttggaggaattttataataattttgaaattttgaaaggcttttcattcatggtttgatcttttcatatcatttttctttctacaaacatcagaaagcggctatgggatttcacagaaaacattttgagaatttagatttttttctaaatagatattgactttttatttccgcagtgctctaatatatttagaaatatttctaaatactatttaaagtaagggggaatgtttttgagctttgccgaaacgtttaaagcattatccgatccggtaagacgggaaattctggaacttctgaaaaagggcagaatgtctgccggagagatcgcaagtcattttgatatgacgcaggcgactgtctcctatcatctgaagattttgaaaaaagcagatcttatcagggaaacacgggagaaaaattttattttctatgagctgagccttaccgtattagaggagattatggtatggatctcagacttgaaaggagaaaaagagacatgaaaaaatataaaaccacaatcattattacaactttgatcacattacttcctattgtgatcggactatttctttggaacaaacttcccgatacactggcaacacattggggaagcgacggaaccgcaaacggatggtccagcaaaacattttctgtcttcggaatgccgctcatcctgactgcgatccacgttttgtgcctttttgtcactttgaatgacccgaagaaaaagaatatccacaagaagcctatggcgcttattttctggctcgttcctgtgatttctcttttggctaactgttcgacttatctgatcgctttaggagtagatttcagcattgaaatcttcatatccgctctgatcggtgtctttttcatcgttctcggaaactatatgccgaaacttcaacaaaactatacgataggcatcaaacttccgtggacattaaacagcgaggaaaactggaatcgaacccatcggctcggaggcaaactttatattgttatgggaattgccatgattttaatgtcgtttatagacagcttactcggaagcgaagccgccgcatggatcatcctgtccgtgatcactataggcgctataattcctgccgcttattctttctatttgtataaaaaaggcatttaaatgaatcttctattataaaaataacgtctgtcagaatttttgatcctgacggacgttatttttgtcctcttatactcgttttcttatgctcgttttcttatattcgttttcttatattcgttttcttatattcgttttcttattctcttttcttatgtttgcttttcatctactttacaattccgaccatatccgcaacactttcaaatccatgttgtttcatatatgattcaatcccgtctacgatcttcattgtcactgcaggatcaaaaaagtttgctgttcctaccgatacggcgcttgcccccgcaagaatcatttcgatcgcatcttccgcagatgcaattccgcccattccgattacgggaacactgacgacatttgccgcctcatataccatgcgcacagcaatcggatgaatcgccggtcctgacactccgcctgttttgtttgccaaaacaaacgcttttttattcacatcaatcttcatccccgttaaagtattgatcaaagatacggcgtctgcgccgcctgcttccaccgctttcgccatctcggaaatacttgtaacattcggacttaatttcatgatgatcggctgttttgcatatttttttactgcctttgtaatctcttccgcagcgttcggattctgaccgaaggcaatcccgccttctttcacattcggacaggaaatattaatctccagcatatcgacgtcttcattcgccagacgttctacgacttcacaataatcttctgtggatcttccacatacatttacaatgatcttcgtgtcgtattttctcaaaaacggaatatccctctcgcaaaacacatcgattcccgggttctgcaagccgactgcgttcatcattcctccgtaagtttccgctactctcggcgtcggatttcctgtccacggaacattagcaacgccctttgtcgtcacagctccgagtcggttcagatcgacaaaatcagtaaactctgctcctgatccgaacgtgccggaagcaactgtaaccgggttattccattccactcctgcgatcgtcacttttgtattcatcagatttccacctccgttgacaaaaataccggaccgtctttacagattcttttgttatgcacattactgtgatgatctttttctttcgtcttgcatacacatgcaagacatgctccgataccgcatgccatgcgctcttccagcgaaatatagcattcgatcccgttttcctccgcatagtttttgatcgcgcggagcatcggtgtcggtccacacgcatagataatatctgcttccaatccgttttcacggatcgcatccattacattgcctttcgttcccgcacttccgtcctctgtagaaatatatacttccccgttttgttcaaactctgttttcaaaaacgtctcgtcatttcggtatccgacaatgatttgctttttctcacagccgatctgttttgccagttccagaatcggaggcactccgatccctccccctatgagaaacgcccgtttttctaatgctttctccagcgggaatccatttcccaacggtccgatcacaggaatcgtatcgccttctcccatctgtgaaaaaagctctgttcctgtattttctcctgtaacacggtatacaacgcgcagtgcgcctttctctttgtctatctcgcaaatactgatcgggcgcggaagaagtttgcttccgtcgtttgtatacatcgagataaactgccccggctctgccgtttccgccgctttcgttctgatccacatactgtatatgccatgcgcgatttcttcctgtgaaatgatcgccgcattttctttttctttcgtcatatgtgtcatatgctcctttatttcaaattctctattacaaattatcaactgctttttccgtcagatcgtctttgtccctgccggatacttattttgcagattcaagcgctccgctgatgtccgcgatcatatcttctacagccgctctggaagcgtctccgaaattctctgctccgaactttgcatatgcttcctgcttatatgccgcaataattcctctcgacgagttcacgatcgctccaagtccgtcctcattaaagaaatgaacaagatcttttccgcggccgccctgcgcgccgtaccccggaacgagaatatatgatttcggcatgatctttctgaggacttttcccatctccgggtatgtcgctccgacaacggcgccgatataactgtattcatctcccatacactctgcgccccactgcgcaactttttcgcctacatgttcatacagcggacgtccgtcaatgatgcggtcttggaattctccgctggacggattcgatgttttcacaagaataaataacccttttttctgctccttgcatacgtccgcaaacggattcactccgtcagatccaagatacggattcactgttgcaaaatcttcgtcaaacggaacatactcttttgatccgacttttacctttccgagatgtcctaccgcatatgcggctgacgtagaaccgatatctcctcttttaatatctccgatcacaacaagatcttttgatttacagtaatctactgttttcttaaatgcggcgattcccggaacaccgaactgctcgtacatagcaatctgaggcttcacagccggtatcagatcatatgtcttatctacgatttctttattaaactgccagattgcctctgcagccccttccaaagtttccccatactctgcaaacgctttttcctgaacatgctgaggaatatagctaagcatcggatcaagacctactacgatcggcgcttttgtctttttaatcttttctactaatttgttaatcatacaagtaccctccgttttcctgaaaatctgccttgcttttgtgtaaagcagatgcctcacacattttcagaacttttttatcttttatattttatcacaatatccgactgacttctataccaaaatcttgcctgcctcatccctgaaatgccaaaaggaagattccgagattgcaaatgatcgccaagattcctggcagatccggactttatcctgtcgccgccgtaaaaatataagcggacactctcggaaattccttaagtatccgcttatatatttttaatcatttctcatttatctttcgttcttccgctttatccggcttacataatagcttttttcgcctcttgttttccggccttcctgtgagccgcaaatttaaaacagttcaaacaggccgcccggcacgagcagattaaacggatataccggaatatttcttacgattccgaacaaaagcacgaaaatcaatattcctgcgacaaattttacactgatcttctgatcgatatgatctccgcccgtaatcgcccaatcgattgctcttgccgccacataaagcgctaatagcgggagcaataccgtcataaccggattatagcaaaacgcatccaaaaaccgtccatgcaaaagagaataactggcgcgtcccgcgccgcatcccggacagtaaaaccctgtcaaagaataaaaaacacacggcagcggatagctgtgcggattatgaaaatacaagtaaaccgctcccgccagcgccgctatagcggctcctgctacgatcaagatccgcaaacttttctttttacgcaataattctaacatgtatttcctctgctatagcatcttagtaataatagtatccgcctacgccgccgataaaagcaaagatgatatagatgacttctacaataagacctacgactgcagatgcaatgatccagatcttcgcggattttgccgcatttttcgcttcctcataattgcctgccgccatagatgaattgatctttgccgcatatacgatacctacgataccgaacggaagacaacagcacaacgtacaaataatagataatacaaggtacggtacccagttgatcggcgtctgcggcgcctgattctgataaggcatctggttctggtaagatgtctgaccttgatttcctccatactgctgatctgacgtctgatcagaataagtctgacctgttccgtaataaggattgttctgtgcggatgtatatgtctcctgtgccggagcttcctgatatacgtgatccgttgaagcagcttccggctgaatcggttctgtcggagcttcttctgtctgggtcggctgtaccggctctgtcaaagcttcttctgtctgtgccgcctgtaccggctctgtcggaacttcttctgtctgcgccgcctgtaccggctctgtcggaacttcttctgtctgcgccgcctgtaccggctccgtcactgtttcttctgctcgaaccgggtctgtcgctgacgtatcagactgctgcgctccgcaatacggacaaaactttgcgccgtcaggaatttcttgataacacttaatacaattcattttcctacctcgctctcatagtatttgtatattatttcatttcaataataataccactgtcagagcaaaaaagtcaccaaaaaaatacatttttttgctttttttacattttcatatactcttggctgtcaccgcttcttcccttttctgccgaatgatccctgttttcagaagaaccgggcgaagcgcgttatacaaaacgcctgcgaggatcaccgaaatcactgcatttacaaaagttgtagccgcactccactttgcaagaacttccgccatctgctgcggctgccccataatatactgtttgtagaagtatcctacaatcggatcggcaatgacgttaaatccaagccctgcgacagatgcgatcatgctccagcggaaaatgtatttcttatctgtactttcattgatcttcgcaattctatgagccacaagaccgacgataagtccgatacataatttcagtacaaacgtcttcggcgctcctgtaatatagaccggatcgagaatatctgcgaatcccattccgatagctcccgcaagtccgccgtaccatccgcccaagatcagagccgccagtacgcaaaatgcatttcctacatgaaaagacgttgcgtcgcccccgggaagaacaattttaaactgcaaaaattgaaatgatacaaaacaaagcgcagccataagagctgtctgggcaatcttaactacagtttcattttttttcgtcatatacttacctgctttcctgaactgttacttttttgttcaacattatttaatacaggtatattagcatcagactggtcgtattgaaacatccagttatcccatttttatacagtccactttttcttatgagaaccaagtcggactcgctccatctcttcggcaatatccttttcaagataatcaaacaagtaattccggatcagctcctcctgtttcggataatcgtctttcatctgttcaataaccgattcgatctcctctttcagtcctgccgccgacatccgatgcgctccctgccccataatgatcacctgttcaagcgcatccgatgttgccacgataacatcttgctcctttgcgattcttcgcacagtcttctctatataatgatccgcggtttccgcctccctcgtgtaaacgacatgaatattatgatatttcatgatctctcccggatttccttctactttatacgcgtcaaatacgaggatcagttcacattgtttgtatccctgataattacacaaaatatccgcaagcttccctcttgcggcggccagatcgattttcgccaattctttcagtgaatcccacgcaaaaataatattatacccatctacaagcaaatattctttccggtctgctttcttttttttcgtttttgtataatcaccggaaatgtcaaaaggtacatttcgggattgtaagcggtcgccgttgcaaaaagctgccgcctttcctgccgtcacagtaacaggcgcgctccttttcgttttcttcaccggatcgggcgttctgacatagattgcatccagctcttcctgtgtcagctcgatcgttcttctctgtggacgaaatgctgcagacatctgtgtatcttcttccgatttttctgccgcctcgccttctacatgcatatgggcgtccgcctcataccacggaacgatcgttcccgccccatgagagcaaaataccgaatctgcagtattttctacatctgcatccgcatcgtatccgatctgcccgatcacttcttctgtattatgacattcgccgtatcctttcaaagaacaaaacaatcttccgtaaccgcctgtgtacgccgtaaattctttttgatatccattcatctcggcggcaggaacacttcctttaagcaccgccatcccattttccgtctcaggtccttcaaactctccgctcatccgttttatatccgtcattgcttttccgacattttccaacggcagttccatacgaaattcgtagtacggttcaagaagaacactttccgccttccgaagtccctgacgtaccgcacgatatgtcgcctgcctgaaatcaccgccttctgtatgctttttatgcgcctttcccgacagaagcgtaattcggacatctgtaagagcagaacctgtcagtactcctttatgttcccgctcttccaaatgcgtaagtatcagcctctggtaattacgatccaaaacatcctccgaacaatctgccgcaaactgcatccccgatccgcgctctcccggctctaatctcaaatgcacttccgcataatgtcgaagaggttcaaaatgacctgccccttccacactgtttttgatcgtctccttgtatacaatgcgtccttctccgaaatgaatgagaactccgaaccggtctttcaccatcttctgcagaacttccgtctgcacttctcccataagacggatgtggatctctgatgtttcctcgtttctgatcacatgaagctgcggatcttcttcttcaagacatcgcagattctgaaacattttatgagcgtcacacccgtccggaagttcgatccgatatgtcatgacaggttctaatacaggaagcaaagattctttctgcgcgccgatcccctgtcccggataagttccttcaagtcctgtcaccgcacatacttcccctgcggaaactgtttgaacgagttcgtatttttctcccgaatactttcggatctgattgaccttccctgtacatgattgttctgccgcaaaaggaacatctttgacgcgcagctgtcctcctgtgactttcagataagtcagcctgtttccctgaggatcacgggcgatcttatagacttttgccccaaattcaggcaaaggctctgccgacggcgcatattcacataatcccgacatcagcgcttcgattccttgcgctttcaaagcagaaccaaaccaacacggaaatactttccttgcggcaaccgcctttttcacagtctccttttcgatcttcccgcctgataaatattcctcaagcattgtctcatcacacatcgcaagactttctctgttctcctccgactgcatgtccatctccacacagccgtctccgaatcggttttttaattcttccagcagtttttctctgtctgcttcctgacgatccattttattcacaaaaatcattgtcggaatcttgtactgtttcagcagcctccaaagcgtgaccgtatgtgcctgtaccccgtccacagcgctgacaacaagtacggcgcagtcaagcacctgcagcactcgttccatctctgctgaaaaatccacatgcccgggagtgtcaagaatcgtaatactcgtatcattccatataaattccgcctgttttgaaaaaatcgtgagcccgcgttctcgttctgtttcataactatcaagaaatgtatccccatgatcgacgcgccccatattccgaatctgtccgcttaaataaagcattccttccgacaatgttgtcttgcccgcgtccacatgggcaacaagaccgatacatatatgttttaatggtttttttaccgaatttttgtctttcttttcggatgtattttccatgaaaatacccctttcctgtgatttttatacagaaattatcatatcacagaaaggggtataagtcgaatgtaaaacgttttctacttttccactctatttttctacagtctttcgctgctttcattcataaatttgtattctgccacggaacggtcaaaacctttaatatgtctgtacagccactcgataacatttttattcacctgctctacaaatgcctctgacggtccttcttcctcttcaagcatattgtaaagatcttttactacggcacgcagtttgtcatgttcttttttatgttccgctattgccggataattgatcgattcctgaagtttttcttcctccccgaaatgaaactctgtatagtctgcaagataatcaagcgttttcactgccactactttttctttgctcgtctcacaactatcaagaagcttattgatcttgtcaatcagttctttgtgctgtgtatcgatcatttcatttcccgttaccaaactttcatcaaattctgctctcatcgtttcattctcctttttcttttttcactgccgttctttcgtttttaaactgcaggatcatttcatttgtaagactatcccgtgatggctctacaggaatgtcttccctttcaaaccattctgccaccgccagttcctctctgtcaagtgtgattgcatcattcccgtcaagatcgcaataaaatcccataagaagcgtatcgctgaacgcccacggctgacttttataataccggatgtttttcactttcagcccgacttcttccatcacttcccgcgccacagtctgttcgacagtctccccgatctccgaaaatcctgctaaaagcgcatattttttatatgtacgtcctgcatatttggacatcaaaatccggttgtgatccgtcacgccgacaataacggccgggcatatcttcggaaattccgtatttccgcacgcttcacagacaagcatccgctccttctccccgtgcttcagccgttttccgcaccgtccgcaatatttccggtctttataccaattataaagctgatatcccgtaattccggcaaatgcccggtcttgcggatctgccgttctgaaaatctctgtatttttcatttggaagtctaaaagcatcgatctgtcaatttcatttacgagataataacgctcatcatctactgaaaataaatatatacactctttgtaaatctccctgttcaaatgttccaaatccgcaaaactcggaaaactgattcccttttcagacactttcatcagcgccgcgtgatcttcataatacaatgcaatactgtctttatcaggcggaaccggtttgtactgattatctaagtgatgcggttcaatgtcttgtatcatagcagttcctttcccatacgccgcagtttttctttccttttgcagcgacgctataagtttctgatcttaaattctctctgtgcttcccgtttttgatcttttttagcaatatcgtcccgcttatcatacagtttctttccttttgccactccgatctccattttcacaagactccccttaaaatacacctgcagcggaacaagagtaattccctgttctttcatctttccgaacatcttgtctatctcttttttatggagaaggagctttctcaccctgagcggatctttattaaatatgttccctttctcatacggagagatgtgcatcccgtaaatatacatttctcctgactccaccctgataaaagcttcttttatactgcattttcccattctcagagattttacctctgtaccgtgcagaacaattcctgcttcatatttttcaagaataaaatagtcatgatacgctttcttattattggcgatcatcctgacttctgactttgccataatccactcttctcctgccctaaaatctatcatgtccaaatactttcacatacccgaacacctctttgtacgaatgctttacatacgcaaatatctctttcttacagaatcctgaaattcactgtcctttgaagtttatccgcatctgtgacgcaaattctcaccttctgtcccggcttataagtcttgcctgtatgttctccgaccagttcatagctttgttcataaaactcataatgatcatcccacatatccgccacatgtgcaagtccttccaccgtattttccaattctacataagcgccccactttgtcactcccgaaatcactccgtcaaactcttccccgatatgatctctcatatactcagcctttttcagcttcacaacttcccgctcggcttcttcggctcttctctccctttcactgcactgtgccgcaacctgctgcaaaagttcagaataatgctccgcccggttctcatcaaatcttcctcttaagttttctttgatgatacgatggatctgaagatcgggataccttcggatgggcgatgtgaaatgagtataatattttgccgcaagtccgaaatgtccggtattctccgtcgtatacctcgcctgtttcatcgacctgagcgtaagtctgctgatcagatcttcctccggttttccctctactttctcaagcagtttctggatctctttcggccggatctcatttccgacatggatatgatagccgaagctgttgacaaatgccgaaagctgtctgatccggtcctcatccggcgcttcatgcgtccggtaaagaaacggaatctccctccagaaaaactcttccgccactgtctcatttgccataagcataaaatcttcgataatctctgtcgccggatttctgtcatacggctttacttcgatcggttttccatcttcatccaaaacaatcttcgtctccggaaagtcaaaatcgatagcgccccgttttccccgtttctgtctgatcaactccgataattctttcatcatccatatcatcggaacgaatccttcatactcacgaagcgcctgctcatcctgctctaatacagcggaaactttgttgtaactcatcctcttgtcaacacagatcaccgactctgtaatctcatgggaaatcatctcccctttcggcgagatcgtcatgatacaggacaaagcaagacgctcttcccccgcattgagcgaacagaccccgtttgacaaaatgtgcggaagcatcggaataaccctgtcagccaaatagacgcttgttccgcgttccaacgcttctctgtcgagggcgcttttttcctgaacataattcgttacatccgctatgtgtacgccgagcacataattttctccgtcccgctctaccgatacggcatcatccagatcttttgcatcttcactgtcgatcgtcaccattttcacattcgtaaggtcttttctcccggcacgatccgcctcacttacaggcttcccgactctgaccgcctgattcaaaactttctcgggaaactctgtcttaatgccaagatccattacgattgacaaaatatccgtgcccggatcgttcacatgtccgatgatctgcgtaacttttccttccggtttcatatgttccccgccgtaagacgtcatttccacaacaactttatgacctgtcacagcgcccatctcacgccctgacggaatataaatatcgtttacataccgacagttatccggcctgacaaacccgaaacttttacatttttcatacaatccgacaatatgcgttactccgtgcgaaataattccgacgatctttccctcccgccgctttcctgccggagctgacgttataatatactctacttcatcgccttggaatgcattcccaagacactcttccggaataaagatgtcatctgttccatcttccggcgtaacaaaaccgaaacctcttgcatttgcctgaaatattcctttcagacgctcggtatgaccgcatgtatattttcccctttttgaaatcgtgatcttcccttcttccacaagagcatcgagaacttcccgcagttcctgtctctgttctcccggaatttgaagtacgacggcaatctctttgatcttcataggtacgtacagatcatcgttgataaaatcaaaaagtacctttttgcgtttttcaaattgacggctttcctcttttgattttgaaggattttttctgtcattcactttgacgcgatcatcatgtattcttctttttttctctctgttaccgtgtgttttccgcattttaccctccgcactaaaataatcgccgaaagtaccaaaaggcacattcccgattgtaaacagccgccagattctcagacgtctccgagctccggctcttcgccgttacaaagcaaaagcaccctatattcgtatagagtgctcataatcattattatcttctgctgtctttttatactatccttttagttaaagatattgagattcagtacaactgccaatacaataaacagaaccgcaataactcttgtagcctttacaagcgcgccttccatcgaacgtcctttattatgtccccaatatgtatctgcagctccgctgatcgttccaagacctgcggatttaccctcctgtaaaagaataatacaagctaatgcgatgcaatctataacaaaaataatcgtcaatactgtttttaaaatatccatttcttctacctcctgaaataaaccaaaattattctatcacaattacagcttatttgcaagacatttcatccattgttttctcaaaccttgttttctcaaatattcattcattgtgtcacaaaatatattatgttacaatcatcttaaaattataattttttcagatgtaacagaggtgtttcgatggattatgcgattatattgatgatttttaattttatcaagagtatttccgagttcttagcaagtattctgataattatttgtgcggttaagtatctgaaaaaacattgactgatgaaaatcaacaggacagcggctttttctgccgctgtcctgtcatttaaaaacgatcttttaactgcctttcaatcgtcttttatcttgtgtatattttactcttctgctttgtacacatctacaagttttttcagataagcatatctttccatagcttcctgctcattgattgcgaacagtttttctgctttttccggatttgctctcttaagtgcattgtaacgtacttctccgtcgaggaatgcctgataatcttctttcttcggctctttactgtcgaggaagaatttatctccttctgctcccggattgaagcggaagttattccagtatccacattctaccgcaagctgctcctctgtctgagctttgctcatacctttcttgattccgtggttgatacacggtgcataagcgataataagtgacggtcccggataagcctctgcctctgtaatcgctttcactgtctggttgaagtcagctcccatagcaatctgcgctacatatacatagccgtagctcattgccattcccgcaaggtctttcttcttcgtctctttaccgcctgctgcgaactgtgctgtagctcctgtctttgttgcttttgatgactgtccgcctgtattggagtaaacctctgtatcaaataccatgatgttgatatctttaccgcttgcaagaacatggtcaacaccgccgtatccgatatcgtaagcccatccgtctcctccgaatacccactgggatttcttagcgaggaaatctttatttttcagaagttccgctttctctgcgcggtcgcatccgcaagcttcaagagccgccacaagtttatctgtagctgttccgtttgtcgctccgcatgtatatgtgtcaaggtattcctgtgcagcagccttaacatcttcattttccgcatctgcggcaagtttctctacaagacctttcagtctgtttctgatcgtattctgtgcaagaagcataccatatccgaactcagcgttgtcttcaaacaatgagttgctccatgccggtccttttccttccggtgttaccgtatatggtgtggacggagaagagttgccccagatagaagaacatcctgtagcattcgcaatatacattctttctccgaaaagctgtgtgatcagttttgcgtacggtgtctctccacatcccgcacaagctcccgagaactcaagaagcggctgtttgaactggcttccttttactgtcgtctctttgtatttagcgacaacttccggtttcaccggaatctctcttccgtaatcgaagaatgtctgtttgcctgcattctcttccatgttgcccataacaagagctttctcacccttcttgcccgggcagacatttgcacaagatccacatcctgtacagtcataagcggatactgtgatagcgaacttcatatccggcataccgatcatcggaatagactgcattccttccggagcattagcagcttcttcttctgtcagagctaccggacggataacagcatgaggacatacatatgcacagcggttacactggatacagttgtccggctgccagatcggaatgtctaccgcgataccacgtttctcgtatgcggaagatcctgacggagttgatccgtctgcataatctgtaaatgcagataccgggagggaatttccttcctgagcatttacttttgtctgaatatttttaacgaaatcgattacatcttttcttccgttctcgtcaatgtgcggtactgcaaggccttcgtctgccgcatctttccagctttccggaacttcgatctctacgacctgttttgctcctgcatcgatcgcatcatagttcatctgaacgatcttatcgccttttctgccgtatgtagctttcgctgcggctttcatcaggctgatcgcttcctcttccggaatgatctccgcaagtttaaagaacgcagactggagcactgtattgatacgtccgccaagtccgatctctttaccgatcttaattccgtcgatcgtatagaacttaatgttatggtttgcgatataagcttttacctgtcccggaagatgtttctcaagaccttccatatcccacggacagttcaaaaggaatgttccgccgtcaacaagctcctgtaccatgttatacttgtccacataagacgggttatgacatgctacaaagtttgcctgatggatcaggtatgtcgatttgatcggtgattttccgaaacgcaggtgagacattgtaacaccgcctgatttcttagaatcatagtcaaaatatgcctgagcatacatatctgtattatcaccgatgatcttgatagagtttttgtttgctccgactgtaccgtcagctccgagaccccagaacttacagttgatcgttccttccggtgttgtaacgagcggctcgtctgctttcagggaaagatttgtcacatcgtcaacgataccgagagtgaattttgctttttcatcgttatgatatactgcaacgatctgcgccggtgtcgtatctttagaaccgagtccgtagcgtcctgtgtaaatcggaactgcgtcgaacttagatcctttcaacgccgcaacaacatccaggtaaagcggctcaccgagagctcccggctcttttgttctgtcaagaacggaaatcttcttaacagaatccggaatcgcatcgatcaacgcctctgcgctgaacggtctgtaaagacgaacttttacaacgccgactttttctcctgccgctgtcaggtaatcgatcgtttcttcaatcgtatcacatacggaacccattgcaacgatcacatgttccgcatcttctgctccgtagtaattgaacagtttgtagttcgttccgagcttttcgtttactttgtccatatagttctgaacgattcccggaagggcgtcataatacgggttgcacgcttctcttgcctggaagaagatgtcaggattctgagcggaacctctaaggcacggatgattcggattcaatgcatgagcacggaactcatcgatcgcatccatgttcaccatatctttcagatcttcataatcccatgtctcaatcttctgaatctcatgagatgtacggaatccgtcaaagaagttaataaacggaagttttccttcaagcgctgcgcaatgagcaaccggtgtcaggtccataacttcctgtacgcttgattcacaaagcatagccgctcctgtctgacgacatgcataaacgtcggaatgatctccgaagatagacaaagcatgacttgcaagcgcacgggcagatacgttaaatacgcccggaagctgctcgcctgccactttatataaattcggaatcatcaaaagtaatccctgagatgccgtaaatgtcgttgtcagagctcctgctgccaaagatccgtgaacagctcctgccgctcctgcctctgactgcatctctgtaacttctacagtcgttccgaagatgttctctctgccttctgtcgcccattcgtcaacgtgctccggcataacggatgacggtgtgatcgggtagattgccgcgacttctgtatacgcatacgatacgtgagcggctgcctgattgccatccatagtcttcatttttcttgccatttttttgctcctccttaagttttacattgaataaaataaatttctcacatgtgtcctcattatatctccaaacttgtcaaaagtctatagagggcagtttgttttttgtttatttttagcaacagttcagccatacagatgtacgggaagcacaaaacatgcctgcatgtttttgcaagcggacatctgtatgtgctaagcgcccggttatgagtaaaacagtggcatcagccacaataagcacgcagtgcggttttacgaatggcgcgagctgaactgtttctatttttaagcacatgtgacatgaactgccttaactgttcttatgtttttttcgcagataaagcattgctgcccccgtgccgactacgatcgcacctgcaagaagctgggagacggcaatcccgaccccgggaagaagaagctggtctgttcgtaatccttcgatccagaatcttcccagtccgtatccgaacagatacatcaaaaacagctcgccctcatactttttatgcttacgataagcaaataggataatgagcagtaccatacaccaaagcgattcatacaaaaaagtcggatgcacctgaatataactgactccgtctatcctctctatatgccggcgcatctgctccgtcacatcggaagagcgcactgcatctaatggcaggcgcatcgcaaacagactgtccgtatatcccccaaacgcttccctgttaaaaaagtttccccatcttccaagcatctgcccgtttaataacgccatagcgatcgtatcgaaaatctgaggagcagataaatgctttactttcgcaagcaccagaacgctgatcacagctgcgatcacccctccgtaaatcgcaagtccgccttctctcagattaaaaatatcgagcaaattatctttatacatatcccacgaaaagattacataataaagtcttgccccgacaattcccgcaatgacgccgataatccccatatcaagataattttccggattctgacctgtccgtttcgcttcacgggcagcaatccaaaaaccaagcaaaattgccgttccgataatgattccgtaatacgctatctctattccgaataaatcgatgctctttccgacatttttaagataaattcccaaattaggaaaactgatctctgtatgcatagatcattccgctccttttcattttttatttgacagaacaaacatatgccctgtatcccctctaaaaattttctatttacacaaaggcaggtctttcatgtaagtaaaaaacggatacagaccggcaaagaagtgtatctgcacggttccatgccgtccgtatccatcgctgcatattcttatacgttgaatctaaacagcataatatcgccgtcctgcacaacatattcttttccttccagccttacaagacctttttctttcgctgccgcatgtgttccacatgccataaggtcatcatagctgacaacttccgcacggataaatccgcgttcaaaatccgtatggatctttcctgccgcctgcggcgctttcgttcctctcttgatcgtccatgcacggacttccggttctcccgccgtcaggtaactgatcagaccgagaagatgataacttgcgcggatcaatttttcaagacccgactctttcaatcccagttcctcaaggaacatcgccttttcgtcatcatcaagctgggaaatctcttcttctatctccgcacatacaacgaacacttcacagtcctcgcttgccgcatactcacgaaccgcctttactccttcattgttcgcaccatcgtccgcaaggtcgtcttcagatacatttgccgcaaaaataacaggctttgcagtcagaagattataacttgcaagccactcctgctcgtcctcgtcatctgtcacaaagcttttcgccattttattgtcttccagatgcgctttcacacgatttaaaagatccagctcttttgcagccgccttgtcattgcgggaaagcttaaccgttttcgcaatacgccgctccagaatctccaggtccgaaaagatcagctcaagattgatcgtctcaatgtctctgatcggatcgatgcttccgtccacatgaacgatatttgtattttcaaaacagcggacaacatgaacgatcgcgtccacttcccttatatttgcaagaaactggttgccgagaccttcgccttttgacgcgccctttaccaaccccgcaatatcaacgaactcgatcgccgcaggaataatttttttcgtatgatacatctctccgagtacatcgagacgcttgtccggaactgttacgactcctacgttcggatcgatcgtacagaacggataattggcggattccgcccctgcttttgtcaatgaattaaacaatgtacttttccctacgttcggcaaaccgacgattcctaatttcatctttctatattcctcctataaatcctttaatt

SEQ ID NO: 7626 - DNA, 62733 bp, Unknown
  gut microbiota DNA sequence
atatttatataataataaatttatgttataattaaacgcagggagtaattcttatagagctcgggcgggtgttcggtgaaaacaccgcccgctgcttataaaatataaaaatgatataatgaggaaagagaaagtaacagttcagtctgcgccattcgtaaaaccacactgcgtgcttatcgtggctgctgccactgttttactcataaacgggcgctcaccgcatacagatgtccgctcgcaaaaacatgcaggcatgttttctgcttcacgtacactgtatggctgaactgttgagaaatataacggggaaagagtatgcttgattttagaatggaaacgtttctggcggtatgccggtatatgaatttcacacgggcagcggaaaaactgaatatcactcagcctgcggtatcacagcatatccgttttctggaaaagcattataatacgaagctgttccgctatgaggggaaaaagctggagctgaccgaagcgggagagattttgaaaaacgcgtcattgacgatgatgcatgatgaaactgcaatgcaagatgagatgaaaagagcgggcgaatcagaagaacttcgtttcggagcaacgaggacagtgggagatgtgctgggcgggaaaatgatttttaattatcttgaaatgtatccgaacgcgcacatacatatgatcgtagaaaatacacgggaacttttgaagaaactggatgaaggcgagatcgactttgctttggtagaaggttttttcaagaagaatgaatatgattttcagaaatattcagaagagccgtatatagcggtgtgcagccctgattatccgtttaaaaagaaaccaaaacggatagaagatcttttcggagaacgtattttgatcagagaggacggatcgggtacgcgcgaagtgctggagaggtatttggagtcctgtaatctgagcatcggtaattttcggcagacggtagagattggaagtatgcatacgatcaaagagttgacaaaattaaaatgcggtattacatttttatatgaaactgccatatgggaagagttggaaagcgaagcattggtcaaaattccattggaagattttcatatagtgcgagaatttacttttatctggaggcggggcagtttttatgcagacaagtatagagaaaagttcggatatttttcaaaatgacgaaaaagggagaaacttttatctattcatcaattttctgcgtaaaatataattttttctgcgcagagcagaagaaaaaataaaaagagaaataaagaagaaaaataaaaagagaaataaaaaagaaaaaggaagtgaatttccggaatgttacaggcagaacatttatcgtacaatataacagaagaaggaagacaatcagagatattaacagatgtaagttttacggtggaagacggggagatgcttgtcattacaggtcctaacgggggaggtaaatcgacgcttgcgaaacttcttatggggatcaatgaggcgacaggcggtaagatcatactggacgggcaggatattacatcgtatacgatcgataagagagcgcaggcaggaatggggtttgcatttcagcagccgccgcgctttaaggggatgacagtaaaaaggctgctttctcttgcggcaggcagagaattagatgatacgacatgctgtgagttgttaagcagtgtcggtctttgcgcgaaagaatatattaacagagaagctgacgcgacgctttcgggcggagagatgaagaggattgaaattgcgacagttctggcaaaagatcataagatatgtgtatttgatgaaccggaagcagggattgacctgtggagtttttcgatgttgatcaagcggtttgaacagattcacaaagaaaagaagcagagtctgatcttgatctcacatcaagagcgtattatacgcatggcggacaggatcatggttatcggagacggaaaagtagaagcggtcggcacggcggatgagatcgttccgatcttgttcgggaagaaaccggaatcatgcggatgcagaatacaaaaaggaggcgaactttatgagcgctgattttgaaggaaatgacaaagacgctgttgtgacacagcaagtgcttgatgtgatcgattcttatggatttaaaaaggaaggggcatataacctcagactgaacggtttggcggtttgtcatggggacagccgtcatattaagattgttccgaaagaggacagacagggaatcgatatttatataagcggtgaagcaaaagaagagcaggttcacattcctgtagtaatgactgaagaaggtgtggatattgtatacaatgatttctatatagaagacggagcagatgtaacgattatcgcaggatgcggaatccacggggaagggtgttcggaaacccgtcatgacggaatccatgcatttcatgtaggtaaaaatgcgaatgtgaaatatatagaaaatcattatgctcagggaaacggctcgggtaagaaaacgctcaatccggtgacaaagatctatgtcggagagaattcagtatttacgcttgagacaacgcagatcagcggcgtagactgtacggagagagaaaattatattgagctggcggacaacgcgaaactgtttgtgacagaaaagctgatgacagatgaagaacagtcggcagtttccaatatggacattgagttaaacggaacaaacagctcggcaagaattgtttccagatcggtcgggaaaggaaattcaaaacaagtctttcatccgagagcgatcggcaataaccggtgtcatgcacatgtgcagtgtgattcgattattatggatcaggcagagataagctctattccggagatcaatgcaaaacatgtagatgcgcagatcgttcatgaagcggcaatcggcagaatcaatgatgaacagcttgtgaagcttcgcacgttcggtatgagcgaggaagaagcggaagctgtcatcattgaaaatttcctgaattgattttcggcatcggttttttaaaatgatttttcggaatcgttgtttttcgcccatccgtaggaatattttacagctttattccatcctttgatgcggctaagccgaagttcttcacagacagaaggaaggaagattttatcggttgagcggttatttgcgatttcttctttgcttttccaataaccggaagcaagtccggcaagataagcagcgcccatggcggtcgtctctacaaaagaaggacgattgacaggggcgtttataatatctgcctgtacctgcatgagaaaattattcgcgcttgcacctccgtctacattgagtgaagaaagcgcaatgccggaatcggctttcatcgcctccagcacgtcgtttacctgataagcgatcgattcaagagtggcgcggatgatgtgatatttgtttactccgcgggtgatacctacgatcgttccccgtgcatactgatcccagtgaggagcgccaagacctgtgaaagcaggaacgacgtaacatccgttcgtatcttctacttttgacgccatatattccgaatcttcggctgaatctataaggcgcatttcatctctgagccattgtatggcggctcctgctacgaaaatagagccttcaagcgcataagtcacctttccgtccaatccccaggcaatcgttgtcacaagtccgttttcggaaaatacaggtttttcgcctgtattcattaataaaaagcagcccgttccgtaagtgtttttggcttctccggcctgaaaacaagtctgaccgaaaagggcggcctgctgatcgccggcagctcccgcgataggaatctctccgccgaaaaatgcgggatcggtctttccgtagatacagcttgacggttttggctgaggaagcatacttttcggaatgtcaagttcggacaggatctcgtcgtcccaggaaagggtgttgatgttaaacagcatcgtacgggaagcattggagtaatccgttacatgtgcccgtccttttgtcattttccagatgagccatgtctccactgtgccgaaaagaagttcctgacgttctgcacgttctctggctccggggacattgtccagtatccatttgatctttgtggcggaaaaataagcgtcgattacaagacccgttttttgacgaaatttttccgtaagacctttttctttcaaagaatcgcagtattcggaagtgcggcggcattgccagacgatggcgttatagaccggttctcctgtttttcggtcccatacgatagcggtttctctttggtttgtaataccgatcgccgcgatatcttctgccgatgcaccgatcttgttcattgcttctacggcaactccgagctgacaggcccatatttcgtcggcatcgtgctctacccatccgggatgaggaaaatattgggtgaattctctttgggcgacgctgcacacttgcccctttttattgaaaaggatgcatcggttgcttgtcgttccggcatccatagccatgatatattttgacatgatagtacctcctttgtcatcacattttgatagaagtttttgtatatgtgagacgagttttgataatggtgatgttattagctattatatcagcattattctcttcgataaatgcttttgatataaaagaaagtatggtataatcgtagagaaaccgtcatgaaaaggacggggatacgaaaagaaaaaggattaagagagatggagagtgaagtatggacggatcaatgtttatcggaacatggtgggcgcttgtcccgccgctgcttgcaatcgtgctcgcatttataacaaaagaggtgtacagttctctttttatcggcgtggcggtaggtgcaatgctttacagcggatttaatccgtgggagtcatttgtcaatttttttgacattatgaaaaacagtatgaatctgaatattttgatttttgacgttttgcttggaatgatcattgttcttatggcaaagtcaggaggttccgcagcctatggaagatgggcgggaacgaagatcaagtcgaaaaagagcgcccttttggcgacgacaggtcttggtatgcttatttttgtagacgattattttaactgtctgactgtcggatcggtaatgagaccggtaacagacaggtataaagtgtcaagagcgaaacttgcgtatatcatcgattcgacagcggctcctgtctgtattatcgcgccgatctccagttgggcggctgcggtaaattcttacgtgccggaagatgcggggatcagcggatttcagctttttatgaatacgatcccgtataacttgtatgcgcttttaacactgacgatggttattttcattacggtgacggcgtttgacttcggactgatgaaaaagcatgagagaaacgcggcgaaaggagatctgtttacgacaggaggagaagaattcgatcaggttgcggaagatgagatcaatccgaacggtaaggtgatcgaccttgtacttccggtagcggttttgatcgtatctgcggttggagcaatgatctatacaggattccagggcggagcgacaaatcttattacagctttttcgggatgcgatgcagagacaagcttgatctttgcgacactcgttacagtattttttatgttgattttgtatcttccgagaaaagtcgtaacgtttaaaggatttatggacagtctcgcagaaggctttaaattaatggttccggctgttacgatccttatttttgcatggtctttgaaagggatgggagatgctctcggactggctgaatttgtcgggggaattgtaggagataacgcttcggcaagtatcttcattccggcgattttgtttgtagtagcgatctttctgtcattttctacaggaacgtcgtggggaacatttgcaattctcgttccgatagcgacagctctttttgcaggagcggataacctgacgatgatgacgatttctgtatcggctgttcttgccggagcggtttgcggagatcacatttcgccgatttccgacacaactgttatgtcgtctgccggagcgcagagcaatcatatcaaccatgtgtctactcagatgcagtatgcggcagttgtcgccacggtaagttttgtcggctatattcttgcgggaatcatacgggtgtggtggatcgtacttggaatcagtctgatccttctgatcggtgttcttatgggaatgcggatgttcttggagagaaagcaggtaaagaaacatgccgggtgagcagaaaaaagtatgtattgatgttccgtatatcgatcagagcaagctgtacccgacgggatgcgaaagtgtatcgacggtaatgcttcttcggtttctgggcattgatataacggttgacgaattcatagaaaaatatttggaaaagaagtcttttgaagaaagagacgggcaggtttacggtcctgatccgcatcggtatttttgtggaagtccgtacgatgacgagtcgtttggatgctatgctccggtgatccgggaagcccttgagaaaataataggcgctgaatataccgtgacggacgagaccgggatgacaactgatgaactggttgaaaaatatatcgatcaggggatgccggttatttattgggcgtgtatcaatatgcgtgatccgatcgtaggtccgcagtggaaactcttagatacaggagagacgtttacgtggatctccaacgaacattgtatgttgcttgtcggttatgacgaagatagttattattttaatgatccatatgaaaataacggctgcatccgatatccgaaaacagttgtggaagatcgccataaagcacagcacatgcaggcagtcggcgtagtaagaaaaacggtcattcagtaaccggtatatggatgagctcggtatggtttgggaatatggtgacggcaacagataaaagagtctgaaaagattttgtctaaggagattttgagatatgaataaaaaacgattgattcctttgatttctatattgctcgtatttagttttatcggcttatttttcttttataaaagaagaaaaggcttcggaaaaaatattggcggatgctgttatagatctgcctgaaaatgatccggctatcgaccgcgcagttaaaataatcgaagaaaacctcataaaggaaatgccggactgccatgtaacttctcttcatgaaaatgatgcgggatatgctccgctccttcaaaaatatgaagacaagggattagagacactgatcatagatatggatttttatgttgaggaggatgccgaaccgggcgtgttcactccgggaacttcatatgaaggttatagttggatgtttacacgtgaaagtaaagacgacacatggactttagaagaaaacggatttcttctatgaagaaaccatgatgtctgaataaaagagaactgccgcattgaactgatttttagttaagttcagtgcggcagttttgtgcattttataataaatggattccgttttcggaagcggtttcgacgattgattccggccacatagaagaatggacttctccgatgtgagcttttcttaaataatacatacagatacgtgactggccgatcccgccgcctacagtataagggagttctccgtcaagaagagatttctggaaaggcagtttagcgcggtcttcgcatcctgcggtttttaattgagattttaatgattcttcatcgacacggatgcccatagaagaaagctcgagagcgatgtcaagaaccggataataaacgatgatatcgccgtttaactcccagtcgtcatagtccggcgcacgtccgtcgtgcttttcgcctgaagcgagcacttttccgatctgtgagatgaatacggcgccttttgcttttgcaatacgcagttctcgttcttttggagtgcagtcagggaacatgtcttccagttcctgtgaagtgatgaagaaaatatcatcaggaagaagaggttcgatatagttgtaccttcttgatatgtagtcctcggtatcttttaatgcactgtatacctttctgactgtgtattccagtgtttccatattccgttcttctttggaaataatcttttcccaatcccactgatcgacataaagggagtggatgttatcggtatcttcgtcacgacggattgcagtcatgtcagtgtaaagaccttcgccggaatgaaaaccgtatttttttaaggcatatcgcttccattttgcgagggaatgaacgatttccgcgcaggcatcgtcctgctctttgattccgaatgataccggacgttcaattccgtttagattgtcgttcataccggactgcggaagaacaaacaacggggcagatacacgcgtcaaatgaagagattttgcaagcgcgcgctcgaaatgatccttaacttctttgatagcgacttctgtttcacggattgtaagcggagaagaatatccctccggtatttttaaatgttccatatataaccactcctcttttgatgtattgacatttatgttttattttaatggggagaaggggagaagtcaactgtgacttttttgattatgttactgacagattttttcatggagaaaattcattgagcttttctttttgctgctcgtttgctgtctgtatttcagattattcacaatgaggatataaaataacagataatttaaaataaaatgaaaaaatattagaaataatattgacaaacacataatagagtgatattattaaatcaacaaataaaacaaactaaataatcaatcaaaactaaataaaaaatattttgttttgaaagaattttagtaaatgttttattcatccatcggatatcgtgatcagggatcggatggaaagatacagagaaagatcataatgacgagaaagttatgagagaagtaaaatctgtatttgaaaaatccatcggaaactgaagttcgatggaaatctaagaataggaggtacggaccaccgggaacgtaagttgatctatcaaaaagaagatagaaaagagaggtaaaaaaagaatgatagtaatatcacattgaaagtggatgttgatcaagatgagttgattggcatccactttcagttgtgcggaaatatattcggtaaaatagcgaaagcataaaacttggcagaggtatgtatattgctatgtattgctgtatattgcgtaatgagtcgggtttatggcacaccttttctgataagatttttttagaaaactttttggaaaactttttggaaaagatgatattttggaaaggtgtgtttttattatgaagagaaaaagaaagacagcaagagaaatttttatagtgatctgtttatttttgacaatatttctggcggtgttgtttgcatttgggagaacagagattccggcagtcgtttatatgtctgtatgtacggcatgtcttttcggaggggttgcagcgatacaggagtgagtgaccgggtgttttggattttatcaactaccgttgtcttctgaaatgtgaaatgtcggtgtataacagttgtaatcaactgttcggatgatgtataataatttcatgaatgatagggataaaaaatatcaggtgattacaccggaaaagggggcttgtgtatgaaaatagatatgcattgccacgtgaaagaaggctcgatcgacagcaaggttggagtggaagagtatattacgattttaaaaaagcatggttttcaagggatggtcattaccgatcatgacacatacaacggataccgatattggaaagaaaatataaaaggaaagaagcatacggattttgttgtattgaaagggattgagtatgacacaagggatgccgggcatatccttgttattatgccggaaggggtgaagatgcgtctgcttgagatgcgggggatgccgctggcgcttttaatcgaccttgtgcatcgaaacggcggagtcctaggtcctgctcatccatgcggtgagaagtatatgagttttacgaatgcgcggcggtattacttatctccggagattgtaaagcgttttgattttgtagaggcatttaatagctgtgagcccgtttcgtcgaattcaggtgcggaaaaactggcgaaaaaatatggaaaagttatgactggcggaagtgattcacataagccggactgtgtcggacggggatatacgatccttccggaacctgttacatgtgagacggaactgatttcgctgatccataagaaaactccgtttaaagcgggaggagtgctttataataagactacgaaggaaaagatcggaaagatcaacaagcttttggtatattccttctgggtttataataagagcggagaattagtgaaaagacatggcagaaataaaaaaatggaagaagagcatccgtttgatccgatcgatccgatcgaactgtattatcattcttgatccgatgaatggaaaatgatcgctgtgtggagcatgcgataagaaaaagttgtctatcagttatttgtttaactgatagacaacttttttgtcttctcttatttcttttatcattttttgtttcagcatatacgggagaatcgaatcaaggaaagcatttggatcggtcactccgattcgctcgctgttgaacggctgttttgcggtcagatcttttacaaagggttccagttctttttttgtcagcgacttattttttttgagcgcttttttgactttggagattccttttgaacagagcatgttggagagatcctgtttctggtgcattgtgcgccaaagaccccatccgtaaatgatcattgtggcaacggcaaacataaggacgtagggaatgtattttaacattattttttctcctctcctttccagtagatcaggttgttgtctttcatgatctcaagaaatttaattaaacgggataatgatttttccattttcggaaattcagattccatttctttggaaagctgatgtacgtctttttcatcgtctatcgcatgccatacgaaacttccgtacttatccattttaatatcgctgactctcgggcggcggaatattttctgggcaattttgtgatagaagcctttccattcgataaagacggtgacgattccgttttcatctgtttcatattctatatccggattttttacaggaataaaatcaagatagtttttttcgttttttttactttttttactcatcttaatgaagatcctctctacaatatcattacagaataatatcataaaaagaggcagcctgcaagcagcagactgcctccggtgaacaatcagatcatgtatgtactttgtttatacgttgaactgaatgtacggttttattttttagcaggtttcgctttcatgcagagtgcgaacaatccgccgagaagagcgatgaagataatcagacttccaacttgcggaagtgagaattttaaagctacgtcaagtttcgcaactgcaaatcctgcaagcaggataccggtgataccttctcctgcgataagtcctgatgtgaagagcacgcctttgtctgtgcgggctttcttttcttcgtccgtacctttgatcttttcaacaaggaaacgaacagctccaccggccatgatacctgcgcttaagctgaacgggagatacataccgactgcgaacggcattaccggaacttttatgatctcgactacgattgcgataaacacaccgataaggatgagtccccacggaagttctgcgttcatgataccttcaacgagcattttcatcattgtagcctgagctgccggaagttcttttgaaccgtaagaccaagcttcgttcagaaggtagagaactccgccgatagctgccgctgaaacaatgacaccgatcaattcaccgatctgctgtttcttcggtgtagctcctacgataaatccggttttaaggtcctgagacgtatctccggcgattgctgcgattacacagatgataccgccgatagcgattgctccgaccataccttttgtacctgttgtacctgttgcttttaaagccagtgtagcgatgatcaatgttgcgatcgccataccggaaacagggttgttagaagaaccgatcagacctaccatacgagaagaaacggttgcaaagaagaaaccgaagattacgatgataagtgatccgagcggacttacagggaatgccgggatgagccagattgcaacaacgatcacaagaagaactacaagaaggatcggcataggaagatcctgctgtgtacgaacgagcgttgtgttggaacgttttttggacatactggacatagcctgtttaaatgtacggacgatcagcgggaagctcttgatcaggctgatcataccgccggtagcaacagctccggctccgatgtatttgatgtagttgctccaaagagcagacggttcgttggctgcaagcaattcagagatcggagctgtgcctgggaagatcgtagcgtcagcgccgaacaaagcgattgccggcataagtacgaaccagctcagagtacctcctgcaagcatgtagcttgaaatcttcggtccacagatgaagccgacacctgcaagagcaggaagaacctgaataccgatctgagatcctgcatagcttttgaaagcataaccgatttcgcttgggaataatttgaatccgtctgcgatgaatttgtaagctgctgcgataccgagtcctgcgaatacagtacctgcttttgcgcctccctcttctcctgcaagaagaacttctgcgcaggctgttccttccgggaacggaagtgtgccgtgttcttcaacgatcaatgcctgacgaagcggcaccatgaagcaaattccgaggacacctccgaaaagtgcaacgagaaagatcgtcatcatacttgggaaagcgatttttccctcctcagcccagataaataatgcaggcagagtgaagatagcacctgccgctacagactctccggcggaaccgattgtctgcacaagattgttttcgagaatggaatccttacgaagaatcacacggatgatacccatagagataactgctgccggaatggaagctgatactgtcataccgacgatcagtccgaggtatgcgtttgcggctccgaaaacgactgcaaggataataccaatcacgattgaagttaccgtaaactccggaacgattttatctgccggaatatacggtttgaactcatttttcttttccatgatgttcattccttttcctttctgtaaaattaaagactttgtagtaaagtctataacattataccactttggcgtgataaaaggaagaagaaaaatttgtatttatgcaatattcgtcaatatttctacagtaatattaatatttattaatattatgacggttttttttgacatattctgcgttttggataaaattgcaggggaaaacggcgaagaagaaattcaggcggagcgggcggagagattttacactttatatttcaggaagattcttttataataagaggcagcaagacggaaggtgaaaagtggaaatgaatgaaattttagaacaggcgcttcctttttgggaaagtctgacagataaacagaaagaagaaatcaggaacaatatggtaaaaacagaatgccaaaagaaaacgcagctccatttcggcggcggagaatgcgccggagtccagatcatcggaaaaggaagagtgcgggtatttattacatcaccgggcggcggagatattacattattccgtttgctggaaggagatgtcagtattctgagcgcggcgtgtatgcttaacggtatggatgtggagcttgatatggagatggaaacagactgtgaactttatacgattccaaagtgtgtgtatcgcaaactgtatgatgagagcggaattgtgaaagactatacgatggagatgatatcggaaaagttttctgacatcatgtggctgtttaatcagttcgttttttcaaatgtagcatctcgtatcgcatcggctctgctcgaccataaagtgatggagcgctcagacagtctggcgattacgcacgaggcattggcgcgggatgcggggacagcgagggaagtagtgacaaggatactgaagcagtttcaggctgacggacttgtgaaactgacccgcgggaaagtggaaatacttaacgaggcaggactgagaaaaatctaatcttgaaacggcaaaacggcacatagatgttaattgtgattttgtcactgaaaagaaaattcatccggtataatataaagccatactcaatgaaagaaaacaaaaatcgaatcaataaaaacagaccgaataaggtcgggaaaaggagaaagaaaaatggcagtagtaaaattaacaacggcaaattttgatcaggaagttcttcaggcagatcgcccggtattggtagatttctacgctgactggtgcggaccgtgtaagatgatgggaccggtagtagaagagatttccggagaattggacgatgtaaaagtatgtaagatcaatattgacgaagagatggaagtagcgcagcgctacggtgttatgagcatcccgacatttatcgcgtttaaaaacggagagatgacaggaaaacaggtcggcgctgttccgaagggagcgcttgcagatctggtaaaataacaaaacatagtaaaggacagataaaccggcttcttgtcaggaatgtgcacgggtagtataatcaagaaaaatatgttggaagacctgtggcaggaggcggtttatgtcattacaatttattatgggaaattccggaagcggaaaatcttactgtttatatgatacggttgttcgggaagcgattgaaaatcctgacaagaattatcttgtcatcgttcccgagcagtttacgatgcagacacaaaaagatctctgtcttgcgcatccaaaaggcgggatcatgaatattgatgtgttaagtttcgggcgtctggcgtaccgcgtttttgaagaggtgggtcaggatgcccgtgttgtgcttgatgatgaaggaaaaaatcttgttttgcgcaaaattgcgggcgagtgtgaaaaagatctgaaggtctttaagggaaacctgaaaaaacaaggttatataagcgaagtgaagtctgttctttcggaatttgcgcagtatggcgtagactttgaacgtttggatgattttatgaaagaagtgccgcctgaaagttatctgcattataaactggatgatatccgaactatatatgaaaaatttgaagagtatttaagtgaaaaatacattacaaaagaagaaatgctcgatgtgctcagcgacgctgttccgtattccgatattttaaaaggaagcgtggtggcgatggacgggtttacaggttttacgcctgtacaaaaccgtttgatcggtgagcttttttcagtgtgcgaaaaagtgatgatcacagtgacgatggacggaagagaaaatccgtatgtatatgaacatccgtatcagatttttgcgctcggcaaacagatggtcacatctcttatgaagattgcgggtgagaaaaaaacagagattgaagaaccgatatgtttgtttgaaaggccggtgtatcgttttcgggattgttcggaaatggcgtttttggaaacggaactattccggtattcaggcgcaaaatataacggaagctgtgagtctgtatcgctgcatgaagtgcgctctccgggaaaagaggcaaagtatgtagcagaaagtatcaggcggttagtgaggacaaaaggataccgatacagagacattgccgtgatcgcgtcagatatgaatgtgtatgcggatgtgttggaaaaagcatgtgcttcttttgacatacctgtgtttatggatcataagaaaagtattcttctgaattcttttgtagagtatgtccgcagccttctggggatgatacaggaaaattttacttatgaaagcgtatttcgttatttaagatccggatattgtgaatttacggaagatgagatcgaccgattggaaaactactgtcttgcgctggggataaagggatataaaaaatggcagcaggcatgggcgaggaaaacgaaagaggcggatgaggaagaagtggaaaagttaaatcatctgcgcgtgaaatttgtcgaaaagatcgatccgcttatgttcgtttcaagacagaaaaaaaagacggtgcttgacattacgcttgcggtatatgaatttatcgcaggagagcatcttcaggagaaattggaacaacagcagaaatttttcgcagaacagggagaacttacacttgcaaaagaatatgagcagatctaccggatcgtcatggagttgtttgacaagttttcggaactgttaggcgacgagccgattacgctgaaagaatactgcgagcttcttgacgccggatttgaagaggcgaaagtgggagtgattcctccgagcattgaccaggttgtgatcggagacgtagagcgtacaagaatgaaagatatccgcgccttgttttttgtcggagcgaacgatgtgcttttgccgggcaatgcgggaacgggcggcattttgtctgagcgggacagagaaaaattcaaagagaaagatatctcgttgtcgcccggaccgaaggaaaaaatctatatacagaaattttatttatatacggcgctgacaaaaccgacggaacttctaagcctgtcatggtcaaaggtgtcgggggagggaaaatctctgcgtccggcgtatttgatacaggagcttcgcaggctgtttccgaatctgtccgttgtcgatgaagaaaacagaaagcttagcgacagagagatcacccgaagaggggggatcgagaaagtggcaaaaggaatttgcagccgccgtctcgggctggataatgagtggaaagagttgtatacatggtttcaaaaagacggaagaaataaaaaagagatcgaaagtattttgaatgcaggttttctgcataaaacagatacgaggcttgcaccggaactgacaaaagaactttatagtgatcgaaatcgcgtcagtgtgacaagactggaaaaatttgcgtcttgtgcatatgctcattttttaagttacggactgcggctttcagaccgggaagaatatgggtttgaggcgcttgatctcggaaatatcgcgcacaagtctttggagacgttttccaaaaaggcggatgcgcagaaaatgaaatggcaggaaataccggaagctcttcgtgacgagatgatcgatgagagtgtggaagaaagcgtaatagattatgggaatacagttcttttcagttcggcgcgaaatgaatatatgatcactcggatcaaacgtcttatccgaacttctgtgtgggcgctgacaaagcagatagaaaaaggagactttcttccaagcgggtacgagatgcagttcggaagcgggaagattgaccgaatcgatacatgttttgacaatgactgtgtttatgtcaaagtgacagattataaaacgggaatgaaaagttttgatattacggcgttgtatcatggtctgcaaatgcagcttccggtatatctgaacgcggctttggatgtagagcaaagaaaacatcctcataaaacgatcgtcccggcaggaatattttattatcggatacaagatccgatcgtttcggaagaaaaaactcaggatgccgtggagagaagtattttaaaagaattaaagcaggatgggctagttaacggggatgatatggtgatttcgcatttggagaaagaactttcggggaattcgctcctttttccaataggaagaaataaagacggttcattgagtaaaacgtctcacgcgcttccggaagaactgtttcggctagtactttcttttgcgaaacgaaaagaagagtcggtcaaagaccgaatgtatgacggagaagtttccgcctctccgtatgagatgggagaaactacaggatgtgattactgtccgtacagagatatatgtgggttcgatccgcgtcttgaaggatgtagttaccgcaggctggagagatattcttcagacgatgcggtgaaaaagatgcgggaggctttggaagaaaatgtcagccgggacgcttcggaaaacgagcaaagcgggaaaggcagggaaggataagaatgggcgtgaaatggacaaaacagcagcaaaaggtcatagatctgcgaaatcgtaatattcttgtatctgcggcggcaggatcgggaaagacagccgttctcgtagaacgtattattcaaaagatcacagatgagcaaagtcctgtcgatgtggacagacttttgattgtgacatttacagaagcggcggcagcagagatgaaggacaggatcagagaagcgatcgagaaaaagctggaagaaaatccgggaaacgtacatctggagaggcaggctacgttagttcacagtgcgccgatcacgacgatacacagtttttgtctgtctgtgataagggaacattttcatgtgatcgatcttgatccgggatttcggatcggagaagacggagaattaaaacttttaaaacaagacgttctcgatgaattgcttgaagagtgttattccaaaggagaggaagagttcctttcctttacagagcggtttggaacagggaaaaatgaccggaagatcgaagggatcattttaaaattatacgaatattccggcagttatccaagaccggaacagtggcttgaccgttgtgctgcggtatatacagaagaagaggcggcggaagcgatgatacggcgggcaaaagaacacgttcttattcggatcgaagaaccggaaaaactgatccgcagaggattgaaaatatgtgaggagccggatggaccgtatatgtatgcggatatgctggaagaggatcttcgtggaatagagaagataagaaaatgcagtgattttgcagaaatgtatgacgcggctgatcggtttgtatggaaaacgctttcgagaaaaaaagatgacagtgtatcggctgaaaaaagagagtccgtaaaggcgttgagagaacaggcaaaaaaggcgattgccggggtgaaggaaacttatttttacgcgccggaaagcgtatggaaagaggacatggtttcggcgggagagtctgtgaaaacgctcgtatctttggtaaagctgttcgcagaaaagtttgcggaaaagaagcgcggcagaaatatgatagattttaacgatatggaacggtttgcgcttgatatactgactgaagaaaaaaacggagaacttgttccgtctgccgtagccggagaatatgcaaaacagtttgaagaaattatgatcgacgaatatcaggacagtaattttgtacaggagacgatcctgacaagcgtatcgggacaggcagaaggaaaaaataatatttttatggtaggcgatgtaaagcagagcatttacagcttccgtctttcaagacctgaactgtttatgcaaaaatataacacatacagtttagaagacagtgacagacagaggatcgatctgcataaaaacttcagaagcagaggagaagttctggacagtgtcaattatatcttccgacgtattatgaaaaaagaaatgggcggaatcgaatatgatgacagcgcggcgctttatcttggggcgaagtttccgaaaacagaagaaattgaggcaaaacgatacatatcgtcagaatgtgaaagaaacacagatcttttcaagacggagcttttgatcttaaaagaccgcgataaagaagcggaaaacgtacgtcggtcagaagcgaggatgatcgcgcgcagaattaaaagtttgatgcgcggcggggttgtgtcggataaaaaaacaggggaatatcgtccggtgcagtataaagatattgtgattttgacaagaagtgtgaaaggatgggcagaagatttttcggcagtccttgcagaagaagggattcccgcatattctgtaagcagggaagggtattttgaaacttatgaagtgagcgtattgcttgactatcttaaaatactcgataacggaaggcaggatctcccgcttgcggcggttctggcgtcgcctttgggaaatcttctgacagaagatatggcaaagatcagagtcgcatatcccgacgtaccgtttcatgaaagcgcgcggatgtacgcgtcggaagaagcacaggatccggtcttgaaagatcgtctgatgagatttttcagtcaggtggatcatttcagaaaaaaagtgtcgtatactccgattcatgatctgttgacggagattatagaagaaacaggtttcggtatatacatttcggcgatggaaggcggagtgcaaagagccgcaaacgtagagatgctggtggaaaaagcaaaggcgtttgaaggaacaagctacaaaggattgtttcattttgtgcggtatatcgaacaactgaaaaaatatgacgttgattacggagaagccgggatcatggatgaacaggcggatacggtaaggatcatgagtattcataagagtaaaggtttggaatttccggttgtttttgcggcaggtatgggaaaacaatttaatacacaggatacgaaaagcagcatgatccttcatcctgaatggggcattgggattgataagatcgatctgaaacggaggacaaaagcgcctacatttttgaaaaagctgattcgggaagaggcaatgtatgaaatgtgggcagaggagatgcgcattctgtatgtagcgttgacaagagcaaaggaaaaactgatcatgacaggggttttgccggatcgtttcattatgcgctccggcaaagacggagttatcacggcaggtgcaaaatcatatttcgactggatcataccggctctttggtctgaagaggaggaggcggcgttagaagatgcgcctgtctgcatttttcagtatacaggaaatgacataggagcagatattttacaggtgaagtcagaacagttggcgcttgacgtattgaaacactgggatgtgacaaaagtgtatgatccggaaatacgaaaatgtctggatgaacaggcagattacgtttatccgtattattcggaaggcggtatgaaaatgaagtttaccgtatcggagctgaaaaaaagaaaggcgctgcaagaagaagcgggagaggaaatgtataaagaaccacagacggttcctcttcttccccgttttataaaagaggaagaaactctttccggcgcttcacggggaagcgcatatcacaagtttttagaactgcttgattttgcaaaagaatacgaagcagatgatctggaagcagaggtggaaaggcttgcggaagatggacgtttatcgagggaaatggcagaatgtattgagacagaagatatgatgcggtttcttcggactaagagcggagtgcggatgttacaggcggcaaggaacagaaaactttataaagagcagccttttgtgatcagcgtgaatgcatcggagatctatcagggagatctgtccggggaaaagatattagtgcaggggattatcgacgtttattttgaagaagaagacggacttgtcgtgcttgattataagacggatcaggtgaaaagcagaaaagaacttgcggaaaaatatcatgcgcagcttgaatattatgcacatgccctgtctcagcttacgggaaaaactgtaaaagagaagattatttattcgtttactttaaaagaggagatcatcgtatgaagattttgatgtattgtttgctcgcattaaatgttggggtatggctgatgtacggtatagataagtggaaagcaaaatcgggaagatggcggattcccgaaaaagttcttctgcttgcggcgtttgcaggcggttcggttggagctttagcaggaatgatgatgttcaggcataaaacaaagaaagcaaaatttgtcatcagcgtaccgatattttttgtgatccattgtgtgatagccggatatgtgcttttgaattattaaagaacaatgtaacagttcagcccgcgccattcgtaaaaccgcactgcgtgcttattgtggctgccgccactgttttactcataaaaaggcgctaagcacatacagatgtccgcttgcaaaaatatgcaagcatgttttgtgcttcctgtacatctgtatggatgaactgttacgaaaaaatatgtcagatgctcttgactttgacgtaacgtcaagtaatatacttgccctaagctgatagaaaagaaagaaaatatcggcttagggtattttaacaggaggtgaaaacggtgaagtgcggcattaaagaagtatcggaactaacaggagtgagtgcgcgcacacttcgttattatgatcagatcggattgctgaaaccatcaaagacaagtgaagccggatatcggtactatggagagcgggaactggagatcctgcagcagattctgttttacaaggaacggggaatggaactaaagcagatcaagaagatcatctatcagaaagactttgacattatggcggctttgcgggaacaccttttggaacttgaggaaaagagaaaccatatggaagctctgatccaaacagtggaacagacgatacgttcaatgaaaggagaatatgatatgagtgatcaggaaaaatttcaggcgtttaaagaaagagtagttcgggaaaatgaagaaaaacacggggcggaaatccgcgaaaaatatggcgatgaagagatggatgccgcaaacaggaaagttttagatatgacagaggaggaatacgagagatttcaaaatctgggtgaagaaatccgcatacaattacaggatgcggtaagaggcggagcaaacccggaggatgaatgcggcaggcggatcgtcgcacttcataaagaatggcttggaaagacatggaaacagtatacgaaagaggcgcatgcggcaatcggcaatctctatatcagcgacgagaggtttaaaatgtattatgataaagaagtgaatggatgtgcaaagtttctcgaatctgcaattcgatattgggttgaccgggtataagcggagctgaacagacgatttacagggcggcgatcaatggtttttccggataatattgtattgacaaactatattatacaaaatataatattactcatataatacaatgtctttggcaaaaaaggaggaacagatggtatttcatacaggagctgccctgttggatgcgatcgtactggcagtcgtatctatggaagaaacgggaacatatggatacaggatcacgcaggatgtaagaaaagtgatcgacgtatcggaatcgacattgtatccggttttgcgaaggcttcagaaagatgagtgtctggaagtatatgatcgacagtttgaaggcagaaacagacggtattataaagtgaccgaaaagggaatcgcgcagttggatttttatagggaagagtggaaaaattatacatgtaagatcagcgatatctttgacggagcagatcggatgaatacgatttgctaaaacgggcaatactcctttgaaagaagaaaggggaagttgtatgtcagggaaaaaatcaaagacgatcgatccggcaaatcttgatccggatgaaaagctgaaatatgaggtggctgaggaaatagggcttctcgataaagtgatgacggaaggctggaaatcacttacatcaaaggagacaggcaggatcggaggattagtgacacgaaagaagaagcagcgatccggcgggcagaatatttctttacaaagatagacaaatttgatagaattatacatccgagggagacgacaggtgatgtgtatgaaagaaagaataaatgttttgagtacggaaatggactgcataacagcgaaggaagcgatgttaaaagcgattgcgtttctggaaagagagtcggttgatattatcgaagttttatctatgagcgcattgatgcgcgcgcgggatgaagacgagtggataagatcgacatccggatttggtcttattctgcccggagagacagaaattctcgaagcggcaggggaaaccgacaggataaaactaagagaagcggaaaatcagacatttataaaaatgtttatgaaataccttcagaagaacagaaaaagagtttttttgcttgccgaatcggaagaaaagctaaatactgtggaaaatgccatgaagtattatgacaaaggaatttttctgacgggacacgcgctgatcaaagagggagaaaaccgggaagaagacgtagtcaatgagatcaacggaacagagacggactgtatcttgtccgtactgacttctccttatcaagaaaagtttatcgcggaaaatcaagctcttttaaatgtaaaactgtggttcggatgtggaactctgcttgaaaaaagttatggcgagagaaagctttccaaaaggctctcccggtttctgctgaaaaagcgatttcatctgttagtagggaaacaacagaaaaaatcagactagacaaaagcgggaaaaatgtccatatatggaatttgtgaacaatgtatagacattaaaatatgaattttttgtaaaatatctgaggaaatgcataaaaaatatgtatttcctctttctttttttgctgttttgcattaatataatatacgaatctaagaaagaggaatattttcgcttttaaagtttgtgaaaaatgtacatgatataaatccaaggagtggaggaacaggcatgatttcaaatcagatacttcagaatacgatcgacggattgaaaggaatttccaaagttgacttctcagtattagatacagagggaaaggaactggcatctacattagacaatgcgcaggaacgaaacagcgcggtaatctcgtttgtagaatcgcctgcggacagtcaggtaatacagggatgtcagttttttaagatttttgacgagcagaggcttgagtacgtactgctggcggaaggtgacagcgagacggcgtatatgctcggcaaagttgcggcattccagatccacagtctgctggtagcttataaagaaaggttcgacaaagataattttattaaaaatcttcttctggacaaccttctgttggtagacatttataaccgtgctaaaaaattacatattgacacggaggtaaaacgtgttatctttattattgagacatcacacgaaaaggataatgccgcgcttgagaatgtgagaaatcttcttggcggaaaatcaaaagattttattactgcggttgatgagaagaatatcattgtagtaaaagaactcacagaaaaagacggggcgaaagagcttgagaagatggcgaaggaaatgctcgacatgctgaaggaagatacaaaggacgagcagatccgtattgcatacggtacgatcatcagcgacatcaaggaagtatccaagtcctataaagaggcgaagcttgcgcttgacgtagggaaaattttctttgcggaaaaggatattgttgcatttacgacacttggtatcggccgtctgatctatcagctcccgattccgttgtgcaagatgtttatcagagagattttcgaggggaaatcgccggatgattttgatgaggagacattgacaacgatcaataaattttttgagaacagtctgaatgtatcggaaacatcccggcagttgtacattcacagaaatactcttgtatacagactggataaacttcagaagagcacggggcttgatctgcgtgtgtttgaggatgcgatcacgttcaagatcgcgcttatggttgtaaaatatatgaaatatatggaatcattagagtattagatcttacaggagtataaataattaggaggaacttatgattgaattaagaaacgtgacgaaagagtactctaagggcaattcagctcttaacggagtctctgtgaaaatcgaacggggagaattcgttttcatcgtcggagacagcggctcgggaaagtctaccctgattcgtttgatcatgaaggagttgaatccgactgagggaacgatcatagtaaacgggcagaacctgaatcgtatgaaacaccgcaatatcgcgaaatacagaagaggattgggcgttgtgtttcaggacttccgtcttttgagagacagaaacatttatgaaaatattgcgtttgccctgcgcgtgacggaaacgccgacaaaagtgatcaagaaaaaagtgcctgcggcgctttcgctggtcggtcttgcgcaaaaatataaatcgtttccgaaggaattatcaggcggagagcagcagcgagttgcaatcgcaagggcaatcgtaaacgaacccgctattttgttggcagacgagcctacgggaaacttagatccaacgaactcatgggagatcatgagccttttgaaagaggcgaatgaaagaggaacgacagtgcttgtcgttacgcataaccaggagattgtaaacgagatgaacgagcgcgtgatcactatgaaacaaggtgtgatcgtcagtgatgaacaaaaaggtgggtatatagatgaggattagtacatttggatacgtcggaaaacaaggcgttaagaatatctggagaaacaagatgttttcgctcgcgtccattgcgacaatgtcagcttgtatcttcttgtttggattattcttttcgattattgtaaattttcagcatattataaaaacagcggaggaaggcgttgcgatcacagtattctttgaagaagacgctacagattcagagaagaaagcgatcgggaaggcgctggaagcccgcaaagatgtggcagaagtaaagtacatatcggcagaagaagcatgggaagaattccagaagcagtattttgcagacaatccggagctggcagaaggatttaaaaacgataacccgctggcatcttcggacaactatgaagtatatatgaaaacagcggaagacagtaagagtcttacagcgagaagccgttctctttcggagacgcagaaagaacttgtttcttatgcacaaaaactggacggcgtacgagaagtaaacaagtcggacgtagtagcgaagatgctttcaagcgtaaatacacttgtagcggttatttcgatcacaattatcattatccttctcggagtttcgatcttcctgatcagtaataccgttacgatgggtattaccgtgcgaaaagaagagattgcgatcatgaagtacatcggagcgaaagactttgtcgttcgttctccgttcgtgatcgaaggtcttatcattggtattttcggcgcggcgattccgcttgtactgctgtacttcctgtatgataaagcagttcagtacattatggtgaaattcagtattcttgagaatattattacattccttccggtgtcgactgtatatcagatcttactcccgatcggtgtggtaatgggaatcggaatcggtttcctcggaagtttctttacggtgcgcaaacatctgaaagtataggaggtatactcgatgaagtgtagaatgaagagggtggcgagtttatttcttgcgttggcgctgtgtgccggaatgacgatgaacgtaggggctgttaccgttcaggaagcggaaaataaagcggacgagcttgaaggcaaaaaagaacaggctgaggcagaggcgaaagatctcacggaaaaattaaaagggatcgttgccgatatggaagaaacgcagaagaaactgacagaaaaagaagaggagatcgaacaggttgaaaatgaacttgttcaggctcagattgatgcgaatgatcagtatgagagaatgaaagttcgtatcaaatatatgtatgagagtggaaatactcagtttgtagccgttcttgccgagagtaagaatatgggagattttctgaataaggcagaatatatttctcaaatctcagagtatgacagagacgaacttataaggtatcaggatacggttgaagaaatcgaggtgaaagaagaagaggttcaggcagaatatgaggaactgaatacgcttcagacaaagcttgtcggtcagcagacggaagttcagaaaatgatcgatgagaataaagaaaaacttagcaatatccagtcggagatcgatgcgaatgctgctgcattggaaaaggcaaaagaagttgaaagaatccaacaggagcaggcaggaaataattatattccttcaacgggcggaaacgtcgtgagcggaaacggatattttacgcacccgtgtccgggtatgtcgtaccaatccagttattttggcgagatcaggccatatgaggtcggcggccataaaggacatgattatgctgcggctgtaggaacacctacatatgcggctgcggcaggaacggttgtgatcgccggattcagctacagcgccggaaactgggttgttattaatcacggaaacggacttgtgacaaaatatatgcatcacagcgcacttgccgtcagagcagggcaatatgtagagaaaggtcagcagatcggatatgtgggaagcacagggcagtcaaccggaccgcatcttcattttcaggtggagctgaataatgtacctgtaaatcctgatttgtatatgtaaagtggttatacataggaatagccgggggtaatgattcagtcagtgaaatttactatatgggagatttcccgtatatggaagaagaggggagacaaggcagagtatgatctgttttgtctttcttctgtatagacaaaaagtttggcgacatttcataaaagtcgaatgggaaataaaaacggttatataatagatagaggggcgttggaaagtaatgcgatgtgatgtaagaaaatttgcggatgaacgaaaacaggggaatgaaaaacatggatcaaactagtaataatcaaaatgagtcggatgaaatcaagatgagtcggggcagcgtggatgcaaatgaaggttctttaggcagcgggaagaaaaaaagcagattcgggattggcgttcttgtaggaatcgtgatcggcgcagttataattaccggagtatggggagctgcaaaggtggtatctgccgtatttttcaaaggcaattttgcaacggaaagtacatcaagatcagatatggaacataaacttgacaggcttaacgcgttgatagagaagtattatctgtatgaagatgagattgataaagatgcccttgtagaaggtatttattcagggtatgcaggcgcgctgggagatccgtatacagaatactacgatgaacaggaagcgaaggagctttttgaaacaacgaacggtgaatttttcggaatcggagcatcgatgtcgaagcagctcggaacagatgagattacgatcgtcaatgtgtatgaagattcacctgcagacaaggcgggcttgaaatcaggcgatatcttatataaggtagacgaacatgagacggcgggatatgaactggatacagtcgtttcgtggatcaaaggcgaaaaaggtacgtcggttgtcctccatgtgctaagagacggaaaagaagttgaagtgacggctgtcagggataagatcgaagtacagacagtcgcatatgaaatgaaagaagatcagattggctatatcgctgtaagcgagtttgacagcgtaacttatcatcaatttgaaacggcgctggaagatcttgaaaagcagggaatgaaagggcttgtaattgatcttcgtaataatcccggcggaaattttgatacagtaacagatatgctgaagctgcttcttccggaaggagtgatcgtgtcgacaaaagacaaagaagggaatgtagaagaagttacttgcgacggagcaaatgaatttgataagccgcttgccgtacttgtaaatcaatacagcgccagcgcgtcggagattttcagcggagctgtgcaggattacggcatcggagagatcgtcggtatgacgacttatggaaaaggggtcgttcagcagttaatggatcttggagacggaacatgcttaaaaatgacaatcgcagaatactatactccaaacggacggagcatcaacggcaaaggcgtagagcctgacgtggaagtagagtatgaatacgatgagaataatcccgaagcagacacccagttagagaaagctttggaagtagtgaaagatcaaaataaataaaacaaaaacaatatgggcggacaatatggaacagaataagtttaacggaaaaatctgagcagaaagtctgaacatctgaacagaaaaagcggaacagtgaactgtccgcttttttcgtaattattcaaattgttttttaataagtttttaaatcggttttttgaatcggtttttcgtgtgggctcattttgaatcgtttagttttggacttttcgccttacagatgagctgagtcattgttcccatcggacagtaaacgcaccagcttctcggtttgaacaagatcattgttgcaaccccaagtacggtagatgtcagcatgacactgtaaaatccaaaagcaaactgtgcgacgcccggatggaatagtgttccgtggtatgcccaatcccacgggaacgaaaatgtccagagcagggagactgcctgttttaagctgtggatttctgcaaatacaagtcctgtattccaaagcatttggaaaaacatgacaaagaaaaagattagaaatccatatctgaaccatttacttttcatccacagaggcacgtctttttttcgggaaagaccgaaacgtcctccgatcagaccgaaaagctgccctcttccacaataccggttacaatatccctttgttccatttgcaagagagatgatcaaagggatgaaaaaacaaagaagtccgatccatgcaaacaggatgttgaaaaatccgagaatcaaataagcgagggatacgatccacaaatagtcataccaatgtttttccatgacggacctcctaaaagtttgttctattaatatatagcatagaggatgataagattctgtgatataatcacgcaagcagatgacaatgtgctttttggcgcttttcggtgattcctgaagtatttgtttttttatacatgacgaaacaggaaaattttgatatagtatataagtgcgaaaaatcggattgtgaggagttaagaaatggatatattgattgttatgtgtatcgggattttagtaggaagagtttcaatcctgcgcagggcgaaaaagaaaaatgaatatctttctttgttttgtacgtttattttgattttttctatgggagtcatgcttggaaagaaagatcatttttttgaagaattatcatcgcttggtctgacaagctttctctttttccttataccgaccgtgctttctatcggattggtttactggctgacaagagtttttatgaagaaagataaataggccgttgtaaaaaataaagttttaggaaagaaggggtttagatgatcgtttttttaacgatattgtccttagtatcaggacttgtctacggctattttgatgtggaaagcagtttcatttccgcaatcacgcagaatacccatattgttttatatatattaatgttctccgtcggaataagcatcggaatgtatgacggtattgtgcagaaaatacgggaatatcatattaagatttttattattccgatcggaattattataggctctcttttgggaggaataatttgttctatgatcgttaaaatgcctgttggtcatgggacggcgatcgcgagcggattaggctggtacagtctttcaggagcaacgatcagcaagctggtaagcgcagaagccggaagtatcgcttttttgagtaatctgatgagagagatcttttcgttttttattattccgtttttggcggtacattttaattattatacgtgcattgcacctgcgggagcgacaagtgaagatacaacgcttccggtaatgctgaaatatacaaatgaagaaacggtagtgttatctgttttaaacggagtgatctgttcattttgtgtgccgatacttatttcgttttgtttgaatataaagtaaaaatatataatcgccggcagacaggaaaagtataaaagaagaaaaggagacgttgaaaatgaaactgcagtttaaatatcagaaatttcaggctgatgcggcgaaggcagttgcggatgtctttgacggacagccatatttggcgccttcttatatgacaggggaaatatcggggaaaaattcgtcgtcagaagagagaaaaggaactttttcaggatggagcaatcagaagatcgtgcccgaattaagcgatgagagaatattagataatctgcggaaaatacaaaaggcgaatcagattccggtttcttcaaagctggaagggcgggaaaacggatatcatctgacggttgagatggagaccggagttgggaaaacgtacacttatattaagacgatatacgaattaaataaacgatacggatggagtaagtttctcgtcgtcgtgccaagcatcgcgattcgggagggcgtatataagacatttcagataacgagagaacattttgcaaaagagtatggaaagaagatccgtttttttatttataattcagagagacttacggaaatcgaccggtttgcatcggataattctgttcatgtaatgatcatcaattctcaggcattcaatgcaaaaggaaaggatgcaaggagaatttatatgaatcttgatgagtttcagggaaggaagccgatcgatttgatcgcgggaacaaatccgatcataattattgatgaaccacagtcggtggaaggcaggcagacaaaagagaggatgaaacagttttgccctcttattacgcttcggtattctgcaacgcataaagctgacagtctgtataatatggtgtatcgccttagtgcggcagatgcttacagaaaataccttgtgaaaaaaattgaagtaaaaggaatcgcagagacaaaaacaatggcgtcagacggctatatatatgtagaaaggatctgttgttctgagtctgatgcggctgccgttatacagtatgattttaaaatgggaagcgggattcggaaacaatatcgaaaggtaggaatcggcgacgacttatacgaaatttcgggaggtttggaagaatatcaaggcggctttgaagtaaaacagattaacagacaggaagaatcggttgagtttgtcaacgggatgaaactatatgcaggcgatatcaacggaaaagtggacgaggaacagattcgcagaatacagatcagagagacaatcctgtctcatatagacagggaacgccggttgtttggcagaagaattaaagttttgtcattgttttttattgatgaagttgcccgttataaaaagtatgacgaaacgggatgtcctcaaaacggcagttatgcggacatatttgaagaagagtaccgtaacattatagagaatatgaagtatggaccgggagatgaaaagtatcgggattacatagaaatgatccctgtcgaaaaaactcatgccggatatttttcaatagacagaaaagggcatgtagtcgacagtaaagggaaaggaaaagaaatgatgtcagacgatcaggatgcttatgatctgatcatgaaaaataaagaactgcttttggagtgtgacccgaaacagtctcctgttcgattcattttttctcattcagcacttcgggaaggatgggataatccgaatgtatttcagatttgtacgttaaaaaacggaggaagcgaagtacgaaaacggcaggaagtcggaagagggcttcgtctgtgtgtcaatggagacggacagagaatggacagaagttttctggggcaggacgttcacagagtgaatacgttgaccgtgatcgcaagcgaaagctatgaaagttttgtgaagggcctgcaaagtgaaattgcagaagatgttttcggtaaacagagtcggaaggccgacgtctgtcgcgatatagaagtaatcatacccgagaatgcaagaagccgtcgagtagaactaaaagtcgatcaggaaaagctaaatggagaagaattcagcgcattgtggtcaaatatttgcctgaaatcgacatataccgtaaattttgatacggaaaaattagtagaagatgcggtgaaaatattaaacagagaactgcatatacaagatgtgcgatttaaaggcaagaatgaggcggcaaaaagcgtcgtgaaatatgatcttgcggggaaacttgccgatatgacagggctgaaaaggaaaacagtgatcgaaatattgagcagagtcgaaagttctgtttttcaacagtttcaagaaagtccggaagaatttatcgctcaggcagaaagattgatcttaaatgtgaaagaaacagcgatttcggaaaatatcatatatcatacgtcagacgaaaaatatacaaaagatatttttacacagcagacgattcagggaaaacagggagtggacgcaatgaaagtcgggaagcatttgtatgattatgtgaaataccgatccggcgcagaaaaggaatttatcgaacggctggaagcatcaaaagaggttgcggtatatgtaaaacttccggaacaattttatatctccactcctgcaggacgttatatgccggaatgggcgatcgctttgtaccgggaaacgaaaggaaaacgtttctttgttgttgggaaaaaagccggaaaagataaagactctaatcagtcaaaaatagcggaaaacatcaagatatgctgcgcctctaagcacttaacggagatcagcgcaggaaaggtcgtttttaaaacgacggaggaatacacggattttatggatttatcgcatttcatcaaaaattgtcaatatacaagaaatagtgtcaaataaccttattattctatatttgtatatatcaaaagcaatatttcgctttgtaaaagaaactttgctaagatgtaaaggagttttgatagatttctaacggaaaaaataagataatgatgtctgaaaggaggacagatttgaaatgaatataggagaacaaataaacaatctgcgcaaacaacatggtttaagtcaagatgattttgcaaatttatttaatgtttccagacagactatttctaattgggagaatggtaaaagttatccggatttagagatgattataaaagtaagtgattatttcaaaatctctattgatgaattattaaaaaatgatgttcagactgtaaaaaaaattgataatgaaaaaaaggcaaaaaagaagtatcttatactattgctagttttatgttttttaggaactgttattatctggggattatacagtaaatatcaagatagcatagaagttgatttcacaatggaaaagcatgaaacttataaaagcaatgaaacaaaagaaccgtctatgaatattgcaaacggatatttttcagtccctaaagacgaaaaacttgatatacaagtaaaagggactgttgacaacggtaaacttcatattaccattgcagataaagacaataagatttattatcaattagatggtcaagagttgaatgatttacaaactttatattttgaaaaaggttcctatattattcaaatcgttgctgatgattatacagaagacattataagtcttaactataatgttaaaatagaaaattaacggtaaatcttaacgggaaatcatcagtcataataaaatgaaaaaaattatttcgggaagtacattaaaaatactggcaatgatttttatggtaatagaccattttggtcaagtggtgttaaaaaatggaattatcctacatgctccatattctatgtttacagatgagcagttcgatatgttaatgtccacagttaatatttgtcatattttaggcagaattgcattccctgtcttctgttttttgttagtagagggattttttcatacacataatctcaagaaatatattttaaacttaggaatttttgcacttatttccgagcctgtttatgatttagcttgtgcaggaactttattcagtttgggacagcaaaatgtgctatttacgctgttattagggttgatcatcttaacaattataaaaagatcccacaaaaatgtaataatctcttttgcagcaatagtagtcggggcgtacatttcatatatttgcaatttagacgggtggtattatggaatagccttaatcagtgtattttatcttttttatgatatgccagcattaaaatatactgcttctattttagttatgtatatttgtggattgaattttacaataagtggatttattgacccttattttttaactgctgcaacatctttattgtttatttcaatgtataatggtgagcgtggaatgaaaatgaaatatttcttctatattttttatcctggccatttgttcatattttatcttgtaagtttaatactttgaccatactgatagcgactggtgcttgtgtaccggtcgtttttctgtattccgttgtcgatataaaattaatcgtcagtcggtgagtaggtcggcatatagtggctcagcatggcaacttttggttcgtagctgacaaggattgaaaatgagattataagactagataatatggtgttaaatgcttgataccataaaaagaaaaattggtgtcaaattggtgtcaaaacagaaaaaatcacaatttcaaaagaaataagatactgcgaaccattgattttaaagggtttgcaaaaaaataacaaaaatattagcactcaacccttgacagtgctaacaacagatgctatattcctagtagaacacgaaaataaaggagggattagcatgaatataaacagatttacacagaattccattcaggcggtgcaaaattgtgagaagatcgccgcagataacggaaatcaggaattggcgcaggaacatttattgtatgcgctgcttacacaagatgacagtctgatcttaaaattgtttgaaaagatgaatatacaaggtcagcttttgataaaccgggtagatcaggcgatcggaaagcgtccgaaagttcagggcggtcagcttttcgtagggcaggatctgaacaatgtgttgatccatgccgaggacgaggcgaaacagatgggagacgaatatgtttccgtagagcaccttttcctttccctgttaaaatatgcaagcaaagagatgaaacagatttatcgtgaattcggcatcagccgggaaggatttttacatgcgctgtctactgtcagaggcaatcagagagtgacaagcgaccatccggaagcgacttatgatacgctgaataagtacggtcaggatctggtagagcgggcgagggatcaaaaacttgatccggtgatcggccgtgacgaggaaatcagaaatgtgatccggattctttcccgtaagacgaaaaacaatccggtgcttatcggtgaaccgggagtcggaaaaactgcggttgtagaaggtcttgcgcagaggatcgtcaacggtgatgtccccgaaggactgaaagataaaacgatattttctcttgatatgggtgctcttgtcgcaggagcaaagtaccggggcgagtttgaagaacgactgaaagcagttctcgaagaagtgaaaaacagtgacggaaagatcattctgtttattgatgagctgcatacgattgtcggagcgggaaagacagacggtgctatggatgcgggcaatatgttgaaaccgatgcttgcaagaggagaacttcactgtatcggcgcaacgacgcttgatgagtaccgtcagtacattgagaaagatgcggctttggaacgccgtttccagccggttttagttgacgagcctacagtagaagacgccatttcgattctgcgtggtctgaaagaacgttatgaagtatttcatggagtgaagattacagacagcgctcttgtcgcagcggcaatgttgtcgaacagatatatttcggatcgttttttgccggacaaagcgatagaccttgtagatgaagcttgtgcgctcattaagacagaacttgattcgatgccgacagagttggacgaattaagaagaaggattatgcagcttgagattgaagaagaggcgctgaaaaaagaagaagacagattaagccgtgaacgtctggaacatttacaggaagaactggcgggtctgaaagaagaatatgccggtgaaaaggtacagtgggagaatgaaaagcattctgttgagcgggtacagaaaattcgtgaagagatcgaacatgtgaataaggagatcagcaaagcgcaaagagagtatgatctgaataaagccgcgcagctgcagtatggtgaactgcctcagctgcaaaaacagcttgaagaagaggaagaaaaagtaagagaaaaagaattgtctcttgttcatgaagcggtaacagacgaagaaatcgcaaggattgtttcaagatggacgggaattcccgtagcgaaattaaatgaaagcgaaagaaacaaaacacttcatcttgctgatgaacttcataaaagagtcataggtcaggatgaaggagtcgaacttgtaacagaggcgatcatccgttccaaagccggaatcaaagacccgagcaagccgatcggatcgttcctcttcctcggacctacaggcgtgggaaaaacagaacttgcgaaggcgttggcgcagagcctgtttgacgatgagaataatatggtgcggattgatatgagcgaatacatggagaaatattccgtgtcgagactgatcggagcgcctccgggatatgtaggatatgacgaaggcggtcaactgacagaggcagtcagaagaaaaccgtattcagtcgtattatttgacgaagtagagaaggcgcatccggatgtatttaacgtgcttttgcaagtgcttgacgatggaaggattacagattctcagggccgtaccgttgatttcaaaaatacgattctgatcatgacgtccaatatcggagcaggttatcttttagacggtataaaagaagacggttcgatctcgaaagaggcgcaggatatggcgatgaatgatttaagagctcacttcagaccggaatttttgaaccgtcttgacgagatcattatgtttaaaccattgacgaaagaaaatattcgtgccattattgacttgttagtggcagatgtaaacagacggctggaggaaaaagaactgacgatcgaactgacggaagcggcgaaagactgtatcgtagaaggcggatatgatccgatgtacggagcaagaccgttaaagagatatctgcagaaaaacgtagagacactggctgcacggttgattcttgccggaaatgtcggaagagaagacacgatactgatcgatgcgaaagacggcaaactgaaagcagatgtgaagcgggtaaacagcttggaaagacaggaagcataagtaagatatgcaaaaaagcgagaagaaaagagtctgcatgaagccggtgtgtgaaaggatggcgcaagtgacaccgataatctttcatattgatgtaaactcagcttatttgagctggacggctgtagaacaattaaaaaacggggcgaaagtggatattcgggagatcccggcaattatcggcggggatcagacatcccggcacggtgttgttctcgcaaaatccacttttgccaaaaaatatggcatccgcacgggagaacctgttgcgaatgcctttcgtaagtgtccgaatctcgtaatgtatccgcctgatcatcggatgtaccgcgagaagagcagacagatgatggaatatttaaagacattcacgaaagagatagagcaggtcagcgtagacgagtgttatatggattttacgaagatcgccgcgcggtacagttctccgatcgacggagcgcttgagattaaggaagggattaaaaagaagtttggatttacggtaaatgtcggaatctcaacgaataaattactggcgaaaatggcgtcagattttgaaaagccggaccggatacacacattatttccggaagagattgaagtgaaaatgtggccgcttccgatcaaagatctgtatatggcaggaaaatccagtgtgcaggtattgaaaaaactggagattaatacaatcggagcattggcgcaggcagatcccgatctgatctcacttcatttgaaaagtcatggacggatgttgtgggagtttgccaacggaatcggtacgtcgaccgttcagtctgagccggaagaagcgaaagggatcgggaattccacaacgcttagggaagatgcacggacaatggaggaagtttgtccggtgtttgaagaattggctcaaagcgtcggaagacgtctgaaaaaagccgggaaaaaggcaggaatggtaagtgcggaaattaaatactatgattttcgtacattatctcatcagatgcagttggaaaagccgtcaaacgaaagcgatataatatgcaaggcggcagtcaatctgtttcgggaagtgtggaccggagaaccggtgcgtctgctgggaatcagaacgtcaaaattgtcggatgaaaacgaaccggagcagttgacgatcttcgatatgaaaccggaagcagagccggacgaaaaacataaacggcttagaaaggcgatggacgaactgaataaaaaatacggagaaggagcagttattaaagcgagtcttatgccgaagaaaaaataaatatcaaaatcttgttcaaaaaatctttagaatttcttttgaatcttatgtcagccccctttagatttacaggatatcctgtagatagttaaaggaggctgatttttttatgagcatatctgaacttaccgattattttttacgatacggagcattttttatttatttgatcgtgcttttagaatatttgaatctccccggatttccggcaggagttattatgccgctggcgggaatatgggcggcgaaaggtgaaataagttttcctatggtcatggttctgactgtatttgcgggacttaccggaagctgggcgctgtatcttctcggaagattcggcggcgggaaggtgatggaattttattttaagaaattcccgaaacatcggccggtgattgaagaaaaaatggcgtttttaagagaaaaaggaggaacaggggtatttgtaagcaagcttcttccgatggtgcgcacgctgatctctattccggcaggaatggtaaaaatgaattttacaaaatatacggttagctccgcatgcggaatcttcctgtggaatctggcgtttgtaggcgcgggatatttcttcggagatgcggcgatcaatttctttacataaatttatgcataatttttcacataattttttatatcatttgaaaaatgagagtttatttaataattgttatccgaaaaagttattaaaaataaggcgagagaattcagacaagggggaaaagacatgagaatcgcaatgttgacaaacaattacagaccatttgtaggaggagtgccgatctcggtagagcgtcaggcagaagaattgataaaattagggcatcaggtaacggtgtttgcaccgatgtacggggaaacacaagaagaaagagaggcagttctggcagccgatgtttctgctcccgagcaggttgtacgctacggaacgcagaaacgtaagatggataatgggatggtatatccgagtttttatccgtctgagatcatggaagcatttgaaagagacgaatttgactgtatccatgtacatcatccgatgttcgtaggaccgtgcgctctctatctgaaacgaaaatacagactgccgcttatctatacatatcatacgagatatgaagattatctgcactatataccgggactgcgagttgatgagaagagctttgtattaaaaaagaaggcgatcggactgatcaggacaaagatcataccaacttatatgagctggtttgcaaatcagtgcgatctcgtacttgctccgtcggcaggaatgcagaagatattgtgggaatatggtatgagaagcagatccgccgtatttccgaccggacttgaaaagtcgttttttgcgatggatgagcagaaggcaaaagagatcaggaagacgtataagggagataaaaaacatttatttgtcactgtatccagacttgagaaagagaaaaattatgaatttatccttcggggaatcgcgaagatcaaagaagaagccggggatgactttcatgtgatgatacttggagacggaagtcagaagggagaattaaaaacgaaagccgctcttttagggatcggaaatcttgtgacttttgtaggaaacgtgaagaatgaagatgtaaaacattatgtacatgcggcagatctgtttttatttgcatcaaaatcagagacacagggaatcgttctggcagaagcgatggcagcaggaactccggtagttgcggttcacgcggtcggatcggacgatattgtcaaagacggagtaaacggatttttgacagaagaagaggaaagcaggtgggcggagaaagtcattgaagcagcacagccggagaaccggtttaaaatgaaaaaagcggctttgaaagaagcacaaaattatcgttccgacacacttgccttatatgaagagatgctctacaatcaatgtatctgcggaaaagcaatggatcggcaaaaagacggaaaaggagaatattcttatgaaaacggagaagctcacggagaaggcgctgcgatggctgttcacaaaatatctcacattgcttgaaaagacagtaaaaataaactggcatgaagaaaatgaatacggtgaaagtcagatattcggattttggcatgaggacagcttttttatgaatctcgtgcttgagcgtctggcggataagacaacacctgtagatgtgattgttacagccgatacacggggaaattatattgaacatatgataaagcgatgcggcggaaacgcgcttcgcgttcctgacgggtataaggcgttcggggcgttaaaaaacatcgtccgcgattcttatgagaaggcacattcgatcgccgttgcgttagacggaccgctcggtccgcggcacgagccgaaaaaactggcattttacttgtcggaacatgcagaagaagcatttgtaggcattagcctttcttattcttcatgtatcaggctgactcgcagatgggataaatatgtaattccgcttccgtttacaacagtggacgttgcggtaaaagattatgggatcgttcagaagaaggcgattccgaatcttccggtcaatgcagatgcagcgtcggaagaaatatatgttgcgcagacaatataaacatttctcttttgcaaaaagaagagataggataaaaaatacggggaatgacggaaaaggagagggcataagcaatggaaatcaatcatgttttgatcgtagaggatgataaggaaatcagggaaggcgtacagatctatctgcaaagtcaggggtatgtcgtatttcaggcagcagatggaattgaaggtttagaaatacttgaaaaagaggagatccatctggcgatcatagatattatgatgccgcgtatggacgggatacgcatgacgatgaaactaagggagaaatacgattttccggttatcatgttatctgccaaatccgaggaggtcgataagatcacaggtcttaatatcggggcggatgattatgtgacgaaaccgtttactccgatggaactgatggcgcgagtgaattcccagttacgaagataccggaagtttcttgaaaaattagcacctcaggaaaatacgcatgtgatcggcgggcttgagatcaatgaagatatggtagaagtgtctatggacggaaatcctgtgaagctgacgccgatcgagtacaagatccttttattgcttgccaagaatccgggaagagttttttcggcagaagagatttatgagcgggtttggcaggaaaaagcgatcaatacagatacgattatggtgcatgtaagaaatattcgggagaagatcgagatcgacccgaaaaatccaaaatatttgaaggtggtgtggggcgttggatacaaaatcgaaaaacagccgtaaatttggaattcttattctgatcttgcttttggcggcaagttccgcagttatgatgctgcaatacggaacgatcagacggcagatagaatcggtgcaggaggagggctcccgatcgggagaaacggcggcggatatggcgaatacgctggcggaaggcaattatcttctttataatcggtatgtacgggacactgatccggcggaagtactttctctttacggacagcaaaggtttgatctggcagaaaaatatttagattatgagctgatcgacagtaaagatgaggtgatagcttctgatctgccggaagaagaacaggagaagctgcatgaagacggaaaagagtatgccttccgtgtgaaatatattttttccgaaaacggagatttggaggatatccagatcggcggaacggcattcggagcagaagaggcatacaatatggaatcgatctatattaacgaggttgaaagcgtcgagtcttacgggcagatatcaagcattacaacgcttacggatgttacgttcatttacgggataacagaagaaaatctggaagcttatgggaatatcattgcttcggaaaacggagaatatctcgagtattacaatatcagctatacaacggctttcagagatacgcttgaaatgttgagcgtgctgctgatcgcggcggcgattcttatgccgtttgtaaaatgtctcgacttaagcgagatgaaagtattccgtgcatcctttgaagtggcaggtgcgggagctttatttttcgctttcggcggttttgatataatggcttatgttgtttatcatacggtgaaaggaagatctcttccggcaggattcgagccggctttgcttgtggcgaatttcctgctttggatgtttatgttcgggatacttttctggtgcgttacatcgcttcgggcaatgttccgcatgaagaaagcgtattggacggaaaggacgctgacggcaaagatgttaagaaagatgaagaataaaggagaagaaagcggaggaaagatacaaaagaaagtgaaaagtatcgggagaaagatcagaaacttttttgcccggcagtatgacgctttgcttcatcttgattttcaggataaaacgaaccggacgatccttcgcgtagtgctgatcaactttgcgattctgtttgtcgtatgtcttttttggtggtacggtacggtcgcgttgatcgtttattcggtgatgctgtttatgtttttgaaaaaatatacgcaggatctttctgaaaaatatgctcttttgctcaagtcaacgaatcagcttgcagaaggtcatttggatattccgatcgaaggcgatgtcggtctgttcaatccgatccaggaagaattaaagcggattcaaaaaggatttaaaaaagcagtagatgaagaagtgaaaaacgagcggatgaagacagaactcgtcacgaacgtctcccatgatcttaggacgccgctgacagcgatcatcacatatacagatctgttgaaaaatgagaaagacgaagaaaagagaaaagaatatatcagcgttctggaaagaaagtctcttcgtttgaaagtgttgatcgaagatttattcgagatcagcaaggcggcaagcaaaagtgtcgttatgcattttatgaaagttgatatcgtaggattatttaagcaggttgagctggaaaatgttgaaaaaatcaaagcggcgaatttggaattcagaacaaagattccggaacaaaaagttgtcatgtggcttgacagtgagaaaacatatcggatttttgagaatcttatcgtgaatatcacgaagtatgcaatgcctcatacgagagtttatattgatatgacagagacggaagacggagtgcatattacaatgaagaatgtttctgcggcagaattgaactttaacgcagatgagattacggatcggtttgtccgcggagattcggcaagaaacaccgaaggatcgggacttggtctggcgattgcaaagagctttgccgaattgcagcacggttctttgaagatttcgacagaggcagatctctttaaagcagacttgtatttaccgaaatcaaaggaaatgcccgaaaaacccgggggggggtatcctgaaaatttataaatgtaacggatatgtaaataatgccgggagagtagtgactcttccggtattttatgataatctgtggatagaaaacagagtcggtataaagagagacagaataagaaaaatatgctggcataaagaatgggaaaagggaggaaaagaagatgaaatatgagattaaaggcggagaacttccggtagtagtctgctttatggacgcaggagaagcgatgattacagaaaaaggctctatgagctggatgtcaccgaacatgaagatggaaacgacgtcaaacggcggggtcggaaaagcgctcggaagaatgttcgcaggagaggcgattttccagaaccgttatacagcggaaggcggtccggggatgatcgcgtttgcatccagttttccgggacagatcagaccttgggagatcgctccgggaaaagagatagttgtgcaaaaagcaggttttctggcggcgcaggaaagcgttgaattatcgatctttttccagaaaaaattaggttccggtctgttcggcggagaaggatttatcatgcagaaaatttcgggacatggtctggcgtttcttgaatttgacggatctgtcatagagtatgtactccagccgggacaacagatcgtagtcgatacaggttaccttgccgctatggaggcgacatgcaatatggagattcgcacagtgcccggaatcaaaaacatgatgttcggaggcgaaggtctgtttaatacggtaattacaggaccgggacgggtatggcttcagacaatgccgatttcaaatgtggcaggcgctatcatgaaagttttcccggcaagataaatataatagcatgctatataataaaaacagcagtctggcaggatcggatattgataccgatcctgccagactgctaaaaaagaagaatttttttgcagatcgtattgcacgtcacgtttaatctaaaaacatctttgaccccatccattgtctcatatgttcgatcattttcctgtcaggttcgatatatacgcatgagtttttctgatcgagagaaatcataatggcatagacgtcggcattttcatttcctgaagtgaaatcatatgttttgtcaggatggaaagcgttcagccgcggagattttttcggagcaatgatctcggcagactgaatatcaaaactgagcatatgttttcttttggacttgttgtaaatggcatcgatctgaagatcatggtttaagatcatatattcatattccacattgagctttggaaagataaaataaaaagcgatcatcaggatcaaaactgcgataagaaatgacagaaaaccgaccagaggcattcctaaaacagcaacagcgactgcaagaacgatgataagtatgctgatgagaatgccggaagttttttgtttgcggggtacgagttgttcatataatgcgtcattcatagttatttgtttcctttcaagtaatttatgaccatcatagcgatcttaaatgtcatggcgtcgtcaaagagacgaagatccagacctgtctgtttttcaatctgttccagacggtagataagagtgtttctgtgcatatggagttgtctggcggtttcggcaatgtttaagttgtttaaaaagaaacggttgactgttgccataagttcggggtcaagcgttttcggtataggagaaccgaatatttcagacagaaagttctcgcacagtgaaacaggaagacgatagatcagtctgccgatcccgagttcgttatacgggaaaatattttgttctgaataaaagagccttccgactttcaacgcaagattcgtttcctgaaaagctttttgaatatcggcaagcgtgttcattacagaactgtatgagaggcggacacggataagcgcctcggtattgagcgtatcaacgatcgtctccgcaatatgtctcatatcttcaaacgtctcgttttggcaaagcggacgtatgactgcaagcagcgtttccgtaaggggaacgatataagtttttgaacggcaggacagtagatttttcaatattgcgcctgaagtttcatcaaagtgttttccttctataaggaaaagaattcgtttttcctccggatcaatgtgaagtctcgatgcccgatcggaaatttcatagtgcgggatattcccggtcatcagtccctgcagaaaatcagtgcggttatatttttctttgtaagctgtgcaaagacagtggatctgtgtcagcgcaggttcgatctgttcaggcgctgcaccggatacctcaagcgagattccggtaattttttttaattcaagcagagctttgtttagttcattcatctgtgctgtagtttctgttttgcggtttgtagtctgttcagtattttctcccatagattaacctcgttttgaataaagaggccgcacctgtaataagtgcagccccctttaaattcttattataagcagtattgtcagaaatgagatcctgatcaaaccgggcgttctgacactatgtaactgctgttttgattttaaatcattagtttgtaatcgtcaactcggtttctttgtcaaatacgtgaattttttccatatcaagcgcgaatacggctttatcgcctgtacgcagtgtcgtacgaggatttacacgagctgtcatctgtgttccttccacgtcaaagtaaaggaatacttcagcgccgagcaattcgtatactttgatctcagattcaataatgctgtccggtgaattgctgataaatgcctgagaatcatgtacgtcttcaggacggatgccgagaacaactgtttttccgtcatagtttccgttgataagagcctgtttcttggaagcaggaacttttaatacatgttttcctacagtcaatgttacatcatcaccttttacagagcatacggcatccataaagttcatctgaggagatccgataaatcctgcaacgaacaggttgcacggtgtattgtaaaggttctgcggtgtatcgacctgctgaacgactccgtctttcataacgacgattctcgttccgagagtcatggcttctgtctggtcatgtgttacatagatgatcgttgcgccgaggttttcgtgaagttttgaaatctcgatacgcatctggactctcagttttgcgtcaaggttggaaagaggttcgtccataaggaatactttcggattacgaacaatggcacgtcccatggcaacacgctgtctttgtcctcccgaaagagccttcggcttccggtcgagcagtttgtcaaggtcaaggattcttgccgcttcacggacttttttgtcgatttctgctttcggtactttacgaagtttcagaccaaacgccatattatcatatactgtcatgtgcggatacaatgcgtagttctggaataccattgcgatatcacggtctttcggttctacgtcgttcataacttttccgtcgattttgaatactccgtcggaaatatcttccaaacctgcgatcatacgaagtgttgtagatttaccgcatccggacggaccgacgaagatgatgaattctttatctgcgatttcgaggttgaaatcttttactgcatggaatccgttcggataaattttctgaacgcctttaagtgataaacttgccattttatgttcctcctaaaaataaacttgtttttctggatttttcttatgagataagtataaccgtaagccagaaacagaacaatgtcatgagtgactaaaaaaagcggcggaaagtgtacatgttgacgaaaaatgagaaatcagatacaatagcactgttataagcgatgaaaacagtaaagaaaagaggaataaaattatggcaaatccaatcgttacatttgagatggaaaacggcgatatcatgaaagcggagctttatcccgagattgcgccgaatacggtaaataactttatttcattgattaataaaggattttacgacggtctgatctttcaccgtgtgatccgcggatttatgatccagggcggatgtccgaacggaaacggaatgggtggtccgggatacgcgatcaaaggcgagtttgcacagaacggtttccaaaacgatcttgcacatgatccgggagttctttccatggctcgtgcaatgcatcctgattctgcgggaagccagttttttatcatgcatgaaaaatcaccgcatctggacggcgcttatgcggcgtttggaaagatcacggaaggaatggatattgtaaataagatcgcagaaaccgcaacagattacagcgatcgtccgcttgaagagcagagaatgaaaaaggtgactgtagaattgttcggagaaacatatgacgaaccggagacagtataagctgtaaaggcaaaaaagaaaagtaaagatgctgacatattccccttaggcaggcaaggaaacgaaaacctgtttaaggggattgttatgtcacagtatttacagccgatattccataatgtaatcatccatgaaaaagccgtttccgatatcatttttctgagcgtcgatcgtctgaaaaccaaagtgacggtatacgttcagagagtgatcgttgtgcttattacatgtcagccaaatggcggaacaatttcgctgccgacataaattttttagaaaatcaaacaaaaatgcggctaaatgtctgccgcggtattgtttggcaatgtacagtttgctcaaaaacatccttccgtcctgatcctgcctgatcgccatatatccgcacagttttcggttgccgagaagccggtagtattcgtatccggtaagaacctgatcttgtaaagccggataagactgaaaacgtgacagcatatattctacctgctctttgccgatgatcggcgtgaaatgttcatgccagatcacatctgccaaagcggcgatctcttgaagatcctcgttagtttctgccttgcggattgtaaacggttgatccgttcgattgtctgaagatgtctgatccatgagaaatattcccccttctttttttatcaaatattatagtacaaataacatattttccgcaactttctaaaaataatattaattattagcactcaacacaaaagagtgctgattttctattgacttttaaatattgccgtactagaatgtctgttagacataaaaaacagatcgcatgaagccgatgtatataaagtataccgggagatgcgtaagtcataaaatcaaaaaaagataaggagtgtttacaatggcagtgaaaaaaggaacattatcgatcgacagcgaaaatatatttccgattataaagaaatgggtgtattcggatcatgatatttttgtgagggaacttatatcaaatggctgcgatgcggttacgaagctgaaaaagcttgatatgatgggagaatatgaacttcccgaagattataaggcaaagatcgaagtaattgtcaatccggaagaaaagacaatgaaatttatcgataacggtcttggtatgacagccgaagaggtagaagagtacattacgcagatcgcattttcgggagcgacacagtttcttgaaaaatataaagataaaacgacagaagacgatatgatcggtcatttcggacttggattttattctgcgtttatggtggcggatgaagttcagatcgacacattgtcttataaagaaggcgcatctgccgtacactgggcaagtcagggaggtacggaatatgagatgcaggaaggaaataaagagacggtcggaacagagatcacactgtttttaaatgaagacagtcttgcgtttgcaaatgaataccgcgcaagagaagtgattgaaaaatattgttcttttatgcctgttgaaatcttcctttccaaagcaaatgcgcagccggagtatgaaacgatcgatgaggaggatgtgcttgacacagacgaagtcgtagagcatattacggaagaagtaaaagaaggcgaagaaggagaaccgaaaaagaaagcgaagatcgtgaaacgccctgtttctttgagcgatactcatccgctgtggagcaagagtccgagcgagtgcacaaaggaagaatacattgatttttaccgcaaagtgttcatggattataaagagcctttgttctggatccatttgaatatggattacccgtttaacttaaaaggaattttgtattttccgaagatcaatacggaatatgaatctatcgaaggaacgatcaagctgtacaacaatcaagtttttatcgcggacaatatcaaggaagtgattccggagttccttatggttctcaaaggtgtgatcgactgtccggatctgccgcttaatgtatcaagaagcgccctgcaaaacgatggattcgtcaataaagttgccgattacatttctaagaaagtggcggataagctgacgggaatgtttaagacagacagagagaattatgagaaatactgggatgacatcagtccgtttatcaaattcggatgtctgaaagatgaaaaattcggcgagaagatgaaagattcgatgatctacaaaaacctggatcacaaatatctgacattagaagatattataaatgaaagtaaagctgcaggaacagaagaagagacagccgaagaggcggcagcggaaacagatgtgcagacagatacggacgatcaggataaagagcctgagaaaacgtcggtttactatgtgacagacgaagttcagcagagccaatacatcaatatgttcaaggcacagggacaagacgcgatcgtactgacacataatattgattctgcgtttgtgacttatctggaacagaaacatgaagacgtcagatttttaagaatcgatgccgatgtacatgagtctttgaaagatgaagttgcagaagacgagaaagaatctttcggaaaaatggcagacagtctcgtggaaatcttccgaaaagaactaaatgacgataagctcgatgtgaaagtggaaaagcttaaagacgataaagtggcgtctatggctgttttgtcagaagaaaaccgccgtatggaagagatgatgaagatgtacggtatgagcggaatggattcggctatgttcggcagcaaggcgacacttgtactcaacgcaaaccatccgcttgtgaagttcctgacagagaacaaagaaagcgagaatgtaactgtcatctgtaaacagctttatgatcttgcaatgcttgctcataagcctttaagcccggaagaaatgacggcgtttgtacaaagaagcaacgagatcatgcttttactcacaaaataaaatgataatgataaaggcagcctgtatagttttttatacaggctgctaaattaaaaccgttttttatttctgtcaatttagtaattcaaaatcaatcccttttttcttaaagaaattttcagtcatttcatcccatgcatgttctaatgttttatccatcgtaaaagtcttgaaggaagttccggtaatacatgtcaatgtttctccgttgtagcggatgttcagatagagtccctgcacagcgtccgcctgaacggaaagatcgttttgcaagaggagcgtttcgatgttcttcggagcaaggctgaatacgaattggaaggcaagaggagtccgttttcctttgatgagggaaaagcagaagtttcttacatttttccaataagagtattcgggaaggacggagttagagtcaaagaactcttttttgataaagccgtcaatgtgaaatgtattgaatgttgtgatctctccttcgataaatgaaaaatgatcaaatgtttcatttaacagaaggtgcgacatgaaatcttttatatttgtcaatgaaaatgcgatcatggaaagactccttatcattgtatatttgttcattttacctgccatgtttttgatatgacagggtcatactgattgtaccacgaaacggatgtgccgtcattgactttttaatctaaaaaaagtattattatcttgggttatttttatttgtaaaataaaatgagtattataatggggaaacaatataaatgaagaaaataaaacagaaaacaaaaaggaagatcgttcttgcggtatgtgttcttgcggcagcgcttgtcattgtgctgatcgtgcagggcgtgcggggacttttttataagaaagcggacacatcggcaggactggaatatattcacggagaagaaaaaggagatattgcggcgattgagaaaaaaatcgaactgcttgaaaaaaaagacggagaagaaggcgccggggaacggagtctgaaagaaaagtttacgggcgcggttatcgtgggagactctattacggaaggatttacagaatatgacattttgaacacatccagcgttgtagcaaagatcggagtacatttggatgagttggacgagcagatcaaacaggtgaaaaaattaagtcccgggatcatatttttgtctctcggaatgaatgatgtcgagcatacaaacggtgatgcggacgagtttgtcaaacaatacggagcagttgtggatgaactgaaaaagagcgtgccgggagcgcatatttttgtgaacgcaatttttccggtgcaggaaaaggcagtgaaagaaaagcctgtttttgcagaaatagaaaatttcaacgagaaactaaaagagttatgtgataaaaagcggatagcgtttatcgacagttcggatcttatgtctgacgaatattatgagcaggacggcatacattttaaggcgtctttctatccggtctgggctgaaaaaatggcggaggtggcaggcttatgagtcagtggaagaaaataactatccgggtgatgcgctatgtgacattgcttctgatcgtcggattcgttgcacttcttttgatctatacaagcggcagcaatcgcccttttgagaaagtggagaagtctgtggaagcatctcttgataaggaaaatatgaagcgtcaggacgggacggcattaaaacgtaactttggactgaatgcggcagattatgacggcgttatgtattattcgtcggaatttagtatttcatctgaagaagttcttcttattaaagcaaaaagtgaaacgcagaccgcggaaatttcaagtgcgatcgaagaacggatcaaaacaaggatgaatgattttgaggggtatgcgccggaatcggtgcagttattggaagatgcaaagaaaagcgtgcgcggtaaatatgtattttttgccgctgcgccgggagcagaaaaatatttagaaatatttaacaacagtttataaatcgggagagggaacaggcggatgttatttagcagtatcacatttttgtttatgtttctgccaatcgtaatggcagtgtattatctcgttccgaacggggcgaaaaatatcgtcttgcttttggcgagtctgtttttttacgcatggggagagccggtctatgtcgtgctcatgatcttatccatcgtattaaactatttttgcggacgggatatcgaggcaaatgcagacaatccgaaaaaggcaaagctaagtcttgtgtttgctcttacggcaaatattctcatacttggattttttaaatattatggctttttgcttgatacagttaattcctttcttacgacggacattccttacagagtgctccctctgccgatcggaatctcattctatacgtttcaggcgatctcatatgtgatcgatatctatcggaaagacgcgaagccgcagaagaatattttatactttgcgctttatatcagtatgttcccgcagttgatcgcaggtccgatcgtccgttacgcggatattgaagaacagttgaaaatgcggaaagtcacgcttcgtaaactggggcaaggttcgatgtattttatcatcggtctggcgaaaaaagtgatcatcgcaaattcaacgggggcggtgtttgaagaagtcgccgcgatgtcaaccggaagtttatctgtcttaactgcatgggtcggcgtattttcttatgcgttccagatatattttgacttcagcggatattcggatatggcgatcggcctcggaaaaatgttcggatttgaatttaagaaaaattttgaccatccgtatgtatcgaaaagcgcaacggaattttggagaaggtggcatatttctcttggaacgtggtttagagagtatgtatatattcctctcggcggcaatcgatgttcggtttcgagaaatatatttaacctgatggttgtctggacactgaccggaatgtggcacggggcggcatggaactttgtcgcatggggcgtatattacggcgtgatccttgtgatggaaaagtatgtgtggggtgcttccgtcgaacagcttccgaaaccggtccagcatatttatgcaggcgcagtcatccttgtaggctgggtattcttctttagtccgagtcttgggtatgctctgcggtatctttgggcgatgatcggaggaggatcgggaatagcggatgcgcaaggcgcatttcttctgtttactcactggcttttgtttgtcattgcggcggtgggaagtacagcttacggaagaaaactgctaaataacgcagttcgtttttccgccaaccgaacagtaagaatgacggtgggagccgttctctatattggaattttcttcctttcggtggcatttttggtgacagatacatttaatccatttttatatttcagattttaggggaatacttatgaacagcaggaaaagaaaaggtcagcttgagagtatgatcggaaaaatctttgtattaagtctttttctcattttacttgtgaatctgatcgttccgaacaaagaaaaatcagaagaagaaaacaggatgctggagacgaaaccgaaagcgtcggcagtttcgatcatttccggagattacatggaacaatgggaaaagtatgtaagcgatcagtttttcggacggaacttttggaggaagataaaagtaaacgcagataagatttcgggaacaaaaaaagaaaacggcgtgttcatcggaaaaagcggacaactattagaagatatcgcagttccggataaagagcagcttgaagcgaatatcaatgcggtgaaaaattttgcacagacatatgaaaacattccgacgacggtaatgcttgttccggatgcggcatgtattttgagcaatcgtcttcctgcatttgcgacagtggaagatcagcgtcagatgttcggtatggtagagcgtaatctgggcgatacggtcaactgggtagatactgtttctattatgaataaacataagtcagaaaagctgtactataaaacggatcatcactggacgactcagggagcgttttatatgttcaaagatacggcttcgctgttcgggatcaaaggagacgtatctgatgattatgtttcctatactgtgacagatgattttaacggtgttcttgcgtcaaaaagcggatgcggtctggatgaaaaagaaaaaatcgatatttacgcgccgacaaacggcgatgacgatgtaatcgtaaattatgtcaatgaaacgaaaaagacaacttctctttatgattcgtccaaactaaagacaagagataagtacggagtatttttaggcgggaatacatcagttatcgatataaagacagtgtctacgagccagaagagactgcttgtggtgaaagattcatttgcagactgctttattccgttcttaactcctcattacagagagatcgttgttgttgatccaagatattacagcggaacgatgcaggatattatggacacataccgcataacagatgcgttgatcttgtatagcggaaatacattttttacagacaataatataagtggagtgtttactggtgagtaatcggatcagagaagaatttttacaggcaaaagagtcggtaagactgaataaatacttaagcgaggcgggcgtttgttccagaagggaggcggaccgccttattgaaagcggtaaagtgacggtagacggagtgacggcgcagatggggatgcgcgttacggcggggcagattgtcaaagtcggaaaaaaaacagtgtcaaagcaagatgagatgatcgttttagctgtgaataagccgaaagggatcgtctgtaccgaagatcaaagagaacgcgacagtatcgttcgttttttgaactaccctgtgcgtgttacttatgcgggcagactggacaaagattcgcgcggacttctgcttatgacgaacaacggagatatcatcaatcagatgatgcgtgcggcaaaccgccatgaaaaagaatataaagttacggttgataaagagatcacggaacaatttataaaaaaaatgtcggaaggagttccgatccttgacacggtcacaagaccatgtacagtaaagaagatcgggaaatatactttttcgatcatcttgactcaggggctgaaccgccagatcagaaggatgtgtgcggcgttcggatatgaggtgaaagatcttgtccgtataaggattatgaatattcgtctcgggagtctgaaagaaggagcataccgaaaactgacggacgaagaactggaagaattgtatgagatgttgaaatgaccggtcaagataccgtaaagaaattaattgttggagaagaagatggaaaagaagaagaaaacgaaacggatgcgcgaacttgtcgaacttctgaataaagcgcgccgtgcttacgaacaggaaaacacggagatcatgagcaatttcgagtatgaccgtctttatgacgaactgttgtccttagaaaaagaactggaaacaacgcttgcctcaagcccgacggtcaatgtgggatatgaagttttgagcgagcttccgaaagagcgtcatgaaacgccgatgttgtcccttgataagacgaaagatgtagaacgattgagggaatttttgggagatcaacaggcggtgatctcatggaagatggatggtctgacgattgttctgacttatgaaaacggagttttgaaaaaagcggttacaaggggaaacggggagatcggagaagttgtgacgaacaacgcaaaagtatttcgtaatgttccgttatctattccgtttaaaggggagcttgtgcttcggggagaagctgttatttcttataaagattttgaaaagatcaatgaagaaatcggagatgccgatgcaaaatacaagaatccccgtaacttgtgcagcggatcggtccgccagttaaacaatgaagtgacggcgaagagaaatgtaaggttttatgcgttcacgcttgtgaaagctgacaatgtggattttgaaaattcaagagcatatcaactgaaatggctgcaggaacaaggattcgatgttgtagagcatcatctcgttacccgggataccgtcggtgatgaagttgcgtggtttgcagagcatattcgggaaaacgaagtgccgtcggacggacttgttcttatatatgatgatatttcttatgggcagtcacttggaacaacggcaaagtttccgcgagattcctttgcgtttaagtgggaggatgaagtgcgaaagacgacgatccgtgagattgaatggagtccgtccagaacaggactgatcaatcctgttgcgatctttgatcctgtagaattagaaggaacaacagtaagccgtgcaagcgttcataatatcagtattatggaggaactggaactggggatcggagatacggttacggtgtataaggcaaatatgatcatcccccagattgcggaaaatctgacgcgcagcggagtaagcgagattccgaaagaatgtcctgtctgtaaaaagccgacaaaaatatctatggaaaataatacgaaaacgctgtattgtatgaatccgaaatgtcaggcaaagcatgtgaagtcattcagtttgtttgcaagcagagacgctatgaatatcgaaggactgtccgaggcgactttggaaaaattcatcattaacgggtatgtcaaagattttacggatatcttccatcttgacagatatgaagcggaaataaagacgatggaaggatttggagaaaaatcttatgaaaatctgcgaaaaaggatagaaaatgcaagaaagacaacgcttccgaggctgatctacagtcttgggattccgaacatcggaatctcaaacgcaaaaatgatctgtcgtgcgctgggagaagatccaaaacgggtcatccgggcgacggaagaagaattaagcgcgatatcgggtgtgggaggagtgatagcaggtacatttgtcgaatattttaaagatacggcgcatgtagatgtttttgatcgtctcctcaaagaagtagaacttacgaaagaaacgtcagaagaagatcagaagtttgcgggagttaattttgtcattacaggcagcgtagagcattttgtaaatcgggcacaggtaaaagaagagattgaaaaacgaggcggcaaagtgacggggagcgtgacgtcaaagacaaattatctgattaacaacgataccggatcgggaacggcaaaaaacaaaaaagcacgggaacttggtattccgatcatttcggaagaagatttccttcaaatgatgaatgaatagaaaaaagcggattcgatttttacaaaaacttcatttgtacaatgaagtcaagtgtactataataaaaaaatacttgtaaaagaaagtggataaacacaatgtccatatagatgaaaacagtcagagaaagacgaggagaattatgtcagatcaggatttcattttagtagatgaggaagaaaaagagtccacaggggcagacgaggtggacaaagaagagaaaaaagaccatttggcagtaaagaaggaagaggaaaaagaaacggaaaaagacaacgatgatgatggatatgagaagatctgtctcatctgtcacagaccggaaagcgttgcgggaaagatgatcgagatgccgaatcatattacggtatgccgggattgtatgcaaagaagctttgatgcgatgacagacggctctgttgatctgagccggcttgtcaacatgccgggggtacagtttcttaatttatcggatttggatcatatgcagcctaaagcgcagaagatcaagaagaaaaaagaaaagccgaaagagttccatcaacttgatattaagaagattccggcgcctcataagatcaaagcaagacttgacgaatatgtagtcggacaggaaaaagcgaagaaagcgatggcagtcgccgtttataatcattataaacgggttgcgtcagatacaatggacgatatcgagattgaaaagtcgaatatgcttatgatcggaccgacgggaagcggaaagacgtatcttgtcaaaacattggcaaaacttcttgacgtgccgctcgccattacagacgctacgtcgctgacagaagcaggatatatcggagatgatatagaaagcgttgtttccaaactacttgccgctgccgacaacgatgtagaacgggcggagcagggaattatttttatcgatgaaatcgataagatcgcaaaaaaacatacgtcgaatcaaagagatgtaagcggggaatcagttcagcagggaatgctcaaacttttggaaggaagcgaagtggaagttcctgtcggagcgaacagcaagaacgcgatggttcctttgacaacggtcaatacgaaaaatattttgtttatttgtgccggcgcatttccggatctggaagatattataaaagagcgtcttacaaagaaaacgtctatgggatttaatgcagaactaaaagataagtatgagcatgacgaggacattttgtcgaaagtgacggtggaagatctgagaaaattcggtatgatcccggagttcctcggacgtatgccgatcatatttacattgaaaggtcttgataaagatatgcttgttaagatcttgaaagagccgagaaatgcgatcttaaaacagtatcagaagctgcttgcccttgatgaagtaagtctggtgtttgatgacggcgctcttgagacgattgcggaaaaagcaatggaaaaagataccggggcgagagcgcttcgggcgatcatcgaagagtttatgttggatattatgtatgaaatccccaaagatgacaacatcggggaagtgacgatcacaagagagtatattgaaggtacgggaggtcctgtcattaaactgcggggacagcagtcgatcgcgatgaaagaggatcattcgtaaaagagagagtaaaaccggaagatttggtcatagatcagagccttccggcttttcttttgattttctttagaaaaactttcaaacatatatattgaccattcatattatat

SEQ ID NO: 7627 - DNA, 70058 bp, Unknown
  gut microbiota DNA sequence
agcagaaaaacaggcggattacccgcctgctgttgacatgcaattttgtaactgttatatataaagcaagggcgaaaagctgattttgtttaagcctatcgcccattcttatcatagaagatcatatttacagacttttcttcatagtctccaagaaacaacattccggtttaaatatattctaatttttcaaaatattgcataaggatgtttgcgcaattttcaaccccaagttcggatgtgtcaagtatcatatggtaatcattgacgtctccccatgtttttcctgtatgttcataataataagaagctctttcttcatcagttgtttcgactctctcttttgcaccgttgtagtcgaggttttctttttccataattctgcgaatacggtcttctttgtcggcacacacgaaaatattcagtacgttcatcttgtcttttaaaatatcggatgcacagcggccgagaatgatgcacggatgctcggcgagcttcctgattgcttcagcttcgctctcatacatgcgatcgtttaactgttcctcaatataagccttgtcatataccggtatgtcgagacgtttggaaagttctgtggcaataatgctggcgcctgttccgaaacgacggctcatggtgattactaacttcataagaactcctcctttgtgacgtttaaaatttaatcaaatattattataacacttcttcggcgatttgtctgctgagagaatttaattcctcaagctgtgcttctttgagagaagattttattgtaacggaagcttctaaaagacgcatgtttttcatttctttgatctttgcggaaatcagttttgttgcctgaggagcccatgatccatttccaagcacggcaatcgtacgattttgcagggaaagagctttcatgtcttccaaataattgtccatcagaggataaatgccgttattatatgttggggaggcaagtacaatgtggctgtatttgaagctgtcggaaatcagttcggatacatgggtcttggaaatgttatgcatatgaatgttttttacgcctgcctctgccagcataacggcaaggatttctgccatattttcggtatttccgtacatggaagcataagcgatcataactcccttttcttccggttcatatcggctccaaagattgtatttttctataataaaattcagattacttctccagacaggaccgtggagcggacagatcatctgaatgtcaagagatgaggcttttttcaatacattttgaacttgcgggccgtattttccgacgatatttgtataataacggcgcgcttcatcaagccactctctgttaaaatcaagttcatcgttgaataaatttccgtttaatgcattaaatgtgccgaaagcatcggcagagaagagcactttatccttttcgtcataagtcatcattgcttcgggccagtgaaccattggggacataataaaacgaaacgtatgttttccggaacagaaagtatctccttctttgactgtgagtgttttccccgtcaggtcaaagctgaaaaattgttcgatcatcgggaatgtttttgcgtttccgataatctttacgtcgggatagtgaagaaggagttctccgataagagaacagtgatccggttccatgtgattgacaacgatatagtcaagattgcggccgttcagtacagacataacgttttctataaattgttttccgatcgcatagtcggctgtatcaaaaagaactgtctgttcatccaaaagaaggtatgagttgtaagagacacctttggcaagagggaaaatattttcaaacaattcaatctgacgatcgtttcccccgacccaatataagtcttctgttacttttctgaaacattgcattataagattcctcctaaatttaatatacaaaataaacaagtaagttgaatgttaaaaaatagtcgattatattctagcacaatagaaaaaaagcgcaatatttatgtgagtaaaaataagaaaaataagaattgtatctgcaggaaaaatgagatacactgttaaatagattcggctgtattcaaaatattataaaagaaaaaatcggtagatttttcaaagcaaaatgaaagaccggaaaaggtcagagtagcaaacgaaaggagaaagaaaatgttatttgtatgttatccgaaatgcagtacatgcatgaaagcaaaaaaatggctggaagaaaaagaaattgaatttgagcaaagagatatcaaagaagagaaaccaacagcggaagaactgaaaacgtggtggaggaaaagcggacttccgttgaagcgcttttttaatacgagtggaaaactttacaaagaaatgcagttaaaagacaggattccgaatatgagtgaggatgaacagattgaactgctcgcttctgacgggatgcttgtaaaaagaccgattctcgtgcaaaatgagaaggttctcgttggttttaaagaaaaggagtggcaggagattttataagcggttaagatttttaaatatagttaaaagagagaagagcatatgaatacggtaaatgtcagaaaggtagagataggaaaaggaatcccgaaaatctgcgtgcctgttgtcggaattacgagagacgatattattgacgcagcttgtaaagcgaaagaaacggcggatcttgtggaatggcgcgcagattggtatgaagatgttctggattttaaaaagacagaaaagatgatggaagaattaagagagacgcttggagacattccgctccttttcacatttcgcacattaaaagaaggcggggagaaagagattgaaaagagtgtatatgtaaagctgaatgagatggcagtaaaaacgggttttgcagatcttgtggatgcagaagcgtttaccgggacagatgaggtaaatacaatcgtagaaacggcgcatttgtatggagtaaaagtgatagcatctaaccatgattttcaaaaaactccgccaaaagaagaaattgtatcgaggctttgctttatgcaggagtgtggtgcggatattgtgaaaatagcggtaatgcctcaatctaaaaaagatgtgcttacgctgcttttggcaacggaagagatggtgagggagcatgcaaagtgtccggtcgttacaatgtctatgtcggaagtaggagtagtcagtcgtatttgcggtgaagcatttggttctgctcttacattcggagcggtcaaaaaagcgtcggcgccgggacagctcggggcagaagagcttcgaatggtgcttaaaatcttgcatgacgtttgataaaagggcaattaatttcgatgagaagttagttgctctttcattatggatgtttttataaacagataaagttgttatgcagatctgaaattttatatctcgatgaaaaaacagttgcaatatacctaatatgggtatataatgcacttatacataccccatatgggtattttaggtttaaagtatgatggtgagagggagaaaaggcaaaagccggaaaatatattcggaggataattatggaaaaagaaaagaaatgtccggaatgtacacatcggataaaaaagcgtacagaagaagaaacaaaattgatgataaaccgcttaaacagaatagaagggcaagtgagggggattcgcagaatggtggagaataatgcgtattgtccggatattcttatacaagtttcggcgattaccgcggcattgaacagttttaataaagttcttttatcagaacatatccgtacttgtgtttcggaagatatcagggaaggaaaagatgagacgatagatgaacttgtaacagttttgagaaaacttatgaaatagattctgaaaaggcaatggaatcgaggatttgagaatcgaaaggaggaaaccggttgaaacaatatgaagttacaggtatgagctgtgcggcatgcagtgcacgtgtagaaaaagctgtatcaaagattgaaggagttacgtcatgttctgtaaatctgctgactaattctatgggagtagagggggctgtcgatgcacagacagttattgaagctgtagaggcggcgggatataaggcggcggagaaagaaagcaggacaggacaggaagcaggcaggatggaaaagagcggagaattaaaagataaggaaacgcctgagatgaaaaagcgattgatcgcctctctttgttttttgattccgttaatgtatctgtcaatggggcatatgatgtggggatggaaagttccggaaattgtgagcgagaatcacgtggcaatggggatcatacagcttctgctgacaacagccgtaatggtgatcaatcagaagttttttatcagtggagtcagaggactttttcataaagcgccgaatatggataccctggttgctcttggcgcaggcgcgtcttacggctacagtatttatgctctgtttgcgatgacagatgcgcagatgcgtgggaatgcggcagaagtaatgacatatatgcatgagttttattttgaatctgcggcgatgatcctgacattgatcacagtcggtaaacttctggaagcaaggtcaaaaggaaagacgacagatgcgctgaaaggtctgatgggtcttgcgcctaagacggcgactgttgtgcgcggcggcgaggaagtaaaaatcgggatcgaacaagtgcaaaagggagatctgtttgtcgttcgtccgggggaaagcattccgactgacggtattgtagtcgaaggaagcggagcggttgacgaatcagcgcttaccggcgaaagtattccggttgataaaaaagagagagattgtgtatcgggcgcgacgataaaccagtccggttttttgagatgtaaggcgaccagagtgggagaagacacaactttgtctcagattatccatatggtgggagatgcggctgcgacaaaagctccgatcgcaaaagtggcagataaagtgtcgggagtgtttgttccggttgttatggcagttgctgttttgacgattattgtatggcttgcattcggagaaacgatcggttttgctcttgcacggggaatctcggttcttgtgatcagttgtccttgtgctctcggtcttgcgacgccggttgcgattatggtcggaaacggtgtgggagcaaagaacggaattttatttaaaacagcagtttctcttgaagaaacggggaaaattgatgttgtagtgctggacaaaacaggaacgatcacaaaaggaagaccgacggtgacagatattttgcccggttcggcttttagtgagtcggaacttctgacgtatgcatacattcttgaaaagaaaagtgaacatccgttagcgcatgcaattttgaaaaaggcagaggaagaagcaatccagacgaaagaagaagcgaaaaactttacggcagtttccggaaatggtttgacgggagagataggcggcgataaatttttcggcggaaacttgaaatttgcagaaggaagaactgttatttcggaagcggtaagaaagcaggcggaaagttttgcatcagaaggaaaaacaccgttatttttcggaaggaatgaggaactgatcggcataatcgccgttgcagacattataaaagaagacagtccgcaggcggtcagagaattgaaaaatatggggatcaaggtggtcatgctcacaggcgataatgagcgtacggcaaaagcgatcggagagcaggcgggtgtagatgaagtgattgccggtgttttacctgatggaaaagaggatgtgatcaaaaaattaaaagaagaaggaaaagtggcgatggttggggacgggattaatgatgcgccggctcttacgcgggcggatgtcggaatcgccatcggagcaggaacggatatcgctattgatgcggcggatattgtgcttatgaaaagcaggttgagcgacgtgcctgccgctgtgcgcatgagtcgggcagcgcttcgcaatattcatgaaaatcttttctgggcatttttttataatgtgatcggcattccgctcgcagcgggaatctggattcctatcttcgggtggaaattaaatccgatgttcggggcagcggcaatgagtctgtcaagcgtatgtgttgtaagcaacgccctgaggctgaatttgtttaaattatatgatggttctaaagatagaaaaagaagtcaaaaaaacaagaaaaattctgaagaagaaaaggagaataaaacaatgaaaaaagtaatgaaaatcgaaggaatgatgtgcggacactgcgaggcgagagtgaaaaaggttcttgaagcgctggatggagtggaacaggcggaagtcagtcatgaaaccggcacggcagttgttgaaatgacagaagaggttgctgacgaagtacttaaaaaggcagtggaagatcaggattataaagtgttggggattgacttctgacaatttgaatagtaatataggtatgtagctatccatttgaagaacggatttctgaaaagtgggtagcttttttaacgagcatcgttcttttaaaaagaacggaataaaaggaggaaaaacaatgaagaagaaaatgctcagcgcattcttgtgtgcagctatggcagtcactctcgttgcagggtgcggagctccggcggcagacgcaggcaaagacaaaggaggagactccaaaaaagaggcgtcggaaggaattccgaaagatgaaatcaaggtaggatttgtacatatttccgatccgagcgatatgggatatacatacaatcatgatctgggaacaaaggaaatgcagaaagaactgggattgagcgatgaccagatcatcaacaaatataatgtgccggaagatgcagaatgtgatacagctcttagagaactcgtagaagcaggatgcaacattatctttgcaacaagcttcgggtttgaagactatgtgaaagaagtagccgcagagtatccggacatccagttctgtcatgcgacaggattccaggcatcggattcaggactggataacttccataattattttgcgtctatttatgagggacgttatctggcaggtattgcggcaggacttaagacagaaacaaataaactcggctacgtagcggcacatccgtttgcagaggttatcagcggatatacagcgttctatcttggagcaaaaagtgtgaatcctgatgtaacaatggatattatgtatacaaattcatggaatgatccgacaatcgagtctcaggttgcaaaagctcttatcgaccgcggatgcgatgtgatctcccagcattcggattctacagctccggcaacgacagctgaggataatggagtatggcaggttggatataataatgatatgattgccgctgcaccgaatgcgtctttagtttctcctcgtattgactggggaatttatgtgacagaagctgttcaggcagtgatcgacggaaaagaaattccggctgactggtgcaaaggatatgccgacggagccgtttatttgtctccattgaatgagaagatcgcagcagagggaacgcaggaggcgatcgataaagcggcggaagcgctgaaaaacggagaactttttgtattcggcggtccgcttaaaggagtaagtccggacggagagaagattgaagttgcagagggagatcatttcccggaacaggaagaggcttctgcaccgtcatggcagtatattatcgagggatgtaacgtagttcagtaattgtataaagtaattctaaaaaataaatccgaaagaagatatcttcggaaaatgaaaacagagccgtcttcggacggctttgtttataacattaaatgttttttaagcggaataccgctttgttctatgaggatttcatgaggaaatgagaaagatacggcaggagagaagaaggaggaaaaaaatttgggagaagcagcgcagtatgcaataaaaatgcatcatgtaacgaaaacattcggtaaagtcgttgccaataaaaatgtagatcttgaactgaaaacaggggagatccttgcgcttctcggtgaaaacggaagtggaaaaacaacattgatgaacatgttgtcaggaatttattttccggattacggagagatttatgtaaaagggaaggaggtaacgattcgttccccgaaggattcttttactctcggaatcggaatgatccatcagcattttaagcttgtggatgtgttgacggcagcggaaaatatcgtgttgggattggaagggaaaacggtgttaaaacgccgtgagatcaatcggaaagtagcagaattagcacaaaaatatggctttgatcttgatccgacaaagaaagtttacaatatgtcggtttctgaaaaacaaacggtggaaatattaaaagtgctgtacaaaggcgcggatattttgattttagacgaacctacggcggttcttactcctcaggaaacggaaaagctgtttgctgttttgaaaaacatgaaaaaacacgggaaatcgatcatcatcattacacataaattaaatgaagtaatggcgatatcagatcgtgttgcgatcttgcgaaagggagaatatatcggagttgtggaaacttcggaaaccgatccggatcaacttacggaaatgatggtcggccggccgatcagtcttgagattgaaagaccggaagtaaaacggggcggaaaacgtcttcgggtgatcgatcttacctgtttgagcggagacggagtgaaggctcttgataatgtttcgtttgatgcttatgcaggagagatactgggaatcgccggaattgcaggaagcggacaaaaagaactgtgcgagacgattgcgggactttatccttctgtcgggggatctgttttgtattctgaatcatcagaaaaaggggcggtaaaagaacgtattttaggattaagcccggatgaaatcgccaaaaaaggaatttcaatggcatttgttccggaagatcgtcttggaatgggtcttgttgccggaatggatatgacagataatgtcatgcttagaagttataagtcgaacaaaggtatttttgtagatcggaaaagtccgagagatcttgcggaaaaactgattaaggaattagaaatcgtaactccgggcgtggaaactccggtaggaagactttcgggaggtaatgtgcagaaagttcttttaggaagagagatagcctgtcagccgtcggttctgattgtcgcatatccggtaagaggtcttgatatcaatgcgtcttacagaatctatgatcttttgaacgaacagaagaaaaagggagttgcggttgtatttatcggagaagatcttgatgtgcttatgcagctttcggaccgcatcatggttatgtgcggaggaaaggtaagcggtattgtcgatccgagaaaagtgacaaaagaagaaatcggattaatgatgatccgtacagaacaagatggagaaaaagaggaggtgacagaatgagttccaatgtgacacatgcgaaagagcctttgttccgaatggtaaaaagagatgcgattcctcagaaaaaagcgtggatgatccgtgcggctgcttttcttttatctttggctacgggcgctgtcgtgatcatgatgctcggacataatccgttttcggtatatatttccatgataaagggagcatggggaacgaagactgtttcttatgagacgattaagatcgcaattccgcttcttatcacggcgatcggaatttcttttgcgttcaaaatgaaattctggaatataggggcggaaggacagattttggtaggtgcagttgcggcaggtgcgtttggtctttttactgctcatatttttccgaagatcccacttgtaattcttatgatgctggcggcgatcgtagcgggcggtttgtacggtttgctcccggctgtctgcaaggcgaagtggggaacaaatgagacgttgtttacactgatgttaaattatattgctctggcatttatcaaatatcttatgaacggcccgtggaaagctccgggaagcagctatccgaaaatagcgatgcttgttccgggagcgcgtttgacaaaagtattcggagtgcactggggatggatcttagcgcttattctcgttgtcgtatcttatatttattttaataagacgaaacaaggctatgaaattgctgttgtaggtgaaagcaataatactgccagatatgcgggaatcaatgtgggacgggtattccgcagaacgatgtttttatccggagcgctttgcggacttgtcggaatgcttcagtttgcgggatcggactttacgattacggaaggaactgcaggcggcgtcggatttacggccattacagttgcatggctcgcaaaaatgaatccggcgggaatgttggttgtatcagtatttatcgcgatgcttgagcgaggggcgaacgcaattcagacacagtttaaaattccggcatctgcggccgatctgttgattggtattattttgttctttatgctcggatgtgagttttttatcacatataagttgatcggaagaggaaaggaggaacatcatgcttaatacgttgaatggattatttattgcggcagtattggccggaacgccgcttcttttaggagcgctcggtgaaatactgacagaaaaatcaggaaacttaaatcttggtgtagagggaatgatgttcatgggggcgatcacgggactggcaggttcgtattattatgaacaggcagtgatcggttcgggcgggaacccgaacggagcggtttcttctgtcatagctcttcttacttcttttgcggcgggttctcttggggcactgatctacagttttttgacgattacgctccgggcaaatcaaaatgtaacaggtctgacattaacaattttcggaaccggtttcggaaattttttcggagagtatatcggacagaaggccggcggttatgtggcggtatctgaagtgacgaagaaagcattttcagggattgatatcccggttttgtcagatatcccggtgcttggtcctcttttattccggtataactgggtcgtttattttgcaatcgcggcagcgctttttatgacatggttttttaatcgtacaagagtgggactgaatcttcgtgctgtcggggaagatccggcaactgcggatgcggcgggtatcaatacgacggtatataaatatatggcgactgtgatcggcggagggatctgcggaatcggtggtatgtatatgagcatggttacaacatcaggcgtatgggtgcataactgtgtcagcgggtatggatggcttgcggtagcgcttgttatttttgcaacatggagtcctgcaagaggaatgcttgtggcgcttgtattcggcggtcttacgatcatgcgtatgtatattaatattcccggacttccggctcagatttatgatatgttcccgtacattgctacgatacttgttcttgtgatcacaagtatgcgcagaagtaaggagcatgcacagccaaagagctgcggactgaattatttccgcgaggaaagataaagggattcgtatatgaatattttattcagctatgcatagtgatttccgatgacggtaatgggttttgatatgttttcggaaaagtgcatagctgaatttttgtataagcgacgggtcaaagtcggggtgtgaccgagatcttggcgaatgtttataataccggaatgtgcttttggaacttccggtaattgttttatgtacggttgttctggctgtggaagctgcgcaatgataactgtcatgggattgtgggaggcatagaaatatgatatcctaaatgaaaatttattgtatgaaggctgatcggcattttggggttataccgtgctgaaaaatattcggatatattattcgcaaaaatagtgttgacaatttaaagagggtataatactataatagcagaagcgaacaactgttcgatactaaaaatcgttatacagaaggagatattttattatggcgggaaatgatgaaaagaaaaaagcgctggatgcggcgatagcaaaacttgagaaggattttggaaagggcgcggtgatgaaactcggagaatcaggagctcatgttgcggtagagacagttcctacaggctgtttgagtcttgatattgcgcttggattgggcggagttccgaaaggacgcgtgattgaagtttacggacctgagtccagcggtaagacaacggttgcgcttcatatgattgcggaagtgcagaaacgcggcggtattgcgggatttattgatgcggaacatgcgttggatccggtctatgcaaagaatataggagtggatattgacgaactatatatttcccaaccggacagcggtgatcaggctttggagattgcagagacgatggcacgttccggcgcaatcgacattatcgttgtagactctgttgcggctcttgtgccgagacaggagattgaaggagatatgggagacagtcatgtgggacttcaagcgcgattgatgtcacaggcacttaggaaactgactccggttatcagtaagtcgaactgtattgtgatttttatcaatcagctgagagaaaaagtcggggtcatgttcggaaatccggagacgacaaccggaggaagggcgcttaagttttatgcgtctgtccgaatggatgtcagaaaaacagagactctgaaacaaagcggagagatggtcggaaaccatacccgtattaagattgtgaaaaataagatagctccgccgtttaaggaggcggaatttgacattatgttcggaaaaggaatttcaaaagaaggagatatccttgatctggctactaagttagatcttgttaaaaagagtggagcatggtatgcatatgaaggcgataagatcggacagggccgggaaaatgcaaagacatatctgtctgctcatccggaaataatggaagagttggaaaagaaagtaagagaacattatcaacttgggacagattcttcggaaaaagatgagaaagaagtgaaaaaggaaaaagaacaaaaagggaaaagtgacgatcttgcattaaaaggtgatgaaaaataatgatagtcactaaaatagagccatgtacaaaaacgaagtttaaaatttatatagatgagacatttaagtttgtactttataaaggagaggtttcccgtttcggaattcggatcggggaagaaatcccgccggaaacagaagaaaagatccgaacggaagtgcttttgaagagggcgaagcttagggcgatgcatcttctcgaggatatggaccgaacagagtctgcccttcgcgaaaaacttcgtcagggtctgtatccgtctgacgtgacagaggcggcgattgaatatgtaaagtcattcggttatcttgatgatgtccggtatgcggaaaacttcgtgaggagcaggcagaatgtgaagagtaaaaaagaaatcggcacggcgctgctgcagaaagggatttcgtcggaaatagcaaagcgcgctatggaaatctgctatgaagaaatgggagaagaagaggcaatccgcaaaattttaagaaaaaaaaagtttgatccgaataaggcggaagaagctcaaatgcagaaaatatacggctatctggggcgcaaaggatttcgttatgatacagtccgtcaagtgatacaaaattataatgacgatgcttgacattgttgtgaaaacagtataaaatttaactgttgtatttaagtaatatgtacaatgaaaatttaataaggaggtgctcctgtgcaagtagatttagtgatcgctattatacttgctgcggcactcgctttgatagttgggatggtttctcgatttctcacaatttccggtttgaaaaaaaatgcagaaagtaaaatcggaaatgcagaggcaaaagcaagagaaatcatcgatgatgctgtgaaaactgctgaaacaacgaaaaaggaagctcttctcgaagtgaaagaagaatcgatcaagacaaagaatgatcttgagaaggagacaaaagaaagaagagcggaattgcagcgctatgaaaaaagagtgctggcaaaagaagaggcagttgataagcgttctgatgtgttagaacatcgggagtcgaagcttacggcgaaagaagaccagcttcgtcagcgggaagccaaggtagaagagctgaatcagaaacgtgtgcaggaactagaacgaatctcaggacttacctccgaacaggcaaaagaatatctgttgaaaactgttgaagaagatgttaagcatgacaccgcaaaaatggtcagagaattggaaacacaggcgaaagaagaagcagacaagaaagcaaaagaatatgttgtcaatgcaattcagagatgtgcggcagaccatgttgcggaaacgacaatttccgttgtgcagcttccgagcgatgaaatgaaaggtcgtattatcggtcgtgaaggaagaaatatccgaacacttgaaacattgaccggtgtggaactgattattgatgatacaccggaagcggttgttttatcgggatttgatcccatccgccgtgaagttgcaagaattgcacttgaacgtttgatcgtagacggacgtattcatccggcgagaattgaagaaatggtagaaaaagcgcagaaagaagtcgatacaatgatcagagaagaaggagaagcggcagcgttagaagtaggcgtgccgggaattcatccggagttgatcagacttctcggtcgtatgaagtttagaacaagctatggacagaatgcgttgaagcattcgattgaagtggctcagttgtcgggacttcttgcgggcgaaatcggtatagatgtcagaatggcgaaacgtgccggacttctgcatgatataggaaaatctatcgaccatgatgtagaagggtcacatattcaaatcggtgtggatctttgtaggaaatataaagaatcctcaaccgtaattaacgcggtggaatcgcatcacggagatgttgagccgcagacattgatcgcatgtgtagtgcaggcagccgatacgatttcggcagcaagaccgggtgcaagacgcgagacgatcgaaacatacaccaacagattgaaacagttagaagagattaccaaccagtttaaaggggtggataaatcttttgccattcaggcgggcagagagattcgagttatggtagttccagagcaggtatctgatgatgatatggtgcttatggcaagggatattgcaaaacaaattgaatttgaacttgagtatcccggacagattaaagtcaatgtaatccgtgaatcacgggcaacagattatgcgaaatagcaatgaatcataacagcagacgaaagaccagcccttgtcgaaagacgagggctttcttttattaaaatatgttgattgctgagaggatacggggaaggagaaagacgatgagtgaacagattaaacgtgtgaacagagaattgaaatttaaaggaacgattattgatttctatcaagatacaatggaaattaatggggatcatacagttgtatgggattttatcaagcacaaaggagctgcggcagtagttccggtcactgaagatggaaagatacttatggtacgtcagtatcgaaatgcacttgagagatatactttggagataccggcaggggctctggatgaggaaggagagccggggtttaaatgtgctgctcgggaattggaagaagaaacaggttataaaagtgaggaattggaatggctgatcaccttgaggacaacggttgctttttgcaatgagaagatcgaggtgtatgtggcgaaaaatttaatcccttcaaaacagcatttagatgaggatgaatttattgatctgaaagcatattctcttgatgaattaaaagaaaaaatatttacaggagagattgaagatgcaaaaacagttgcatcattaatggcatatgcagtaaaatacgaagcctgaaaatgatgtaagaaacggatcgtgaaaagtgataatgaaaaaattccggcatataatgaaatatcaataaaaagtaaagtgcagaatggcaaaaggatcagcaactgcgcgatacagggaggaataatgaaggtatttcatgtgaaaaagcagttagcggctttgtttatgccgggatttttaattggaattatttatgtcaattttcttgctaaaaaatatgtggcagctccggatctgttcagtgaatattttttggatcaattcaggggtgtgcagatagacgaaaaagaatatttatggtatctgcttcgcattcgctgcgttccgttttttatgctttcagggttggctcttacgaagttgaaaaaagtaagcgccgggttatttcttgggtggacaggcatatctgtgggggtgcttgtttcgctggcggcatcgaacttgggaatgaaaggctgtctcttgtgtcttataggtgtttctccacagtttcttttctatattcctgcgtattttatgatcctgaaatattgttatgagtcagaagatggcagatggaacagacagaaaacaatttttgtcggtttgatgatgagtttaggaattattaccgaattatatgtgaatcctgtattagtgaagttgttcttgaattatgtgtagttgtctatagactatgtgctgcgcacatagtctatagatcttttgctccttttcggagatgaaaaaataaaataataacggcgattccgaaaacaagaaactgactggttaaaagtccgatcagataaccgtatattccaaacttggggattgcaaaaaatactccggcaatacgaacaagaagaccggcagtgttgacgagaagtgtgcagaatgttttcccaagtccgttaattatgcttgtaagggcggtatttgtgtaaagaaacgggcagatccatgaaagtgttaaaatgaaacttccggcagcagaactatggaacaaaactcttccgagaaagtttccgaaaatcagaaaaaacagacagcatccaaggcctaaaatgaaacagcttcctacagattgtttcaataaacgaatgattcgtctgttatcatcagatgcctgggcagcgctgacggcaggcataagcactgttccgatagaagttgtgagcgccgaaggaaaaaggatgcatggcagagccattcctgtcaatactccgtaaaggcgaagcgcttccgaagaagtcattccgtagatttttaaaaaagtcgggatggaggccgcctcaatgctttggagtaaagtaactgccgttcgatttgctgtaagaggaacagataaagcggacagttttctgaaagtttttgaaatggaagaaatcgaagcggcataacaaagctgcttttgccgattcagcatctgtatcgaaaaaagtgcggcagccgtctcgcctgcggcaatgccggcggcggcaagtttgacagaagggatttccccggtttttttaacaaagagaaaaagcaggacgacgaaaagaattcgagcggattgttcgataagctgtgacagggcaggaatttttgtctgctgaagccctaaactgtatccgcagatacaactatgtattgcggcgaacggtaatgcataagagacgataagaaggagattttcacacctggcatctcctaaaaaagttgttgctatataaaaggcgtttttttggagaaaatataattctataagtgagagaaagagtgtgaagccaagagaaactgcaagaatgtttccggcttctttttgccgttcaatatgcggggaggatgaactggcggcagagtaagtaacaacagatgacattttttctgcgaccatgtgtgagacggcggtttgaatcccgaatgtgctgactgacagacaaagtgcatagaccgggaaaatgagctgatataaaccgacgttttcttctccgaaagcatgacttaaaaaaatacgaaagaagaatcccataatgcgagtgatcaatccggcggcagttaaaacggcggcgccgcgaaataaattgcgggaagaaaaggagcggaatttgtcagaacggaataacataaaatcacctcgatttgtaacaacagacatatacttgttaaaacatatgtcataaggagacttgacagaaccggggatgaatgctatgctacaaaagaaatccctagtaaaatactggggaatccattctgcaatattaagaataaagaaatagagtatttttattaaggaacggagcgtgagaaagtgaagttatctacaaaaggaaggtatggacttcgtgcgttgatcgatctggcgcaaaatggaggtgaacagccggtatctattacaagtatttcaacaagacaagatatctcggaacgatatcttgagcagttgatgtctatgctgaaaaaagcggggattgtaagaagtgtaagaggagccggaggcggatatgtgcttgtaaaaagactggaagatatttctgtgggagatgtgcttcgcgcattggaaggcagtcttgagccggtggactgcgcgggtcttgaaccaaatggaggatgcagtgtttcggacagctgcgtgacaaaatatgtttggaagaaaattaacgacagtattaaccagacggtagatgagattaaacttgatcaactcgtaaaagaaaacggaaaaaactgtagaaactgattacagtttatttaatgaagagatggaggaaaaaagatggataaactgatatatcttgataatgcggctacgacaaaaacttcacctgaagttgtggaagcaatgctgccttattttacagaacattatgggaatccgtccagtatatattcgtttgcggcggcaaataaggaagtgatttcaaaacaaagagagacgatcgcaggtgtgatcggagcaaaggaaaatgagatttattttacggcgggaggaacggaagccgacaactgggcattgacggcgacagcagaggcgtatggcgcaaaaggaaagcatattattacgacgaagattgaacatcatgccgttttgcatacatgtgaatatcttcaaaagcgagggtatgaggttacttatctcgatgtggatgaatatggagttgtagatccgaagtcggtagaggcggcgatcagaccggatacgatattgatctcggtcatgtttgcgaacaatgagatcggtacggtagagccgataaaagagatcggcgcgatcgctcatgaaaaaggaattttgtttcacacggacgccgtacaggcgttttgtcagataccgatcgatgtcgatgaatgtcatatagatatgctcagcgccagcggacataaattaaacggtccgaagggaattggatttttatacatcagaaaaggagtcaaaatccgctcgttgatccacggaggagcacaggagaggagacgtcgtgcaggaactgaaaatgttccaggaatcgtcggtttcgggaaagcagttgaaatagctgcagcgtctatggaaagaagaatggaaaaagaaagtcagcttcgggattatttgatcgaaaagattgaaaaagagataccatactgcagattaaacggcgacagagaaaggcgtcttccgaataatgtgaatttcagttttcaatatatagaaggcgagtcgcttcttatcatgctcgacatgaaaggcatctgcgcttccagcggatctgcgtgtacatcgggatcgctggatccttcacatgttcttttggcaatcgggcttcctcatgaaattgcacacggatctttgcgtctgacgcttggagacgatacgacaaaagaagatctggattatgtgacgacctgtttgaaagagatagtagctcgactaagaagcatgtctcctctttatgaagattttttgaaaaaacaaaaaaataagtaaaggaacagggaaaagaaattgacttaagtcaaaagaaaaatatcgtttgaataagcggaaacagagaataggaggaatttatttatgtatacagaaaaagtaatggatcattttcagcatccgagaaacgtaggagaacttgaaaacgccagcggcgtcggaacagtgggaaatgcaaaatgtggagatatcatgagaatttatcttgacattgatgaaaaccagattattcgggatgtgaagtttaaaacttttggatgtggggcggctgtagcaacaagcagtatggcgacagaacttgtaaaagggaaaaatattcaggaggcaatgaaagtaacaaacaaagctgtgatggaggctcttgatggtcttccgccggtaaaagtacattgttcgttgctggcagaggaagcaattcatgcggcgctttgggattatgctgaaaagaacgggatcaagattgaagggctggaaaaaccaaagacagatattcatgaggacgaggaagaagaggaatattaatgaagaaagtggttgtaggaatgtcaggaggcgtggattcgtctgtggcggcatatctgctgaaagaacaaggctatgatgtgatcggcgttacgatgcagatctggcaggaagaagacgtctgtacagtagaagaaaacggaggctgctgcgggttaagcgctgttgaagatgcgaggagagttgcagcggcattgggcattccttattatgtgatgaatttcagagaggaattccaaaaaaatgtaatcgactattttgcagattcttatgtgaacggccagacgccgaatccgtgtattgcatgcaaccgttatgtgaaatgggaagcgcttcttaagcgcagcatctcgatcggagcagattttattgcgacagggcactatgcaagagttgagcagctttcaaacgggagatatgctctgcggcgttcggcaactgctgcaaaagatcagacttatgcattatataatctgacgcaggaacagttgaaacgaacgttgatgccggtaggagaatatacaaaagaagaagttcgggtaattgcggaaaagatcggactgctcgttgcggacaagccggacagtcaggatatatgttttgtacaggatggaaactatgctgcttttatagaagaacatacagggaagaaagcttcggaaggaaactttgttacatcggatggaactgtcatagggaggcataaagggattatccattatacggtcggtcagagaaagggacttggtctggcacttggatatccggcatttgttcttgaaatccgtccggaaacgaatgaggtcgttatcggaacttatgaagaatctctgacaacggttgtccgtgcaaaacagctgaactttatgtcggtagaagatctaaaagaaccgctgcgtgtgtttgcgaagatcaggtacaatcacaaaggcgcgtggtgtacggtcgagcggacgaaagaagatgaagtaacttgctgttttgaggagccgcagcgcgcggtgacacccggtcaggcgattgtattttatgacggcgagtatgtacttggcggcggtacgattttgtgagaggtgtgagaggatgcctaaacgattaaaagaaacaatgatacgatctgattttcatatgcataccgcattttcaacggacagtgaagaggctgttgaaagtatgttgaaccgggctgttgaaagagggctctattcggtttgcatcacagatcatatggatgcggattacccgccggatgacgaaatgggagaaagtgcattccggttggatacggaaaactactttccgtttcttttaaaaaagaaaaaagagtatgaagaacggattcaggtgcgtatcggaattgaattaggacttcaaaagcatctggggacaagatatgagacgttgatcgagaagtatccgttcgattttgtgatcggctctatgcatcttgtctgtggggaagacccttataccggaaaggtctttgaagagctgggagatgcacaggtatacaggaggatgttctgtgaaacgttggaatgcattcggaaaataaaatgtttcgatgtgctcggtcatttggattatgtggttcgatatggaaagcatcaggcggaggcgtattcttatgaaaagttttctgatgagattgacatgatattaagagaattgatctcgtcaggaaaaggtctggaattgaacatggcaggaataaagtatggtcttggatttgctcatccgcatccgagtgtgcttcgccgatataaagagctgggaggagagatcatcaccgtgggatctgatgctcataaagcagagcatatcggatatgaatttgagatcgcgggcgaacttctgaaatcctgtggttttcgatattatacagaatttgagaatcgtaaggctgtttttcgacggattccataaaaatgtatttaggacttgaatttttgttcctgttttagtacaattatgctagttgatgaattcttaacaatgtttactttgcgggggttcatttgcataactggaaacagttaaatatttttcaaacttttaggaggaattaatcatggcagtaaaagtagcgattaatggatttggacgtattggacgtcttgctttcagacagatgttcggagcagagggatttgagatcgtagcaatcaatgacctgacatccccgaaaatgcttgctcacttactgaaatatgactcaacacagggcaaatatgcactggcagataaagttgaggctggagaggattctatcatcgttgatggaaaagaaattaaaatctacgcaaaagcaaacgcagcagaacttccgtggggagaaatcggcgttgacgtagttctggagtgtacaggattctacacatctaaagcaaaagcacaggctcacatcgatgcaggcgctaaaaaagttgttatttccgctccggcaggaaatgaccttccgacaatcgtatataacgtaaaccacgagcagcttacaaaagatgacaacatcatctcagcagcttcctgtacaacaaactgcttggctccgatggcaaaagcactgaacgatcttgcaccgatcaaatccggtatcatgtgcacaatccacgcttacacaggtgatcagatgacacttgacggaccgcagagaaaaggcgatctgagaagatctcgtgcagcagcttgcaacatcgtgccgaacagcacaggtgcagcaaaagcaatcggtcttgttattccggaactgaacggaaaactgatcggttctgctcagcgtgttccgactccgacaggatctacaacaattcttacagcagttgtagaaggcgaagtaacagttgatcagatcaacgcagctatgaaagcagcagcaaacgagtcttacggatacaatacagatgagatcgtatccagcgatatcgtaggtatgtcttacggatcactctttgatgctactcagacaatggcacttccgactggcgacggaacaacagaagttcaggttgtttcatggtatgacaacgagaactcttacacaagccagatggtaagaacaatcaaatacttcggaaaactgcttgaggcttaattcattttaaagtaatggattattttggcggacaggcagtgtcgcgccgaacagttatgaaaatgactcacaacggggtccggtcttattgtaggaccggactccgttttgttatgaatcttcagaaaaatattcaggaggcaatgataatggcagctcttaataaaaaatcagtagatgatattaatgtaaagggacagagagtccttgtaagatgtgactttaacgttccgctgatcgacggtaagattacagatgaaaatcgtatcgtggcagctcttcctacaattaaaaaattgattgcggatggaggaaaagtaatcctttgttctcacctcggaaagccgaagggtgagccgaaaccggaactttctcttgcaccggtggcagtaagactggctgaacttctcggacaggatgtgaaattcgcagccgatccggaagtagtaggagaaaatgcaaaagcggcagtggaagcgatgaaggacggcgacgtagtccttcttgagaatacacgttacagagcagaagagacaaagaacggagaggcattcagcaaagaactggcttctctttgtgatgtatttgtaaatgatgcgtttggtacggctcacagagcacactgttcaaacgtaggagttacagagtatgttgatacggcagttgtcggatatcttatgcaaaaagagatcgacttccttggaaatgcagtagagaacccggaaagaccgtttgttgcgatccttggcggtgcgaaagtttccagcaaaatctcagttatcaataacctgcttgacaaagtagacacattgattatcggaggaggaatgagttatacatttacaaaggctcagggcggaagtgtaggagcatctcttcttgaggaagactatcttcagtatgcacttgatatgatcaagaaagctgaggaaaaaggagtaaaacttcttcttccggttgacacgatcgtagcagatgaattttcaaacgatgcaaatacgaaagttgtttcacgtgatgcgattccggacggatggatgggtctggatatcggaccggagacggcaaaaatctttgcagaggcagtgaaatctgcgaaaacagttgtttggaacggaccgatgggatgcttcgagatgcctaaatttgcagaaggaacaaaagttgttgcagaagctctcgcaaatacagaggctgttacgatcatcggaggcggtgattcggcagcggctgtaaatcagcttggattcggcgataagatgacacatatttctacaggcggcggcgcttctctggaattccttgaaggaaaagaacttccgggtgtagcggcagctaatgataaataaatgaaagtggtctagaagaaggagaatatggaaatggcaagaagaaaaattatcgcaggtaactggaaaatgaacaaaactccgagcgaagcagttgctcttgtagaagaactgaaaccgcttgtagcaaacgacgccgtagacgttgtattttgtgttccggcaatcgatatcgtaccggttgttgaagctgtgaaaggaacaaacattcaggttggtgctgagaatatgtattttgaagagagcggagcttatacaggcgaaatctctccggctatgcttgtagatgcaggtgtaaaatatgtcgttctcggacattctgagagaagagattatttcggtgagacaaacgaagacgtaaataagaaagtattgaaagcattagagcatggtatcacaccaatcatgtgctgcggtgaatctctggagcagagagagcagggtgtgacaatggatttcattcgtcagcaggtgaaagtaggtcttcagaatgttacatccgagcaggcaaaaacgatggttattgcttatgagccgatttgggcgatcggaacaggaaagacagctacaacggaacaggcagaggaagtttgtaaagcaatccgtgagtgtgttgcagaagtgtatgatgatgcaacggcagaggaaatccgtattcagtacggcggttctgtgaatgcaggaaacgcagcagagctgtttgcacaggctgacatagacggaggtcttgtaggaggagcttctttgaaagctgatttcggaaaaatcgtaaattactaatttttatcgaatattttgtaaaataaatacgagatcgattttataaacagaccggacaggtgcacaaatgcgtcagtccggtctgttcatgcttgcaaaacaaagaaaaaaaaggtacaataaatagcggaatgaaaagtacaaatgtatagttaaaggagatatggatatgagtaaaaaaccaaccgtattgatgatattagatggatatggcttgagagccgatgataagggtaatgctgtagcagaaggaaaaactccggtaatggacaagctgatgacagaatgcccattcgtaaaaggaaatgcaagcggaatggcagtcggacttccggaaggacagatgggaaattcagaagtcggacatttgaatatgggagctggacgaattgtatatcaagacttgacaaaaatcacaaagtcaattcaggatggagatttctttgagaataaagcgcttcttgcagcatgtgaaaatgtaaagaaaaacggttctgctcttcacatgatgggacttgtatctgacggcggagttcacagtcacaatactcatatttacggtttgcttgagctggcgaaaaaacagggaatcgagaaagtttatgtacattgtttccttgatggaagagatacgcctccggcatcgggaaaagattatgtggcagaactggaagctaagatgaaggaaatcggtgtcggtgaagtggcatctgtatcaggtcgttattatgcgatggatcgtgacaaccgttgggatcgtgtggaaaaagcatataatgccttggtgaaaggcgaaggagttgaagcggcatcggcgcttgaaggaattcaggcatcttatgacaacgagaaaactgacgagtttgtggaaccgtttgtagtgatgaaagacggcgctccgacagcgacagtaaaagacggggattctatgatcttcttcaatttcagaccggatcgcgcgagagagatcacaagaacattctgcgacgatcagttcgacggttttgaacgaggagaacgggtgaaaacaacgtatgtatgttttacagaatacgatgttacgatcgaaaataaactggttgcttttgtaaaagaagagattacaaacacatttggcgagtttcttgcagcaaagggtctgaaacaggctcgtattgcagagacggaaaaatatgcgcatgtgacctttttcttcaacggcggggtagaagagccgaatgaaggagaagacagaatacttgtaaaatctccgaaagttgcaacatatgatttgaaaccggagatgagtgcgtatgaagtaagcgataagcttgttgatgcaatcaagtctgataaatatgacgttattattataaattatgcaaatccggatatggttggacatacaggtgttgagccggcagctatcaaagcgatagaagctgttgacgaatgcgtcggaagagcggttgaagctgtgaaagaagtgaatggtcagatgtttatctgcgcggatcacggaaatgcagagcagttgattgacgaagagacaggagagccgtttacggcacacacaacaaatcctgtaccgtttattcttgtaaatgcagatccgtcttataagctcagagagggaggatgtcttgcggatattgctcctacattgattgaactcatgggaatggagcagccgaaagagatgacgggaaaatctcttcttttgaaataaaaatttagcgaattcgttttatatacgaacagacctcgaagattcggggtctttcgtttatgtagagcaataatggaactttatatataaagcagccgtaaaggagtaataaaattatgcgggaaaagctgacaaagagcgatgtagagaaaattcgggaagagattgaacatcggaaattggtagaaagaaaagaattgattgaagcggtaaaagaagcgcgttctcatggagatttaagtgaaaattttgaatatcatgcggcaaaaaaagaaaaaaacagaaatgaaagtcgaatccgttatctggaaagaatgttaaaaactgcggtgatcgtagaagatgaatctaaagaagatgaaatcggacttaataatacggtagaggtgtactgtgaagatgatgaagaagtggagacgtaccggattgtaacatcagtcagaggaagttccctgaatggtcttgtaagtattgaatcgccgcttggaaaagctcttcttggacataaagaaggagatcgtgtttttataaaagtaaatgatgatttcggatattatgttattgtgaaaaaagtaatcaagacgcaaagtgaagatgaggatcacatccgaagtttttaaactttttttggatgaggggaaaaaggataataagcattttttagaattttttagaatatggaaaacatcaataaaattgattttcagagggaaaaagaatgaaatacaagacgatattttttgacttggacggaacaattacggattccgcgccgggaatcatgaatagtattaaatatgcacttgagaaaaatcatcttccgatgctttcggaagagcaactccgaagctttatcggaccgccgctgcgcggacagttttgtaaagtttgtggtcttgcggatgaagaaagtgcgaggatggttgaagattatagagagtattaccgtgacaaagggatttttgaaaataatgtatatgacggcgtgatcgagatgttggaaaaactgagaaaaaaaggatttcgtttagcgattgcaacatcaaaaccggagatgtttgcaaagcagattgcggattattttgggttttccaaatattttgactttatcggcggagcctgtatgaatgaaagcaggacagataaatatgaagtgatagaatatgtgattgagagctgtaacattacagacagaaatgaagtagtcatggtaggggatcgctctcatgatatgatcggagcaaagaaagcgggactgcacagtataggcgtgttgtatggatatggatcgaaagaagaattggaacagtcgggagcggaaatgttagtggaagtgccggaacagattgtctccttgatggaagtttgattaaaacactacatgttgtatataagaggaacagatgattttttaataaaacggcagagatgcgggcggtaaaacgatttcctacatctctgccgtttttcgagctctgtaatattgtttacattgactgattttctttttccatatttttaaaggcagtggaaagcatcagtttaattcggtttaattggttcacttcgcttgcgccgggatcgaaatcaatggcgacaatatttgactgcggatggagccggcgaagttctttgatcacaccttttcctacgacatggtttggaagacaggcaaacggctgcgcgcagataatattttgagcgccgttttcaatcagttcaagcatttctccggtcagaaaccatccttctcctgtctgattcccaagcgatacgatatcagatgccatttctgctaaatgttcgatttttgcaggaggtgaaaaatgtttgctttctgcgaaggcttttgtggcaggagaccgaaaccattcaaccgcctgaacaccgagacgtcctgcaagtgcttttgacttcttcatcccgagatgagagactttgaagttttggttataaaaacaatattgcaaaaagtctgcaagatcaggaacaacagcttctgcgccttctgcctctagcagttcaacaagatgattattggctgccggcagaaatttcacaagtatttccccgacaattccgacgcggggttttttgatatccaatatttcgatcgaatcaaagtcgtgaataatgtcccggcaaagctttttgaatttgtgccgggaaggatatccttttgaaacaaagtctttgcagatctttgcccatttgcgatgaatctgatcagttgttccgggaacggcttcgtatggccgcatatgatagacacatttcataaaaatatctccgaagagagcgccgtatacgatacgcatgataagggacggggtcagtttaaatcccggatttccttccaggccgcttaaattcagtgagatgacaggaacgtgtccaaagcctgcttttttcagggcgcgccgtataaatccgatataattggaagcgcggcatcctcctcctgtttgagtaatgataactgccactttgtcaagatcgtattttccggaaagaagtgcttccataatctgtccaacaacgatgagagaagggtagcaggcatcgttatttacatatttcaggcctacatcaactgcctgtttgttgtcgttagggagaatctcaaaccgatatccggatcctctaaaggcagcttcgagcatttcaaaatgaatcggagacatctgcggacaaagaatagtatgtgtcgccttcatttcctttgtaaaaggaactttttcgattgctgcagagcggatagtgcgctctgtctttttttgttctctgacgcggatagcagccagcagagagcgtacacggatacgagccgcccctagattattaacttcgtcgatctttaaagttgtataaattttacctgaatttgttaagatgtcggcaacttgatctgtagtaacagcatcaagaccgcatccgaaagagttcagttggattaaatcaaggttttctgttgtttttacataatttgccgcggcatacaagcgagagtggtacatccactgatccataacattaagaggccgttcaacgggatgaagatgggatacagaatcttcagtcagtacggcaatattataggaaaggatcatttccggaagtccatgattgacttccgggtcgatatggtacggtcttccggcaaggacgattcctctgtttccggtttcgttcaaaaaccggatcgtttcttcccctttgcgtctcatatcttcccggcaggaagcaagttctgtccatgcatcgtgtactgcggaataaatctcgttttttgacagtgagaattttgatcccagttcttcaaataaccgataagcaatggtttcttcgtttttaaaagaaagaaacggatggatgaagtcgacttcgttttcgatgatcggatcgatattgttttttatattttccggataagatgtaacgatcggacagttgtagtggttgttggaatcttcaaattcattcctttcatatggaacagacggatagaaaatgtgttcgattccgttgttgatcagccattgaatatgtccgtgagccagttttgccggataacattcggattcacttggaatggattcgataccgagttcgtaaatttttctcgtagaagcaggagagagtacgacacggaatccgagtttggtgaaaaatgtaaaccagaatggataattttcgtacatgttaagtacacggggaattccgattattcctcgcgtggcatcttcttcggaaagaggttcataatcaaaataccgatgaaatttatagtcaaacaagtttggcagcgtatttgtatttttttcttttccgagacctcgttcacatcggtttccggttataaattttcggccgccgctgaagtgattgatcgtaagacgacaagtgtttgtacatccgcggcattttgtcatagtagttgaatattcaagggaacggatgtcttcaatagaaagcatagttgttcctttacattctccgtaacgttctctggcaatcaatgcagcgccgaatgcgcccatgattccggcaatatcgggacggattgcttcgcagtctgcgattttttcaaagcttctaaggacggcattgttgtaaaatgttccgccttgaacaacaatatgtttcccgagttcggaagcgtctgatactttgatgactttgaaaagtgcgttttttatgacggagtaagcaagtccggcagagatgtccgctacggaagcgccttctttttgagcttgctttactttagagttcataaaaacagtacagcgtgtccctaaatcaatcggattttgagcataaagagcttcatgggcaaaatcttctaccgtgtaatttaaagactttgcgaatgtttcaatgaaagaaccgcatccggaagaacatgcttcgttaagctgcacactatcaactgtttgatttttgattttgatgcatttcatgtcctgaccgccgatatcgaggatacagtctacatcaggttcaaaaaacgcggctgcataataatgggcaacggtttccacttcgccttcatctagcataagggcagacttgatcagcgcttctccgtatccggtagagcaggagtggacgatttcaacgtcttcgggaagctggcggtaaatatccttgatcgcggaaattgttgttccgagaggatctccgtcattattgtggtaaaaagagtaaaggagtgttccgtcttctccgacaagagcagcttttgttgttgtagatcccgcatcaattcctaaaaaagctttgcctgtataagttgccagatctttgatcggaacttggtgtttgctatgacgggaaatgaatttatcatagtctgcagatgtttcaaataatggatcaagacgctctacttcaaagtctaattgaattttattttcaaggcgtttctgaagctcgcaaagagctgtcggcgtatccttttttgaatttaaagcagatccgatcgcggcgaacaagtgtgagtggtgcggagcgataatgtgttcgtcatctaattttaaagtacggataaaggtttcgcgtagttctgataaaaagtgaagaggtccgccgagaaatgcaacatgtccgcgaattggttttccacatgcaagtccgctgattgtctggtttacgacagcctgaaaaatagaagcggcaagatcttctttggacgctccttcattgatgagaggctgaatgtcggatttggcaaatacaccgcagcgagccgcgatggagtatagcgctttatagttctttgcatattcgttcaatcccgaagcgtctgtctgaagaagggaagccatttggtcaataaaagaacctgtgccccctgcacagactccgttcatacgctgttctacatttccaccttcaaaatagatgattttcgcatcctcacctccgagctcaatcgccacatcagtctgcggtgcatagtcttgcagagctgttgatacggcaatgacctcctgtacaaaaggaactcccagatgttttgcgagagtaagacctccgcttcctgtaatgacaggagaaacctgaattgaaccgagtttgtaaagtgcccgtccgagcaagtcggataatgtttcctgaatgtttgcaaaatgacgttcgtagtctgaaaaaaggacttcgttttcactgtctaaaattgcaattttgactgtggtagaaccgatatcaataccgagagtatgtaatttgtttaagttcattgcattatctccaaactttaaaaaaataatgatttttcgaaatattactataatgaaaagagaactctgaaaaagaaaagagttcctacctattaaatgtataatactattatacgacgttttccattatacgacatcatttttggaaatacaatcgtgattattatgcgggttttcgctaataatgtcgatttatatagctattttacataaagattgtgttaaacgtgtgaaaagaaacaacatatgtttgacaaacagatatgtgaaagttacaattagataaaaatgttaaaaggtgaggtaatgattgttgagctggtttgacaaaatggaaaaaaaggttgggcgttatgccataagtaatttgactttgtacttgcttattgcatatggaatcggttatatgaccagatttcttatgccggaacttcttcagtggctgacactggaaccgggattaatactgaaagggcagatttggagaattgtttcgtggatttttgtagctccggctgagaaaccgatttattttctgcttatggtctggctgtattattctttgggaacgactctcgaacgtacgtggggaacatttcggtataatgtatatattatttcgggaatgttgtttactgtgatcggggcatttgtgctgtacggggtgttgtgcgcgacatatgatgctgcttttataggcggtcagacgctgctcttaacaggaagcggattatttagtgtttcttatatctatatgtcgatctttttggcattcgcggtaacttatccggatatggaagtgttattgtattttattattccgatcaaaatgaaatggatggggcttgtatacggggtgatgatcttgtatggaattatttcaggcagcatggtaacgagaatcgcgatcattgcatcgattttaaactttattatattctttttatcaacgcgcaatttgagcaggtattcaccgaaagaacgggcccgcaaggcaaagttcaaacagcagtcggcgcctcatatgacatatgccaacggagcaagacatcgctgtgcggtatgcggacggacggaactggatgatccgtgtcttgaatttcggttttgctcaaaatgtaacggtaattatgaatattgccaggatcatttatttacccatgagcatgtaaaatagcagtttgtaaattgcttatgcgggtgttgagaaaacttatatcagatagattataaaggagagaattgattgatgaaaaagacaaaagtagtttgtacaatgggaccgaacacgaatgacagggaactgctgaaaaagttgattgaaaacggaatggatgttgcccgcttcaatttttcgcacggagatcatgaagaacaaaaaagcagaatggatctgctgaaagaactgcgtcaggaattgaatacaaacactgcaattcttcttgatacaaagggaccggagatccgtacgggagtattgaaaggcggaaaaagaataatgctcaaggccggagagcagtttactctgacaacagaggagatcgaaggggatgaatcaaaagtttcgatcacttacgaaggtcttgtgcaggatgttgatgccggtagagtgattcttattgatgacggattgattgaattaaaagttgttggaaaaagtgaaaaggaaattttctgcgaagtcataaacggaggagaactcggtgagagaaagggagtaaatgtgccgaatgtagcggttagacttccggcaatcacagaaaaagataaggatgatatccgttttggagtagagcagggaattgattttatcgctgcatcttttgtgagaaatgcagaatgtgtacttgaaataaaagcataccttaaagaactcggtgcgccatatgttccgattattgcaaaagtagagaatgcagaaggaattaaaaatattgatgaaattatccgtgctgcagacggggttatggttgcgagaggagatcttggagtagaaattccggcagaagaagttccgtatcttcagaaaatgattattcagaaatgtaatatgaactttaaaacagttattacggcaacccagatgctggactctatgatgcgtaatccgcgtccgacaagagcggaagttacagatgttgccaatgctgtatatgacggaacagatgcggtaatgctgtcaggagagacggcgcaggggaaatatcctctggaagcgcttcagatgatggttcatattattcagaatacagaacagcatctcgattatgaaggaatgttggaaaaaacaggaggacatttaaaaagcggtgtatcaagcgcaatcggatattcatctgtgctggcagcatcaaatctgaatgccaaatgcattattacaccttctgtatcgggagcaacggcaagagttgtatccaatctgcgtccgcgtcaggtgattttaggtgtgactccgaatgagagaacattgcgcagaatgtcgatttactggggagtaaaaccgattaaatcacaggcatttaatacgacggatgacatttgcgacggcgcgattgagctggcaaaagtgaagcagtttgtagaaacaggagagattgtcgtaatcacagcgggaattccttcgccgaatgtaaaaaaagagagaagcgccacaagtaatatgatgagaattgcaactgtggaataatatgtaaaagcaaaaaataggaatcaggctgaagataaaaatatgaggagtgagagaagatggataaaagaccgtttgtgacaaaagagaaggtcgagaaaataacaaaaatatatccgactccgtttcatctttatgatgaaaaaggaatcagagaaaatgtaaaagcgcttaaagaggcgttttcatggaacaagggttacaaagaatactttgcggtaaaagctacgccaaacccgtttttgatcgatattttgaaagagtatggctgcggctgcgactgctcttcctatacagaacttatgatgtcggaagctcttgaaattacgggagaagacattatgttttcttcgaacgatactccggcggaagaatttatttatgcagataagcttggggctatcataaatcttgacgatattacgcatattgattttttggagcaggcaatcggtcatgttccggagacaataagctgccggtttaatcccggaggattatttaaaatcagtaacgatattatggataatccgggagatgcaaaatacggtatgacaccggaacagattttggaagcatataaaatattaaaaagtaaaggcgcgaaagagtttggtcttcatgcatttctggcaagcaatactgttacgaatgattattatccgatgcttgcaaaagttttatttgaacaagctgtaaaactttcaaaagaggcgggagttcatattaagtttattaatctctcaggtggaatcgggattccgtataaaccggatcaagaaccgaacgatatatatgcgatcggagagggagttcggaaagtgtatgaagaagttcttgttccggcaggaatgggagatgttgctatttatacagagttaggacgctatatgatgggaccgtatggctgtcttgtgacaaaagcgatccacgagaaaaatacttataaaaactatatcggtgtggatgcatgtgcggtaaatcttatgcgtccggcaatgtatggagcgtatcaccatattaccgtacttggaaaagaggatgaaccgtgtgatcataaatatgatgtgacaggttcgctttgtgagaataacgataagttcgctgttgacaggatgcttcctctgattgagcggggagattatcttgtgattcatgatacaggggcacatggatttgcaatgggttacaattataatggtaaattaaaatcagccgaacttcttcttaaagagaacggagaagtaaaacttatcagaagggcagaaactcctgctgattacttttcaacatttgattgttttgaaattggaaagaaacttatgaatgtataattttttagaatatattttattattaacggaaatagttttaaataaaagaattgtttagactttctttttaaatagtggaaaggggaaattatgaaaaaattacttattatgatgtgtgtattatttattattaatttagtagctatcataattcctttatggagttcggagaacacaatgattattttatatcgcatggctatattttgtaaccttgcagtatttgtgccttcaataactttaatatatagagagaaagggaaaactcaataagaaaattgtgatattttatttccgtatggcatactcttttaaaatgtttaaaataatttgtaaaacagtaaaaaaagcttgcaatataaaaaaacaagtgatataataattcttggcttcaaaaagaagccattatgcggatgtggcggaatggcagacgcacaagactcaaaatcttgcgtaggtgactacgtgtgggttcaagtcccaccatccgcattaaaaaaggattctgtatgacggtgttatacagaatcctttttgtcatatgggaaattttattttcgtacgaggttacttggaatttgttttgttaaaagcttgaaaatcggactgaatagtgataatactcattgtatacttgtatacaatattaaaaagtaatgcttgccaatgatggaataaaatgttatggtagttatgtatcagtgtagattagtataaataattaatagcagggttaaggagggccatacacaagtgataaagaaaaagaaactactgatatgcgcacttttgatgtcgatggtagtaagttttatgccgggcatggaaagtaatgctgcagagctatcgggggaggatcaggtcacagcgacacttcaggatgaaaatagtcagcgtcttgaggagacaacggctatggatgaagatggagcaatttatgaaattcatgaggaaaaaggtattgttgcggaaggaacgccatcacaaaatgcaatgtttttggcaaaaacatccgggcagagtaaagtagtcaattttaatacaaaaggcagcgctgtaacttcttttacatatggcggcggaagcggatatacaaacggagcttatggtgcagacgcggcatatttaggtatgactgatgatgggaaagttcgatttatgctgtcaggagtgacaggaacggtaaatgcttcagaagttcaggttgtggagtatgcggcggtttcggatcatgtaagttattatgcggtatccggtggaaaactgatccattatatttcacaagatttaaataaacttccggtttcttttataaataacggaacagcaccttcttatttaaatgaaggtgtaaagtattacagctatgatggacattatttttataccgattatgcagtgatgctttcggattatcaaaataatacaaacggtcaaaacgcagtgaatgcagggaatgcgttttataactttttccagtttaaaaacatgagagaagctacaaaatacagtggcgaggaattgaacgtaatgctccaatcggcaatgagcgctgcaggagttgacacagcttcttcaaaattatcgggaacaggactttcatttgtaaaataccaaaatgtttatagtgttaatgcgcttctctctatgggaatagcaattaatgaaagcggttgggggacaagttggatctgccggaataaaaataatatttttggcttgaatgcggtggacagcgctcccggaataagcgccgatacatatgcgagcattgatgattgtattcgcagttttatgaaagagtggatggatgaaggttatttagacagctcggattggagaaaccatggaacttatcttggggataagagcagcggaattaatgtaagttatgcatcggacccttactggggagaaaaggcggctgcccatgcatggaatctggattttataggtggaaataaagattgtcagattcaggaagaaacgccaaatgtaccgaacgaacctgagacagacgtacctgaaacaccggatgtaccgagtgaacctgaaacaaacgtaccggaaacgccggatgtaccgagtgaacctgaaataaatgcaccggaaacgccggatgtaccaagcgaacctgaaacgccggatgtaccaagcgaacctgaaacaaatgcaccggaaacaccgaatgtaccgggtgaacctgaaacaaatgcaccggaaacgccgaatgtaccgggtgaacctgaaacagatgtaccggaaacgccggatgtacctgacgtgccgagtcaacctgagacagatgcatcagaaataccggatgcaaacagaattgaaacgccgggaacgggaaatgtgcaaaacagcgggaatgcaggaacggaaacgacaccgggcggaacttctgtatcaggaagtcagacagggacaaaagaagaaacaacagtagaaacaacagtagaaacaactcctacggtaaatccagtcagcgcaacggttccatctcctaaaacaggggatgaagggcagttggcagtgtggattgttcttcttggagtatcgctgacagcgggtgtagttgttatcggaaagaaaaagtccttatatagataaatagataagtataaaataataaaagcgaaaagtgaatgagtgcacttttcgctttttggtttgcgcgccatgggcgcgctctaacgggtgtaagtcccgaacacgcccagatagtgggaagtgtatagctgaacagcaagtccatcgtgaggtggaatctgaagaaagttgtaagcaaatctctggtccgacggacagaaatcacatataaggctaggctgtgagagataagttggccaaaagcaacgaagtctaataactatcacttttgtagcagcagagtagatgtggcggatatatggagagaaagagcgtgaaccttaagcaggaggtctcacagaggtctcatcagcctagtaacaacgaactgtgagaagtcagccgagcccatagcagtgaagaagtttttgtaatggaaacggagcaaaggggcgaacaatcaataagtttgagtatgtttcgtattgcagaaatgacagcatctgtcgtaaccaatcggggaaagggtggtcaaatcaagcgaggcggaaaggaaagaacacatggacacaagtagtctaatggagcagatactttctggtgataacctcaataaaacatatctgcaagtcgtacgaaacaaaggtgcagagggagtggacggaatgaagtacacagaacttcaagaacatcttgaaaagaacggagaaaacatcaaggaccagttgaggtcaagaaaatataaacctcagccggtacggagagtggagatcccaaagccggagggtggcgtcagaaacctgggagtaccaacagtaacagacagatttatacaacaagctatagcgcaggtattaacaccaatctatgaggaacaattcagaccaagcggactgaaataccttgggtttggattctgctttgacacaagagcacaccagtttaaggctaagtcacatgcaaaatcagttgtgaagtttaagagaagaatgaaagtacttacttgtcgaagagactaactgcatttggattagtctcaatgttagattactacaccgaaaggtgtgttacttgttaagttgattgaaccgccgtgtaccggatggtacgcacggtggtgtgagaggtcggggatttattaaaatcccctcctactcgatttatgaaaaatatttggtaattacaaattaagcagatcggaaaatttgtgaatggtcatttttgcatcaggaacatttccgaatccgtattcggcaaaaataaacggaatacctgcagcgtggcaggcgtctgcatcgccttgtgtatctccgacataaacaggagatgacaggtgatttcgatcgatcagcatgcgaagcgtttgtcctttagaaacgcccgtttctccgaaacaaagatgatcttttatgaaatgttcgataccgattgcctgcattgttgcttcgatatatccgcattgacagttgctgacaataaaaagagggtattttttagaaagcttttcaatagtgtcagcgactccttcataaatgattccgggatgattttttaaataattgttttcgagctcacagcaggcggaaagcagagaatctttttccgtttcggaaagtgaggggaaaagaatatctccgatgtcggtcattgttttcccgaaaacacttccgagaatttccctgtcaagtgtaatgtcgagggaagagaactttttgattgccaaattccatgcggcggcaacagaatcggcagaatcccatagtgtgccgtctacgtcaaaaattatgctgtccatgtatataattcctttcatttgtatgatcatatgataaccatagcataaaatcaaccttttaaaaagaggctttttagtgtatacttgagtatgattgtgaaacggaggtaattgctgccatgcgaaagaaaatcgtattgatagatggacatagtattttgaatcgtgcattttatggagttcccgatctgacaactccggaaggtctgcatacgaatgctgtgtacgggtttttgaatattatgtttaaaatattagatgaggagaaaccggagtatctgactgttacatttgatgttcatgcgccgacatttcgtcatgagatgttttcggagtataaaggaacgagaaaaccgatggcagaagaacttcgtcagcaagttcccgtaattaaagaagtgcttgaagcaatgaatatttctacaatagaaaaagcggggcttgaagcggatgatctgttgggaacgctttcacgcatgtgcgaagaaagcggaatggatgtatcgatcatatcaggagacagagatacgctgcagcttgccactgaacatgtgaagattcggattccgaagacgaagcagggaaaaacagagattgagaattattatgctgcagatgttgttgaacgatataaagtaacgccgagagaatttatcgatgtgaaagctttgatgggggattcggcggataatattccgggagttccggggatcggcgaaaaaacagcaacaaaaattattatggagtatcaaacgattgaaaatgcgtatgcacacgcgtcggaattaaagccgccccgggcaagtaagaatattcaggagttttgggaacaggcaaaaatgagtaaagtgcttgcgacgattgaaacacatgcggattttgagtttgatattgaaaaagcgcattatgaaaatccttatacggaagaagcgtacaaaatttttgagcggcttcgttttaaaaatatgcttggacgtttttctatagaaacgaaagaaaataaaatagaaaagatatttcgagaagttacggaaaaagaagaaatagaacgtatttttgcgatggcggagaaagcacaatgtgtcggggtagcattgtcaaaagatgaaggaaacgtactccctctttttgcacatccttcgggattcgggagaattgccatagcttggagtgagaaagatgttgttacgattccatgtgatctttctacggatatggaatttttatttgcaaagttgtcgcatgttgcggaaaaagtgagctgtttctcagtatgtggtttgaaagaaattcttccgtatatcaaaaatgtaaagcaaagcagcgcgtttgatgtgatcgtggcagcttatctgttaaatcctctaaaaagcgattatacgtatgaagatgtggcagaacagtatcttgggattgcaggcgggatacaggctgaacttaatgtgaagtgttgttatgaggcctacacggcgtttgcggcggcatcggttcttgataataaattaaaagaagctgaaatggatcgtcttttttatgagattgaaatgcctttggtttttacattgtacgagatggaatcggcaggtgtgaaagtagaggctgaagctttgaaattgtacggagatcagttgggagagcagatcatacaacttgagcatcagatttatgagatggcgggggaagagtttaatattaattccccgaaacagcttggagttattttatttgaaaaactaaatatgccacatgcgaaaaagacaaaaaccggatactctacagcggcagatgtgttggaaaaactggcagaagaatatccgatcgtaagcaaaatattagaatatcgtcagctggcaaaactgaaatcaacttatgcggacggtctggcggtttttatcggcgatgacggcagaatacacggaaagttcaatcaaacggtaactgcgacaggaagattgagcagtacagaaccgaatttacaaaatattccggtgcggatggaacttggtcggatgatcaggaaagtgtttgtgccaaaagaagactgtgtttttgtcgatgccgattattcgcagatagaacttcgtgttttggctcattgttcgggcgacgagcagttgatcaaagcatatcgggaagcgactgatattcatcggatgacggcgtcgcaagtatttcacactccgtttgatgaagtgacagatttgcaaagaagaaatgcaaaagccgttaatttcggaattgtgtacggtatcagttcctttggattaagtatggatttgagtattacaagaaaagaagcggcagaatacattgagcattatttcgagacttatccgggagtgaaaaagtttcttgacgattcggtagaaaatgcaaaagaaaaaggatatgcagttacgttgttcggcagaaggagacctgtgccggaattaaaatcgagcaattttatgcaaaggaatttcggagagagagttgcgatgaatgctccgatacaaggaaccgcagcagatatcatgaaaattgcgatgatcgatgtccataaagaacttaagaaaagaaatatgaaatcgcgtatgattttgcaggtccatgatgaattgcttattgaggcagagtgttcggaagtagatgaagtgaaagaaattttaagagataagatggaaaacgccgtgaaattgtctgttccgctaattgttgatatgcataccgggaaaaattggtatgaggcaaaatagacgatttgtcgggaagcagtataaaggatagaaaatagaatgaaagttttaggaatcaccggcggagttgggtcgggaaagagcgaagtattggattatttggaaagcagatatggagcttatgtttgtcagatggatgaagtggcaaagcgattggaaaaaagaggagaaatatgtttccggaaaatcgtggacaggttcggagaagcggtcgtcggaactgacggggaattagatcgtaaaaaacttggcgaaattgtgttttccgatgaaggaaaacggaagatcctgaatgaaattgttcatccgccggtgttggattatgtgaagaaagatatagaaaagcgaaagaaggaagggcggaagctgtacgtgttggaatcggctcttctggcagaagcagggcaggaattgtgcgataaaatctggtatatttatacagaagaaaatgttcggagaatccgcctggaacgatcaagagggtatactcaggaaaagatcacacaaatgatggcatctcagctttcggtggagcaatttcgtgaaaattgtacggatgtaattgataacagcggagattttaaagagacaaaaagacaaataggagcgaagatacaattatgagaatgtgcagcattgcaagtgggagcagcggcaactgtatctatgtcggaagcgatgatacgcatttattggtagatacgggaatcagcaagaaaagaatagaagaagggttgaaaacattagaattaaaaggcgaagatttagatgggatcttaattactcatgaacactcggatcatattcaaggattaggagtattcagcagaaaatatgagattccgatctatgctacgccgggaacgatcatggggatcaaaagttattccggtttggggaaaatgccggaaggactatatcgcgagatccgtgcggatgaaccttttgaactgggagatatgactgtaaaaccgtttgcgatttcacatgatgcaaatgaaccttcgggatatcgattggagcagggaggaaaatcagttgcggttgcaacggatcttggaaaatacgacagctatacagtcgaatgtctgagaaatcttgatgcagttctccttgaggcaaaccatgacattcatatgttggaagtcggaggatatccgtactacttgaaacagaggattctcggtgacaggggacatttatcaaatgaattgtcaggtcgtctgctttgtgatatactacatgataatctgaaacatatcgtgctcgggcatttgagcaaggaaaataattacgcaaaacttgcatatgagacggtcaaattagaagttacgctggcagataacgagtacaaaggcgacgatctggatatgttcgtagcgaacagagataccgtttcggatattattacggtttgatcaaggaggaaaataaaatgaaaaaatgtattgttacagtacttggcaaggatacagtgggcattgttgcaaaagtatgtacatatcttgcggagaataaaattaatgttttggatatttcacagaccattattcaaggatattttaatatgatggtaattgttgatgtgacagaacttccaaaagattttactcagatgtgcgacgagatggagaaactcggtgatgagatcggtgtcagcatccgttgtcagagagaagatatttttgaaaaaatgcacagattataagagaagagttcataagacgacacaggatagagaggataaacaatatgatcaatatgtatgaagtttccgaaactaatgaaatgatcgagcatgagaatctggatgtaagaacgattacgctcggcatcagtcttctcgattgtattgattcggatctggaagagctcaaccgtaaaatatacgataagattaccgagacggcaaaagatcttgtatctgtaggtcgtgatatagaaaaagaattcgggattccgattgtgaataaacgaatttccgttactccgattgctttggtcggtggtgctgcatgtaagagtccggaagattttgtgacgatcgcaaaaacgctggatagagcagcagataaagtaggggtcaattttatcggtggttattcggctctggtatccaagggaatgacgaaaagtgatgagaatctgattcgttcgatccctcaggcgctggcgcagacagaaaggatctgcagttccgtaaacgtaggttctacaaagaccgggatcaatatggatgcggtacgcctgtgcggcgagattgtaaaagcaacagcagaagagacgaaagaaagagattctctcgggtgtgcaaaacttgttattttctgtaacgctccggatgataacccgtttatggcaggtgcgttcctcggagtgacagagtcggatgcggtgattaatgtcggtgtcagcggccccggtgttgtgaagaaagcattggaaaaagttcgcggaaaaggatttgaagagttgtgtgagacgattaaaaagacagcgtttaaagttacccgtgtcggacagctcgtggcaggagaggcgtctcaaaggttaggcattccgtttggcattgtggatctttcgcttgcgccgactccggcaatcggagacagcgttgcggaaattttggaagaaatcggcttggaaagagtcggggcaccgggaacaacggctgctcttgcgatgcttaatgatcaagtgaaaaaaggcggagttatggcatcttcttatgtaggaggtttgagcggcgcatttattccggttagtgaagatcagggcatgatcgacgcagttcacgccggttcacttacattggaaaaattagaagctatgacatgtgtctgttcggtaggactggacatgatcgccattccggggcatacaagcgcagctacactttccggaattatagcagatgagatggcgatcggtatggtaaaccagaaaacaacggcggttcgccttattccggtaatcggaaaagatgtaggagataccgcggaattcggaggacttctcggatacgctccgatcatgccggtaaacgaattcagatgcgatgcatttgtgagcagaaaaggaaggatcccggctccgattcacagctttaaaaattaaacggaaaaacaagacagaaggaaataaatggtctgagatagtcaggtttaaagtgataaagggagaatgatatgagtaagattgcggtcgtaacagacagtaatagtggtattacacaggaaagagcgaaagaattagggatttatgtacttccgatgcctttttttattgatggtgagttatatcttgaagacatcacactgacacaggaacagttttatgagaagctcagagcggattcggatatatctacttcccagccttccccgggaaatgtgatggaactgtgggaaagtgtgttgaaagaatatgatgagatcgtatgtattcctatgtcaagcggacttagcagtacatgcgagacggcaatgtctattgcgagggaatataaagggaaagtttatgttgtggacaaccagagaatctcggttacacaagaacaatctgtatatgatgcaatgtatttgcgcgataaagggatgtgcgcggaagagattaaaaatattctcgaaaaagagaagctgcaggcaagtatttatatcacagttgatacgttgaagtatttgaaaaaaggaggaagaatcactccggcggctgcggcgatcggaactgtattgaatttgaagccggttcttcagattcagggtgaaaaattagatgcatttgcaaaagtcagagggtggaaagcggcaaagaaaacgatgctgaatgcaatcgaaaaagatctcaatgagcgttttgcagatgtgaaagaagatattatacttggtatggcatatacatgttcaaaagaagaagcgatggaatggaagcaggagatcatgaatcgttttccgggatatgagtttttggaagctcctctgtcattaagtgtttcctgccatatcggtcctggagcaatggcggtgacatgtatcaaaaaagtgtcgagataatgtttcataaaaaataaaatagaaagacaaaaacgcatctgcaggatctgaatatccggcagatgcgcttttataaatatcaaattttgaaacaggcgctttcggctctttcaatcagccgataccgccaaagaaaattccgagaatgtagacaagtactgcaacaccgcagaatacatattttgtcattggtttgaaccattttccgatcgtgcgcacgcgaccgagctgagcggcatttcttgcaaatttatctccgcatatccagaacattgtaattccggcaagcagtgctccgagagggattacatagatggagatactgtccatccatgcgcttaagagcccgccttctacgaagattccaacagcggcagtgatgacgccgataaaagtgatcgcagatcgacgagaccagccgagccgtttttgaagcgcttctaccggactttctaaaaggttcattaaagaagtgattccggcaaaaagtacggcgaggaagaagataattgcaaaaactcttcctaacggaatatcacgtataacagcgggaattgtaatgaacaaaagtcccggtccggagttcggcgccatgccgaaagagaatacggccgggatgataacaagaccggctagtaatgcggctgctgtgtcaaaaaaagcaacgtatttggcactgcttacaacatctacatcagattttaagtaacttccgtaaacaacagttccgcttccggcaagggaaagggagaaaaatgcctgccccatcgcgtatacccacgtgcggggattggccatttccgaccagtcgggtttgaataagtacgaatacccgggcgctgaaccgtcgaggaaagcaacgcggactgcaaggaataaaaagagaacaaaaaaagcaggcatcatgatgcggtttactttttcgattccccgggcaactccgaatgacatgcagagcaagacaaggaaaagacctaaaagatgccacggaatgctgccaaagtcgcgggaaagttctccgaatatggcagaaggatcttcttcactgataatttttcctgtgatcgagtcggcaaaaaatttcaagatccagccgatgatgacgctgtaaccgattgcgattccgagcgatccgataacggggatcagcccgatgaatgtgccaagttttgaccccttcatttcataagccttcttaaatgcgccaagaggtccggactgcatcgcgcgtccgaatgccatttctccgatcactccggtaaatccgataaggacaacgaagatgatataggggatgagaaatgcggctccgccgaattcacctgcgcggtaagggaagagccatatatttgccattcctacagagcttccgatgcaggagatgacaaacccccatttgttgttgaatttgtcttcagttgtaatttgttttgatttcatagtgttaaactctctttccttttcttcttccgtacagatgtgcttttatatacggaagattcagcaaaacaatcttgggagtgcgtgctgattatactatcatatcatgatttaaaagaagataaaacaataaacgataagtttgtcatttttcatgtcggttccataatttgcggaaagttaaagcggaaagttaagaaaaataaagattgacaaaggaaagtatgtgtgttagtataatctttgcgtgaagcaaaaaacaaagtagagtatccactctcaccatagcacaagcgcgtgactatggtctgataacgaagaacttcctttcggattttccgaaatggttttattgattgtcgggtggatatgatattcactcgtttttttgtgtttcgcataggaaacctgaaggaattcatttgacggaggtatacgacaattagcgatttaatgattaacgagcagatcagagacagagagattcgtctgatcggcgaggatggggaacagttaggtatcatgtcagcccgtgaggctatgaaaatcgctcaggaagcggaacttgatctcgtgaagatcgcacctgcggctaaaccgccggtctgcaagattattgattacggaaagtataaatacgagcaggcaagaaaagaaaaagaggcgaagaagaagcagaaaacggtcgaggttaaagaagtacgtctctcaccgaacattgatacaaatgacttgaacacgaagataaacaatgcaaagaaattcatttccaaaggcaataaagtgaaagtgacacttcgtttcagaggaagagagatggcgcacgttcagcaaagtaagcatatccttgatgattttgccgagacactggcagatgttgcggtagttgaaaaaccggcaaaaatggaaggaagagctatgagcatggttttagctgagaaacgttaagaaccgatatgcccggaatgagatccaaagaggcagcacaataaaggaggaaattatcatgccaaaaatcaaaacaaacagagcagcagcaaagcgcttcaaaaagacaggtacagggaaactgaaaagaaataaagcttataagagccatatcttaacaaaaaaatcgacaaagagaaaaagaaatctcagacagtcgacaattacagatgcaacaaacgtaaagaacatgaagaaggtattaccatatctgtaagaagaagtctgatcgtgcgtatgagatgttgtcggacgatacagtgattacagaataatggtcttatttaaggaggattaagaaatggcaagaatcaaaggcggaatgaacgctaggaagaaacataacagaacattgaaattggcaaaaggatatagaggagctcgttctaaacagtacagagttgcaaaacagtctgtaatgagagcacttacatccgcatatgcaggaagaaagcagcgcaaacgtcagatgagacagctttggattgcacgtattaatgcagcggcaagaatgaacgatctgtcttacagcaaattcatgcacggattaaaactggcaaacgttgatattaacagaaagatgcttgctgagcttgcagtaaatgataaagaaggtttcgcaacacttgcagctcttgcaaaagaaaaacttgcataataaaagtaagaacaaaaagactcccgaacagttatactgattgggagtctttcttgtaagtatattttgttttgatgagtttttgaaaagtttttgaaaagatgaaaagaaaagtaaaaaaatattgacatttatattttaacgtgataaagtggctgtaaaccgatgaggaagagcaagtaattccgataatcagtttcacagagagccgtagatggtggaatgcggtatactgacttgggatgaatgggcttctgagggcaagctgaacatttgaagtatagaagtaggtgagccggagagataactccgttataaaaatgggcatatgttagtatgcgtgagtggatgtgttttcacatcaagccgggtggcaccgcaggagttttgatatataatttagaattacgactcttgtccctgcaatagtatcattgtgtgggacaggagttttttatattattaaagaaagaatttatgatgtaaaagatattttgagaattgtctgtaaaggaatcatatccgggcaagttaaagttccacaaaaattcagaggtatataaagaaaattttgaaaggagaataacaatgagtgagaagaagatcccttataaaatttatttggaagaaagtgagatgccgaagacatggtataatgtccgggcagatatgaaaaacaagccggcgccccttctgaatccggaaacatttaagccgatgacagaagaagaattaagcgttgtattttgcgaggaattagtgaagcaggaattggataatgaaaatcgttatatagaaattccggaaaaaatacgtgacttttacaagatgtatcgtccggcgccgctgattcgtgcgtattgtcttgaggaaaaattacagacacctgcaaaaatttattataaatttgaagggaataatacaagtggaagccataagctgaattcggcgatcgcccaggcatattatgcgaaagaccaaggcttgaaaggcgtgacaacggagacgggagcgggacagtggggaactgctctgtcaatggcatgttcttatcttgatttggactgtaaggtgtatatggtgaaatgttcctatgaacagaaaccattccgaagagaagtaatgcgtacttatggagcgagtgttactccttcaccgtctgaaacaacagaagtgggaagaaaaattttggcagagcatccgggaacttcaggaagccttggatgtgccatttccgaggctgtggaagtggctacacatacgccgggataccgctatgtgcttggaagtgtgttgaatcaagttcttcttcatcagtcagtgatcggggttgagtcaaagattgcaatggataagtatgggatcaagccggacattattatcggatgtgcaggcggaggatccaacttgggaggtcttatctccccgtttatgggagaaaaattaagaggagaagccgattaccagtttattgcggtggagcctgcgtcctgtcctagtttgacaagaggcgtttacgcatatgattactgcgatacaggtatggtttgcccgctttctaaaatgtatacattaggcagtggatttattccgtctgcaagtcatgcgggaggattgagatatcatggtatgagttctgttttatcgcagctttacgaagatggatatatggaagctcgttcggtagaacaaacagaggtatttaaagcggcagagaagtttgcgagagtagaaggcattctgccggctcctgaaagcagtcatgcgattaaagttgcgattgacgaagctcttaaatgtaaagaaacaggggaagaaaaaacgatcttcttcggactgacaggaacaggatattttgatatgtatgcatatgagaaattccatgacggaaagatgagtgactatattccatctgatgaagagttaaaagaggctcttgcaaaacttccgaaagtgccggaaaacttataaatatagtttcagctcggtgtttgaaaattgaaaaatgcagatgtaaaaatcactttgaattgtcaatgtgattaaggaggcttttcacaagatttttacatctgattaaaaaaagtgtgtcaataacttatgaaaatgtcactttttaatatagaaatttatttgaaaaaatgtcactttcataaaagggctaatgcccttttatgaagctgactgctgcttctcgaaaaatagctcatataaaaatttaagtgacagattataatcctccatccaccagattgctttccattcatcactgctgtgacgcagctgaaggtgtggttctactgtttttgacactttttggggaacttctgtattggcatttttgttctgaggtttcagataacggatggtattatagattcgtccgccgtactctacacgaattccaaaacgtgggttaattaatacagtgatctcacggcgggcattgataatcggaaatccctcatctaggatttgaaaacaccgatttttaaacgaaaatgtcccggctgcatctgtttttctcgtgtgctttacacaaaggatggaatccagattcaaatcttttgcggcagagacaaaaatagactctgcttccggctcaacggcaaacctctgattgaaaagttccctgtactctgtttccagaaaacggtttgcttctgacacagtagtaatcccacgttttgcgaactcaacagggagcctgctctgcagtgtgacccataaacgttcaatccgcccctttgcctgaggagtctttgcgaaaataaggtcaatgcccaattcgtgcagggaacgtccgaactgggtaagatggacagtcttgcctgcgattagttcatcaacagtcagctttccggttttaggagaacggaagatggtatggttgtcagaataaaccgtctgtgggatgccgaaatcagagcagcattgacgcatggtttccagataaccgtaaaggcattcattctgtgtcaggaaaagtccgacgacctgcccggtagcatcatcgatagcaccatgaagggcgtatttgatatttcccccaaaccactcgtaaggcgtggcatcgatctggatgagctgtccgggatggggcttacgtttgcgccgatgtgtgcggtgtcggatttttttctttttagggctttcaaaaccagcattttttagtatactggaaagagcagagtaggaaagttgaattccgaaatctgcagagagtatatctttgaaatggaggaagttggcattagagaattctgggcgggaataaatcttaaggacagcttccttcaattcgtcagaaacggagtgaacgggttttctaccggtatttttatgaatgagggattgagcgccagaggtaaggactcctttctttaagcgtgtgatctggcgtgtggagagacccaaaagttcagcagcctgttgtctggaaatagacttgtcaatgaaacggttgatgacagtcagcgttttcagttgttcttgtgacaatgtaattttaccttctttcatagctttaatagaataccaaaaagagacaaaacctcaagtgaatcttaaggagacattatcacaagttaataacaatctgattaaaaaaagtgttgactttttttgctgataatgatattatatcactcgtggtcagcaaaacaaagatcacgaatcctatatggaatgcggaagtgtcggaactggcagacgagcaagactaaggatcttgtaagcattgcgcttgtgtgggttcaagtcccatcttccgcattagataaagagaacaggaaatcttagaaaggttttctgtttttttgcgtggtctttttgtttttatgactaggctcttcaatttgaatgatttcttaaaaagcttcaaattgtttcaatggatggtaattcttccggtaagctcatccagagagattctgaaaaaatcggcaatctctatgagcaggtagatatcgggcagtgtgattccacgctcataagcggaaagtgattggcggctgatattaagtttttgcgcaagatctgcttgttttaactgatttctcatacgcagtcggcggatattttcgcctacggcattttcttcttttttcattgcaaggaggatagatcctgttttgaaaaacacacaatatatattgattttatcatgctttttcatcagagaaatgatatatcctaaatatgagtaaaggcatatccggtattcggatagcacgataagaagtatcggatacaatggagaaaaacgataaggggatgtatagaagtgctagagaacagggtgaaagagttgcgtactgaacggggattgaggcagggagatttggccgaaaagatgaatgtttcacagcagacgatcagccgtatagaaaatggggaaaatgttctgccatcggatatattgattcatttatcaaaatattttcatgtgtcaacggattacatattaaagctatcggacgtgagaatgacacaggaatatcgtttggaaatggaacagatgttattaagacactttgaattctttttgagttactgcaggttgaacaggacgaatcaaaaggtgatcagctttttggctgcgcagatggaaaaggcagaggagaaaaaaattaaagaatgagtttaagagtatataagacggtaaaagtttttaagtatcagtctcatgttggtggatgggaatcagtaaggacagaacagatataaaagggaaaatcttatcagatttttcttttttttattttacccaaactgtttgttttatgaaattatatgatataattacgataatttatttgaaattgtcaataatatctgaataaatgtaaggaggatcagtaatgttagaaaagatagatttgaataaaaaaatgtcaaagcaggaatatagtgaaagtcttccgaagatagaggcggaacttggaagacttcaaagagagtgtaaagatttagatattccggtcatgatcgtatttgaaggattcggagcatccgggaaaggacttcagataggaaagttgatccacagtatggatccgcggggatttgaggtgcatacgattaaaaatgagacggaagaagaacggatgcatccgtttttgtggaggttttggatcaagactccggaaaagggaaaaattgcggtttttgatggaagctggtatcgaaaagtgtgggtagaccgatttgaaaaaaggacgcgggagaaagaactgaaagatgattttgcgtcgatcaatgcttttgaacagcagctttcagaagggggaacgctgattataaaactgtttttggatattgatcaggatgagcaggagaaacgttttaaaaaattggagaaaaagaaagagacgcaatggagagtgactcagggagacaaagagagaaatgttaaatatgacgagtatgcgttgatggcagaagaaatgctgttttgtacggatacggattatgcgccgtggacaattatagaagcgactgacaggcggtttgcgacaacaaaaatatatatgacggtgatacaagctatgcaagagcagatccgacgtcaaaaagagaatagtgctctgttggagaaaacaaataaaatagtggaagaagtttgtgaggaaaaggaagttcagatcgcacaatatgcagaaaacagattttcggaagtttcaatcttgtcaaaaacagatctttcctgcagctatacaaaagaagaatataagcaaaaacttgataaacttcagaggaaggcggagcggcttcacggagaattatataggaagagaattccggtagtgatcggatttgaaggttgggatgccgcaggaaagggaggtgcgattaagcgtctgacagaaaaaatggatcctcggggatatgtggtaaatccgacagcttctccgaatgaggttgaaaaagcgcatcattacttgtggagattttggaaggcgatgccaaaagacggacatgtggcgatttttgacaggacatggtatggtcgggtgatggtagaaaggatcgagggattttgtacggaagaagagtggaaacgcgcatacaaagagataaatgatatggagaaagatctggcaaatgcaggcgcggttattctgaaattttggatgcatattgataaagaagagcagaaacgcagattttgcgaaaggatggaaaatccggaaaaacgatggaagattacggatgaagacttaagaaaccgtgaaaaatgggatctctacgagcatgcggcagatgagatgatcatgaggacgtctacggcctatgcgccgtgggttattgtggagggaaacgataagtattatgcacggatcaaagtgcttaagacagtgacagatgcgattgaaaagagattaaaggaaaggtgatattatgaccatcagggagcagcttgaacttcgtgaacttgaatatttaagttcttatgcggcattaagcaaagactcgaagggacggaaaagaaaagaggaaccgtgtgatatccgaccggcttttcaaagagatcgtgaccggattcttcattgtaaagctttccgaaggctgaaacaaaagacgcaggtttttcttcttccgaaaggagatcattatagaacgcggcttacacatacgttggaagtgtcccagaatgcgcgtacgatagcaaaagcattgcgtttgaatgaagaccttgcagaagcaatcgctctggggcatgaccttggtcatacgcctttcggtcatgcgggggaaagagctttaaatcatgtatatcatttcgcgcatcaaaagcagagtcttcgtgttgtagaacggattgagaaagaagggcgcggactgaacctgacatgggaagtccgtgacggaatactgaaccatcagacgtcaggacatcctcatactttggaagggcaggttgtccgcatttccgataagcttgcatatatcaaccacgatatggatgatgcaataagaggaggaattctgacagaggatgatattccttctgatttgcggcaggctcttggaagttcgtgtaaagagcggcttaatactctggtgcatgatgtgatcacgaacagtatggatcagccggttattaaaatgtcttcggaaacggaacgggcgatgaaagatctgcggaaatttatgtttgaaaatgtatacttgaatccgaacgcaaaaggggaagaagataaggcggtacatatgatcgaacagctttttgaatattatgccgaacatacagaagtccttccccggatttttaaggaggctttggaaaattcggatgatgagaaagaacagatcatctgtgattacattgccggaatgacagattcttatgcggttaaaaaattccaggattattttgtgcccgaagcatggaaaatttaaaaaaataaaggaaatcaaaaagttttgtcgaatataatatataggacaatcttttatggagggtaaacatgtattatccggatgaattaatagaggaagtaagaacgcgaaatgatatcgtagatgtcatatccgattatgtccgtctgcagaaaaagggaagctcctatttcggactgtgtccgtttcataatgaaaaatcgccttcgttttctgtcagcagacagaagcagatgtattactgcttcggatgcggggcagggggaaatgtatttacgtttttgatggagtatgagaatttttcattcatggaggctgtaaaatttcttgcagacagagcgggaattgcacttccggaggccgaatattcgaaggaagcaaaacaaagggcggatttaaaagcgtctattttagagataaataaaatcgctgccagatattattatgtgcagctaaagtccgaaagaggagtgggagcacatacatatttgacggacagaggtttgacagaagagacgatcacggcgtttggacttggatattcaacaaaatacagtgatgatctgtatcaatatttgagaggaaaagggtatagtgaagatctgatccggcaggccggactgatcaatacagatgaacgacagggagtgtatgataaattttggaatcgtgtcatctttccgatcatggatgtaaacagccgggtgatcgggttcggaggccgcgttatgggggacggaaaaccgaaatatttgaattctcccgagacggcagtgttcgacaaaagcaggaatttatatggacttaacagagcgaggacatcgagaaaaacttattttttgctttgtgagggatatatggatgttatctctttgcatcaggctgggtttacaaatgccgtggcatctctcggaacggctcttacatcaggacatgcttctttgatcaaaagatatgttcaggaagtttatctgacatatgacagtgatgatgcaggtacaagagcggcgcttcgagcagttccgatactgaaagaggcgggaatatcggcaaaagtaatccgtatggatccgtataaagatccggacgaatttattaaaaatcttggcgcgcaggaatttgaaaatcgtatccaaaatgcaagaaacgggtttatgttcagtcttgaaatattagagagagaatttgatatggcttccccggaaggaaaaactgcttttttcagagaggcggcaaataggctgctctcatttgaagatgaattggaacggaacaattatatcgaggcagttgcatctgcatataaagtaagcaaagagagtctggaaaaacttgtcgcaaaaactgctgtaagtacaggacttgcccgcccggtcacacgcccgaaaaaagccgatggggcggtcttgcaaaaagaagacggaattgttacatcgcagaaagttctgcttacatggatgatcgaaaatgaaaatctgtattcaaagataagcagttacataagtccggatgatttcacaggagaattaaatcggcgcgttgcgaaacttttatatgagcagcatgaaaaaggagaactaaatccggcaaaacttttgaatcatttcacatcagaggaagaacatagggaagcggcttctctttttcatacgaaaatccgccaactgaaaacaaaagaagaacaggatcaggcgttgaaagatacaattttaaaagtaaaagctcacagcatcaatgagcgaacgctgaatctggatccgtcagatatggccggattgcagcatttaatggaagaaaagcggaagcttgaggaactgaggcaactgcatatttctatagattaaggataaaataaaacaagatgatctgcgtatgcgcacagatcaggaaggatggacacatggaagagaatgcacagaaatttctggaaaaaatgaacgagcttgtcgctctgggaaagaagaaaaaaagtatacttgatgttcaggagatcaatgacttttttgcggacatggaattaagcgccgaacagatggaaaaagtttttgagtatttagaaggacataatattgacgtcttgcggatcacggctgatacggacgatgatgtagatatcgacaatatgatcgcagaggaagaagaagtcgatatggagaatatcgacctttccgttccggaaggagtaagtattgaagatccggttcgtatgtatttgaaagaaatcggaaaagtaccgcttttaagtgcagagcgagagattgaactggcgaaacggatggaagaaggcgacgaggatgcaaaaaaagagctggcagaagcgaacctgcgtcttgttgtcagcattgcgaagcggtatgtaggacgaggcatgctctttcttgatctgatccaggaaggaaatctaggcttgatcaaagctgttgaaaagtttgattatcataaaggttataaattcagcacatatgcgacatggtggattcgtcaggcgatcacaagagctatagcggatcaggcaaggacaattagaattccggttcatatggtagagacgatcaataaactgatccgtgtgtcaagacagcttctgcaggaacttggaagagaaccgcttccggaagaaatcgccaaagagctggatatgcctgttgagcgtgttcgggagattttgaagatttctcaagaaccggtttcgctcgaaactccgatcggcgaggaagaggacagccatttaggagattttattcaggatgataacgtgcctgtaccggcagaagctgcggcgcagacgctcttaaaagaacaacttgatgaagtgctcgatacactgaccgaaagggagcagaaagtattacgtcttcgttttggaatgaatgacggaagagcgcgtacattggaggaagtgggaaaagaatttgacgttacgagagagcgtatccgtcagattgaagcaaaagctcttcggaagctgcgccatccaagtcgaagcagaaaattaagagattatcttgattaattatccggcaaacagtgtaaccgagaaaagaggatacagatggaattatcaaaaagactccgtgcagttgcagatcttgtaactgccggatatcaagtggccgatatcggaacggatcatgcgtacataccgatttttctgacagagacaggaaaaacagattatgcggtagcaatggatgtcaataaaggaccgcttagaaaagcgcaggaaaatatttgtgcgtataaaatggaagaacagatagaaacacgtctctcagatggattttctgcattgaaagtacaagaggtgcagtctgcagtaattgcggggatgggtggaaatcttgtgattcgtattttggaggaagggcatgatgtagtttcatgcttaaaagagtgtattcttcagccgcagtctgaaccggataaagtaagagcctttcttttgcaggagggttttttctttatagaggaagacatggttgaagaggacggaaaatactatccgatgatgaaagtccggcctccaaagaagagcggaaagaaagacggaataaaatcggaaatgtggaatgacgtacagcttcaatatggaaagcttcttcttgaaaagcgtcatccggtgttaaagcgttatttggaacgggagattcgtatcagaacagatatattaaagtcgattgaaaagaaagattctcagaagatacaagtgagaaagcggcaattggaagaagaattaaatattgcagagaaagggatggaatactatgctttgtaaagagatcattcaagtgatagaggcgtcttatccgaaagaagcggcgcttgattttgataatgtgggacttttggcagggcggctggaaaaagaagtaagtaaggtttatctggcgctcgatgcgacagaagaggtgatcgataaggcgattgcattaggaacagatatgcttattacgcatcatcctcttatattttccccaatgaagagagtgacagatgaagattttataggacgccgtgttgtaaagctgcttcaaaatgacatttcttattatgcaatgcacacaaattatgatgtgcttggcatggcgaagctggcagaagatattcttggtattgagaaaacatatgtgcttgatgtgacaatggaaaaagacggagcagaagaaggaatcggaagaatcggaatgcttgagcgggaaatgacattggaagaatgttgtctctatgtgaagcataaattgaaattgggaagtgtgaaagtgtatggagatatgaaaaaaaatgtacattgtcttgctgtttctcccggggcgggaaagtcggcgataatgccggcgataaaaaaaggagcagatgtgcttgtgacaggcgacataggtcatcatgacggtattgatgcggttgaacaggggttggcggtcattgatgcgggacattatggaacagagtatatattcatagacgatatgaaatgctttttacatgaaaaacttccggtattggatgtgatgtcgattccgatagttcatccattccaagtgctttaaaaggtggactttatttgggtaaaaggagtgtgttccggaaaatggagaaaaaaaagtataatattacagtaggtaacgagacaaaagaatttgaggaaggaacaacatatcaagctgttgcaaaagagttctgcggtagtttttctcatcctgccgttcttgcagtggaaggagaaaacagactgcaggaactaagaaaaacagttgagaaagactgtgaattgaagtttattacgacagcagatgcaatcggacatgaaacttataaaagaagtttgtgctttcttcttgtaaaagcggttcatgatgtggcaggacatgataagatcgaacgcgtcagaattcatttttcggtggataaaggatattattgcacagttgacggagatataaaaattacagagcagttccttgcggatgtggcgaagcggatgcgttggctctcagatgaaaaaattccgattaaaaagaagacaattcatacagatgatgcgatcgaattatttcacagacatggaatgtatgataaggaaaaattatttgaataccggagggtttcaaaagtaaacatatatagtattaatgagtttgaagattattattacggatatatggttcctgataccggatatctgaaatatttttctcttcatttgtatgatgaaggctttgtcattcagatgccggtgaaagaacagccggaaaagattcccgaatttagaccaagtcctaaattatttcatgtattgaaagagtctgttttatggggagattgtcaggacatagaaacagtcggagcgcttaatgagatggtaacaaaaggagatatgcgggaagttgtgcttgtgcaggaagcttatcaggaacggagaataggcgagattgccagacagattgcagaccggaaagatgttcggtttgttttgatcgcagggccatcatcttccggaaaaacgacattttcacataggttgtccattcagcttagggtgaatggattaaaacctcatccgattgcggtagataattattttgtcgatcgggaacatactccgaaagattcagatggaaattatgattttgagtgtttggaagcaatcgacattcccaaatttaatgaagatatgagggctcttttaaaaggagaggaagtgtatcttcccatttttgactttaaaagcggtaagagaaagtatgaatctaaaccgaaaaaacttggttcacaggatattcttgtaatagaaggaatccattgtttgaatccaaaattgacagagacaatggcagatgcgaacaaatttaagatttatatcagcgcattgactcagttgaacatcgatgaacataatcggatccctacgacagacggaaggttgatcaggaggattgtaagagattcccgcacacgcggcgcttctgcatcgaagacgatttctatgtgggcttcagtaagaagaggagaggaaaaaaacatatttccgtttcaggaagaagcggatgtgatgtttaattcttctttgatctatgaactggcagtgctgaagcaatatgtggaaccgcttctttttgcggtggataaagattcaaaagaatttattgaagcaaaaaggcttcttaagttttttgattactttgttgggatcggaagtgaatttataccgacaaactctctgttaagagagtttgtcggcggtggatgcttccgtttatagatggcggatcattttgattttatttcccgccacagttgattatagatgatttcgttttcgtctccgaggaaattaaacgtctcgcaatttttaagttgggagatatcggggaatgcaatgttgctttcgcgcattgattcgtcttcaatcagttctcttcctgctgagttgggaatagaatatgtaatataatcaaaattcatttttgcaatatcaggacggcagaggtagttgataaacgcctctgcgttctttttgttttgtgcatttttcggaatgacgagagcgtcaatccacaagttcgatccctctttcggaatcacatactccagatcgggattttccttttggcaataaagtgcttctcccgaataaataacgccgagtgcagcttcgtttccgatcattttatcccgaacctgatcgatgacataggcctgaacaagaggtttttgtttgatgagaagctttttggcggcttctaattcatcaagatctgttgagttcaaagaatatccgagtgattttaaagcaacggcaaaagcgtctcttacactgtcttgcatgaggatgctgtccgtatacttttcatcccataaaatattccagctgtctacaggttcgtccaccattttcttgttataaagtattccgaccgttccccaaagatacggaacggagtatttgttttccgggtcatattgttttgacatttccatataaatatcatcaatatattttaaattcggtacattttcataattaatctcggcaagcagatcgttttcgatcattctttgcaccatatagtcagaaggacagacgacgtcataagcaatcgcgccggactgcactttcgggtacatgatttcatttgtttcatattcttcatatacaacgtcgattccggtctcgtcttcaaacatcgtaataatttcaggatcaatatagtctccccagttgtatacaatgactttttcgccggacatatttccggaggaagaaccatatacgaacccgccgataacgatgacaagcatgattgcggcaggagcgaaacgatgaaagaaaaatctgctgaatttgcggaattttccggcaggcgcatgaacggcagcttttttgaccttcggatcgtctggggtcatattgacaagaaaaagcagaatgagaaccgtcagaaacatgattgtggacagtgcgtacatttccggtttgattccctttctgacttcactgtatatttttgtagacagtgtatctattccgggtccttttgtgaagtgggtgattacaaaatcatccagcgacatagtaaatgccagcagaaatcctgaaaaaattccgggcatgatatccggcagaacgacctttctgaacgcataagaaggagatgcgccgaggtcaagcgccgcttcataagtgcgtttgctcgtctgttttaatttaggcatgacacttaggataacataggggatattaaatgtaatatgtgctagcaatattgtggaaaatccaagtgtaaaccgacatgcaatgaaaaggagcatgagagaaattcctgttacaatatcggcgttgagcatcggaatatttgtgactccgagaagtaatgtacgtgcttttgtacgcattgcctggatgccgagggcggcggcagttccgatcaaagttgcgatcagagcggaaagaaaggcgatgataagtgttgtataaagcgcattcatgatgtctttgttttgaaaaagctgtaaataccattttcctgtaaaaccgttccatttggaacgtgtttttgtattgttaaaagaaagaaccatcaaagtgataatgggagcgtataacaatacaaagatcaggaaaaggtagattttttttgcggttgatttgatcaaaatgtatttccctccccgtttttatcgtatttggcaatcagagccatgcttgcaatgatgaacaacatcaaaacaagagaaagcccggaaccgacattccagttgcttccttgtttaaattcctgctctataacatttccgatcagaaggatcttgcttcctccgagaagatcagatattacaaatgtcgtaagagacggtacaaataccattgtgatgccgctgatgattccgggaatactaagcggcattatgatcttaaaaaatgtctgcgcagtgttcgcaccgagatctctggcagcgtggataacatctttatcaatcttagacagcacattgtagatcggaagtaccataaaaggaagaaaattgtataccattccgagaacaatggcagatggagtattgatgatcgactgctccggaagatggaggaaattaagtatgctgttaatgactccgtttttttccaaaagtgtctgccacgctaatgtccgaagaagaaaattcatccacatcggaagaatgaatatcagtacgataaaacttgtctgattcatatttttctcggcaagaatcatagccagtggataggcgaggactaagcagattaaagtgctgataaacgacagtaaaagagccagtccgagcgcttttaaattttcgggagttgtcatctgggaaagattattcagagtaaaactcccgtttttgtctgtgagtccatagtacaagatcatgagcagaggaataatgataaaagacattgcccagaataaatatggacctgcgagtatttttctattcttcaatcggaacagcctcctcatcttcggattccggttttttcatgatctggatatcaaaaggatcgacttttactccgacttctgttccaaccgggaacatatcggtgctatgaacaagaagctcataattgtttgcgagaacttccatttcatagtgaacccctttgaagatcagatttgtgacaactccgttgataactccttctccaggagcaacaagatcaatgtcctcaggtcggattacagcatctaccggtttattatgaccaaatccgacgtctacacagttccagacagctccgagtatctttacgactttatcttctaccatcgtagcaggcagaatattactgtcaccgataaaatctgcgacaaaagcattttgcggttcattgtaaatgtcctccggcgtaccgatctgttggatatagccttgattcataacaacgatcgtatcagacattgtaagcgcttcttcctgatcgtgagtaacgtaaacaaaggtgatgccgagttcgtttttcagacggatcagttcgtactgcatatcttggcgaagcttcagatcaagagctccgagcggttcgtctaaaaggagcactttgggttcatttacgatcgcccgcgcaatggctatacgctgttgttgtccgccgcttaatgagtccggtgaccggtcttcaaaaccttccaaattgacaagttttaaagcatagcggattttatctttaatgtaagcttttgatttccctttgatctttaagccgaacgcaatgttgtcagcgattgtcatgtgggaaaaaagagcatatttttggaaaacggtgtttagctgccggcggtttggcggaatgtcattaatattttttccatcaaaaatgatctttccggaatcaggtgtttcaaaaccacctaaaattctcagcagtgttgttttcccgcacccacttggtccgagcaaagtcaaaaattcgttttcccgtatataaagattcagttggtctaaaatgacagaatccccataagattttgtaatatcgacaatatcgatcaatcggttagacatagcggcctcctaaatttcttttgtatagatttgttttaaatgatccatcttcgctgtcatattctgcagaagaagatcggtaagcgtgatcgcggtcatagcttctacaacaacgactgcgcggggaacgattacagggtcgtgtcttccgtggatgacgatttcggtattctcatgcgctgtatttatcgtctcctgcggtattgcgatagaggatgtcggttttactgctgcccggacgatcagtcgggagccgtcgctcatgcctccaagcgtacctccggaatgatttgtcttcttatgtacttctccattttcaacatagaaaggatcgttattttttgagccgacagaagaggctgcctgaaacccatctccgatttctacgcctttaacagcgccgatcgacatgacagcttgtgcgagaagcgcgtccagcttgtcaaagaccggttctcctaagccgacaggcagtccgtctgcaatacattcgataactccgccgcaggaattagtttctttcattaaagaagtaatgtactgtccagcctgctcggcgatattgttgtttggcatataaagactgttctggctgatctcggagtagttatattctgtttcatttattacgtaaggaccgattgccttcgtgtaagcacaaagagaaattccgagttcgtttaagattttagaggcaatcgcgcctgctgcgacacggccgattgtttcccgaccggaagaacgcccgcctcctctgtaatcgcggatgccgtatttttccgtaaaaggataatccgcatgccccggacgaaacatagaaacaatgtttccataatctcgggaacgttggtctttattacgtacgagaagagaaatcggtgttccggtcgttttgccttcaaagattcccgagagaatctcgacagtatcttcctcgctgcgtctcgttgtaaatttactctgaccgggttttcggcggtcaagaaatatctgaatatcttcttcatttagagaaattccggaagggcatccgtcgatcacgacgccgatgccggatccgtgagattctccccaagtcgtgatgcgaaatattttaccaaaagttgagccactcataaaatgatctcctttcaaaattctgttatattaggtgtttgcgaaacgccacaagccgcat

SEQ ID NO: 7628 - DNA, 20320 bp, Unknown
  gut microbiota DNA sequence
caaaaggctatcggactgttaaaaaaatcagcagtcctatttgtgatgcgattatttgtaacaataaatccaatcactttattagcatacagctttttttaataaatactcttaagttgacaacattgcccgcatagcgggtggtttattgtttcgcccatctccatttttcggatcaacgaaaaactccaatgggctcaacagactaaagtccatagttataaaatttaaagacatattgcacttacacaatatgcccccacaatgtttctataagacaatttatatcatactttttgtactcctataaaaactcttctatactccctttgtactcccaattttgcgatacagcccgatatttgacatcattttatatactttgacttttcaataaatcccgtaaatatcacattaaaaaggcgttccatacaaatcatacggtgtcacctgatatacgtaataattaagccagttcgtatagaggttgttggcgtgtgctctccatgtaagtaccggtttattttccgaatcatcatcgggataataattttccggaatttgaggatttaatccacggcttatatcacgcttatattctgaatcaagagtcatacggtcatattccggatgtcccatcacaaatatctgacgcccttctttggccatacacataaatacacctgcctgaagagaatctgcaagaatcatgattctgtcatccttctccaaaagttcctgaggaacttccgtatgtcttgaatgaggcgccataaacacatcatcaaaacctcttacaagaggaatcttcctgtttctcacgcgatgtctgtacacaccggataatttcttcggaagcgcttttttattgatcccgtaatgatagtaaatacccgcttgcgctccccagcacaaatgaagtgttgatgtcacatttgtctttgtccactccataatttctgtcaattcctgccaataatcaacttcttcaaactccatttgttctaccggcgcacccgtaataataaatccgtcaaactttctcattttaatatcttcaaatgattcataaaacttataaatgtgactcgttgatgtatttttagaaacatggctcgtcatacgaacaaacgtcacatctacttggagcggcgtatttgaaagtgatcttaaaatttgaagttcggtatcttctttcaacggcataagatttaaaagtccgatactgattggacggatatcttgatgtgccgccctatattcatccatcacaaatatattttcatgttccagtatttcttttacaggaagatcgttttgtactcgaataggcataatattatctctccttttctttgaatatatttttatcggcatggacataagttccgtccgattctacataactatattcgtcataagcatctgtcttgacaggcagttttttcttttcaagtttgttattaacaagcattccgacaatataataaacgactgcaaatgtcggaactccaagtatcattccgggaactccgaacagaccccctccgatcaaaatcgaaaacacaacccaaaatgccgacaagcctgtggaatctcctaatattttaggaccaagcacatttccgtcaaactgctgtaaggcgataataaaaataataaagtaaatccccatcttaggctctgcaagcaaaataagaatcgcgcttgggattgcccctatataaggtccgaaaaacggaattacatttgtcacaccgacgatcacactgacaagcatcgcatatggcatattcaaaatcgacaggcctgcgaaacaaagaacaccgataatagccgaatcaatgatttttcctataataaatcctccgaatatttcattactcttaatagtaagatgaagaatcatattggcatttgacggtttaaatatagcatatgttatttttttagactgttttgaaaacttttctttactgaacagtacatagacagaaacaattaatccgatcaaaatattcataatttcacgcatgaaattcagcacaccgactgtcaaacctgacataaaatcattaatgcgtccaagcagatctgtacgcatccaattttgcacaaatgtagtggcctctttcatcacactttctacgatattcccgatcgtcgaattttctgtattcatttcacttaactctctgataaaacggttcatctgactcggaacattcatgatcatatcacgaatacttttataaagttccggtatcatcatattaaacagtgtaaaaataatcgttgccaatatcacaatcgaaatacagattcctacggatctcgacacgcttttcgcctgtttaaaattaggaaatttcttttccaaaaaaggaaggagcttcctgtctactgctttcactatcggattcaaaagataagcgattgccaatccgtaaacaatcggctttgaaaccaaaaatattttccgaatcactcccgatatgtgtcctgcccgcaaaagcagaaaataaaaaagaatacatgttaaagcgccgactacgatcgccacagttttgccgaactgctgttttaaccaagaaggttttcctgttccgaatatcggctgtttcacataataccctgttttatcaccatttttttcgttctttttatacttttcatcttttttgttttctacattttcctgttcatcggtcatctcatataccttccagtctttttcgtttatcagataaactataattaatttattataacgcttttattctttcagcgtcaaccggaatatatcataacccgtaccataaccccatgccattttgccgcgcagattgtaagcgattgccaaagtctctcccaaaattcgtcttcattacaaaaataaaaggaaccgtcttttaatttaagacgattcctctgacatttactctggatatatgattttccttttctccgttatcttgaataactgctttgtcctttttcgttcttgcttaacccttaaaacatgtttttaaacaatcagcctatgcatgattgaaatgtcgcgcactctgttcccgatgcctgttttgcatctccgccttctacgctgatttttcctgcatggcattcacactctttattatacatacaatttgttgccttacaatcaacgcaggaacaatctgaagcctctttcatagaatttgtgtaacttccttcctttctctcctgaaagctgtcacaacatgtctctttcggattttttgcagattctcctcctactgtaatctcatcaagatcacaaagaaactgtttgttgtgtacacacgtctgaactgtacattttaattgcggcataacgctacctccttttattcaatatcaatagcattatgtcctgacattactcataatattcttttatttttcaaaaaaattgccaaaaccgcaaaaaactctctcacaagataatttatctgaaaaacataatttgaagaagccgatactgaaaaaacatgagcatatccttcctgttctgctaaaagttttgccctgtaactatgaaaattatttgtaacgattccgaccgtctcatgtttcggatcaataaatctccgactgaaactcagattttctcttgtagaaacggactgatcttcctttctgatccgattttccgcaactccttgttcgataagatattgttccattgcatccgcttctgaaatatcttctcccggccccctgccgcctgaaacaactaccattgtcctttcattttcctctaaataatgaatcgctgcatcaagccgccttttcagcgaatccgtaatttttcttcctcttacctgcgcccccaatataatgatccactgcgctcctctttcaggtttagaaaacatacctcgacagattttaatttccacagtcagaaaaagaatccataaccccaggcatatccatccgaaaacactttccacatatgcaggaagcggcacacatccaaaaaacagatgtgcgccgccggtcaacaaccaaaaaaccgcaaaggtcgatcgcagtctgcgggaataaatgacaagtattaaataatacaacacacacagacttcccaaaatccagaaatactctttcatttatgcatttcttccgcagcactttttatattttttgccacttccacacggacaaggatcatttcttcctattttcttttctttacgtattgttcctgaatttttctgctctttgtacagacgttttctcgtattttcatcaaaaatcttttcccactgcggaagttcataaagccagtcagctcttgcatctaccatgtttttatataatttttctttatcaaatccaagacttacttctgtatcctcatccatcgtctcaatcggattcggtgttttcaaactgtcgttgattccgtcaagaaaaccaaccatcgtcattacatcctgaccgtatttttcggcaagttctttcactgttccttttacctctgtatcaggatcatccagaagctgctcgtaaatcgatgtctctattgtaaaatattttccccaaaaactctctaactgctcttttgacaggtttctgtcataagccatatctctccattgatctaataaacatttttcgctcattgtatattgctcctttatctttaaaatccatctaaatcattatataacaatttctgtttgccgtaaactattattttaggtataattacagcatacctattcagttcaacaagaaacttgatcaagctattttttcatgttgatcgtcaattcaaaaatatttttatagtaggaaaggattttatcatgaaaaacataaaacgtatccttgcagtcataggtgttatccttcttatcggaatgtatgtctgcactctcatatttgctctgatcggatctcctgcatcagacgacctgttaaaagcctctatagccgctacgattttaattccggttctgctttacgggtttattctgatcacccggcttttaaaaaataagaataatcagaacgatgattaattcatcaattatataataactcaaccaactttaaggctgctgcggttttttcatggcattcattttcacccatgttgccgcgccgccttatcgcttgtcttttcttcaggtattcttccatcgtcatcatccttatttctgtctctctgtcattccggcgcataaaatatacctcctcttcttgcttttttcaaaacccggtcttatatcttatgctttctctttaaaaaatattacaaaaggatggcgaaaaccatcggcttacaccatcctcattctcatatattcactctttatttcccccggaaacaaaagcctccgaaagacaaaatccatataccttttacaagaaccttacttttaactatgaattaacggttacgataaataatatcatctcttcccgggccgttactgatcattgtaaacggatatccgacctctttttcgataaactctatataattacggcaattttccggaagatcttcgtattttctgattcctctgatatcttctttccaacccggaagtgttttaagaaccggttttgctttttcaagaagatgtgttacaggaaaatctgtcgttacctctccgtcaatttcataacctacacataccggaatttcatccaagtatccaagaacatccaaaaccgtaaatgcaacatctgttgttccctgcattctgcatccgtattttgaagcgacacagtcaaaccaaccgacacgtctcggacgtcctgtcgtagcgccgtactctccgccgtcacctccgcgtcttctaagctcatctgcttctcctccgaaaatttcacttacaaatgcccctgctcctaccgcgcttgaataagctttacataccgtaattacctgtttaatctcatacggaggaatgcccgcaccgatcgccccgtatgcggcaagcgtggatgaagacgttaccatcggataaataccatgatccggatcttttaaggaaccaagctgaccttccaaaagaatattttttccttctttcaaagcattatgtaaaaagagcgaaacatcgcatacataaggagccaccatatctctgtagcttacaagttctttatataattcatcaggatcaatcaatggtttgtgataaaggtgttcaagcaatacatttttttgttctgctacacgaaccactttctcctttagcaattcatcgtcaaaaagttcactcacctgaaaaccgatttttgcatatttatcagaataaaacggagcaatacccgattttgtcgaaccaaaagattttcctccgagacgctcttcctcataagcatcaaaatttttatgataagacatcaccatctgcgctctgtcagaaacaagaatcttcggcatcggaacaccccgatccacgatagacttaacttccttaaacaaaatcggaacatccaacgctacaccatttccgatgatacttgttgtatgatcataaaatactcctgacggcagtgtatgcagcgcaaattttccataatcatttacgatcgtatgacctgcgtttgctccgccttgaaaacgaacgatgatgtcagattctttaccaagcatatctgtaatcttaccttttccttcatcgccccagtttgcaccaactactgcttttaccatttccattcctcctgaacatcgttgcttttaaataattatgagcggtacttatgaataaccgcagttagaattatactatatttttcttattatgtaaaatgttatttcgttttttataaaaggatcataaaattgttttgaaacaaaggagccaatagattttataatctgctattgtaattgccctgaaaaagtattaaaataacagatacattcaggatgtttctccattatacagacggagcacatcttcttacagaaaggagagtcaacaaattgaaaaaacttgttaaatggtttagtatcttcgctgtcatcggaacggcgatcgggcttgccgtcgcgtatttctgcaagaacagttccgacattccagaggaaaatgatcctgccgagaccgaggatgatgactttgatcttgatgccgatcttcaacctgcatccgacagagaatatgtatctttaaaaaagactgatgatgacacagatggcgaatccgaatcacttgaagaaaaatagtacagaaatattccgtgtatttactattttatacacaactaaaacacgccggaacataagtttcgacgtgtttttctttctcaaaagcagaatctgttcaaactgatttgtcaatttccctctttattccatgcttcatcaagcagacgagccgcatgcaagattttttcatcgctcatatttgcatatcctaacaggattaccgattcgttctgttctctgtctttttctcccacataatattctgacagtccgtatacttttacttctttttcttctgccaaacggattaactctttttcgcttcttccatcgcaaaaatgaagaagaagatgtactcctgcattttctcccgacactgtaaactctgttttcatttcttttaaagtgctcagtaaaacatcatgtctgctccgatacaaagctcttgttttgttcagatgacgttcataatatcctttttctataaatttctgcaaaataagctgatctacttttgatacagtagagctgataaatccgcaccgttttttatacagcgaacatactctttccggcaggacaaggtaactcatcctaatcgcaggagctatagattttgaaaaagttccgatgtaaattacctttccgcttctgtcatatccttgcaaagccggaattggttttcctttataacgaaactcactgtcataatcatcttctataataaatctctcttctttttcctgcgcccatttcaaaagttccattcgccgttttataggcataactattccaagcggatattgatgcgaaggcatcacaaatgcgatatctgcatccgatttacgcagttcgtccacacgcattcctttgtcatccatatcgacagtacacacttcatatgacaaatttttaaacagacgatacgcctgcttgtatgtcggattctccaatgcgattttatgttcacctcctaagatcattccgagaagcattaaaagatagtcatttccggctccgacaataatctgctccggagtgcaatttactcctcgggcctgatgaaggtaactgcatatagcatttctaagtccatattctccctgagggcagccgagacgaaacagttctgccttatcatccacaagacactctcgggataattttcgccatatattatacggaaagcttttcagatccactccgctcggagtaaaatcataccggtacttttgttcccgttgttcattattttctcttttattattttcctgcgcatctatctgaaacaatccgtcaatctgacaaacaaaatatcctctgtaaggctgtgcctcaatataaccttcagacagcagctgttcatacgccagttccaccgtacttctgcttacttccaaatgtgcgcttaatgctcttgtagagggaagtttctctccgctttgtatccgtccttttttgatatcatcttttatatagtcatatatttgctcatagagcgggactttttgttccgctcttaaattaatcattaattcattcattctgttttattataaactaccatttattttggaagcttaaacgagctcttcaatgatacgattctgttaaacacaagatgatccggctcagaatcatgagaatccacacagaaatatccatttctcacaaactggaagctgtcatatgcttttgcaccgtcaaaactcggttccacataagcatcttttattatcgtcagtgaattcggattcagattcaacgatccatcttctttattatatacacccttttcttcatcgattaagttctcataaaggcgcacttccgctttctgtgcatactccgccggaacccagtgaatcgttccttttactttccttcctgtaaaaccgcttcccgcttttgtttccggatcataagtacaatgtacttctgttatcttaccgttttcatctttcacaaaactctcacattttacaaaatacgcatgcatcagacgcacttcatttcccgggaataaacggaaatattttttcggcggctcttccataaaatcttctctttcgatataaagttctcgtccaaacggaactttacgtatgcctaattcttcattttccaaattattcgcaacatccagatattcaacctgaccttccggataattatctattatgagtttgatcggatccaacacagccatcatacgcggttttttcatcttaagatcttcacggatacaatactcaagcattgcataatctacagaactctgcgcttttgaaactccgcacaattcgatgaacatctttatagattccggtgtaaatccgcggcgtctcaatgccgcaatcgacacaaggcgtggatcatcccatccgtctacgataccatcctctaccaattttttgatataacgctttccagtaacaacatttgtcaaataaagttttgcaaattcaatctgtctgggcggattctcaaactcgcactctcttacaacccagtcatacaatggtctgtgatcttcaaactccaatgtacagatagaatgtgtaattccttcaatcgcatcttcgatcggatgtgcaaaatcatacatcggataaatacaccatttatctccggtattatggtgtgtcatacgcgccacacgataaataatcggatctctcatatttatattcggagaagccatatctattttagcccgaagaactttctctccgtcctcatattttccttcccgcatttcttcaaataatttcaggttttcctctacagaacgatttctataaggactttcttttccgggttctttcaatgtcccgcggtattctctcatctgttctgcggtaagatcgcacacgaatgcttttccttttttaatcagttttactgcgcattcatacatttgatcaaaataatctgatgcaaaatatagcctgtcttcccagtccgctccgagccactgaatatcctctttgattgaatcaacaaactccattttttcttttgtcggatttgtatcgtcgaatctcatattaaatgtgccgccatatttctgggccagtccgtaattaagcaaaattgattttgcatgtccgatatgcaagtaaccgttcggttcaggcgggaaacgagtagccacatgatcatatactccctccgccaaatctttgtctatttcctgctcgataaaattctttgaaacagtttcgttttccattgtctcctcctctaataacgcaaacattcatagcaattatcttatcataaaattaagatatctacaagtactcggtttactttgccgcgttgatgtgatacaataagcccgctgtctaaaatatgtatcaacgcatttcattttttcaaaagtatgcgctatttttattttagaacaaatttacctgattacaaaaaacaaagaaaggcttttagttatgaaaagagaaaattttggttcacgactcggcttcatcctagtgtcggccgggtgtgctatcggactgggcaatgtatggaaatttccctatatggccggacaatacggaggagccgcattcattttaatctacctgctgttccttgtgatactcggattaccgatcatcgtatgtgaattcagtgtaggacgcgcaagccagaaaagcatcgccacatcttataacgtactggaaccgaaaggaacgcgttggcattttacaagatggtttgcaatcgccggaaactatctccttgttatgttttattccatggtcggcggatggatgctttattactgcttccggatggcaaaaggagagtttgcaggcattgattccacagtagtttccgcaaaatatgattccatgctggaatctcctgtcacactgactttttggactatacttgtaattttacttgctttttggatctgtagcatcggtcttcaaaaaggtgtcgaaaagatcatgaagataactatgctctgccttttggcaatcatggtcgtacttgccataaggtcagttactcttccgggtgcagcagaaggactcagattttacctcattccggatttcggaaaagtactcgaaaacggggtcggaaacgttattttcggagcaatgagtcaagctttctttacactaagcatcggaatgggcggaatggcaatcttcggaagctatttagataaatcccgttctctcaccggagaatctttaagcatccttctactggatacttgcgttgctcttactgcaggtttaattgtatttcctgcatgtttttcatttaatgtacagccggatgcaggtcccagacttgtatttatcactcttccgaacattttcactcagatgccgggaggacgagtttggggggctctgtttttcctcttccttttctttgcagccctgtccacgatcgtcggcgtattcgaaaacattgtttccttcgggatcgatctttttggattcagccgcaaaaaatctgtcggcatcaacattgtacttattattgtattaagtattccttgtattctcggcttcaatattttatcggggatacaaccgctcggagcagggtcgaacattatggatttagaagatttccttgtgtcaaacaatatccttcctcttggttccgttatatatcttatgttttgtacacacaaaaacggttggggatggaacaatttcattcaggaggcaaatgcaggaaacggattgaaatttcctcaatttatccgtaaatatatgacatatattcttccttggatcgttgtcatcatctacttaaaaggctactatgacaaattcagttctcaaagcaacgtcgtcttcggcgtatggatggctgtcgcatttgcatttcttctccttgttttttccgtcacacggaagcaaaaacagaccaaactataatcgtttttataaattcgctttattaagtgcagacagtaaataatatcaaaagaaagttctgtggatctccaaagaactttcttttttacagtagcgaactacatttaatattcttttgcaaattctacattgccccgttcaaaatattttcccacatcagcaaggagtcttgcaaaatacaaacataccgtcggatcaatgtccggatgttccctcctcaaatcataattctgtacaccgataaacattgtatgcgatgccttccaatccctttccaatatcgggaagaaatcttcaatatcttcacatcccgcataaaaaaagatattaatattatttttcatcgcatcaaaataccgataaaaatccggtagtttcactccctccattactctgataaaatgtgtcaatttttccaatccttcttttaaatcttccagttcctctcttcctattttcatctttccctccgcccccatagcgaaaatcaccactaaattttgtacaagtataccacacaatcaaaaaaagaacagaaaatgacaggaattcttgcattattctgtctttatcctgccatttcatatctccgagatacaagcaggcgacactgaacaacactttttaatcacagccgggcagtcctttttaaaacaaaaaagaaataattatataattatatgaacgtcttgtaatacaattctcttgacaactactgctgaatcgttgtatatttatcatgcatttgagttacatatatgctgtcttggcgcagtcggtagcgcgtcgccttggtaaggcggaggtcgggggttcaagtcccctagacagctttctgattttaatatatcgattacttctgattatctatacaaaacaggagagttagtatttcactgactctccttaaatttcaaacaattactttttttccgatgatcctatcacaacatttccgaatcaagcaaaatcgtaaacggaccatcattgatcaaactcacttccatttctgctccaaagcgacccgtctgtacgactgacacacttttcttactctcttcaattatatactcatataactgatttgctttatccggcgcccctgcctcaataaaactcggccgattcccctttttacaatttgcataaagcgtaaactgtgatacaagcaaaagacttccgcccacatcagctaacgacaaatttgtttttccctctgcatcttcaaaaatccgcagtccgatcattttctttatcattttatccgcaactgcttccgtatctttgtctgaaacgccaatcaatacgagatatcctttttcaatctctcctatcacgcttccttccacttttacagatgcctgttttacccgctgtattacaaatttcataaccttttacccgctttctctatttgaatttctcaggctcttatttctgttttgagcattttttctgtttttttcttaattctttgaagagcattatcaatcgatttcggactttttttcaacaattccgcgatttttttataatcagttcctgttaagtgcaaataaagaacctgttcttccatcgggcttaaattttctttcaatcgttcaataaaagcttctgtgtactctctgccaaaatacaatgcctcaggatcattttcccggtcaggctctatcagatcgatcagaggcagttttgtaccgtttttattcgtctcgctttcttcataaagtgaaatataagaattcagaggcatatgtttttttcgatttgacgcctcaatagcggtgtacatttgccgaagtacacatgtttccgcaaaccctgcaaatgacctgcccatgccgctgtcaaaatttcttaccgccttgattagtccgatcatgccttcctgaataagatcttctgtttctcctccgatcagatacattgcgcgtgccttcttgcggaccatcattttatatttctccatcagataatctgtcacatcccgatccccggagtgcagtttttcaatcaactgttcatccgtcagcttttcatattgttccatcctttaaaacacccttcaaacactgctttacatcttattttgcaagtctctgtctgacaatctcataagcaagaactccgcctgccacggaagcattcagagaggtaatctcgcctttcatcggaattgacgcaacgaaatcacaattttcttttactaatcggctgactccatccccttcatttccgacaacaagtccgatcggtcctgtgagattcatatcatacattgattgtccgtccatatcggcgcagacaaaccaaattcctttttctttcaattcttccattgtctttacaagatttgtcacttttgcaaccggagtataattcaacgcccctgccgaagttttcgctacggtcgccgtcaaaccaaccgctctcctcttcggaatgatcacgccatgagctccggcaatattggctgttcttataattgcccccaaattatgaggatcttcaatcccatctaatacgatcagaaacggatcttctcccctcttttccgcaagtttaagcatatcgtcaatctctgcataatcataagccgcagcgtaagcaattacgccctgatgccttcctgtctgcgtaagttgagataatctttcttttccgacaaaattcaagattgttccatgcttttttgcttccctgacaatcgtgcgtaccggaccatcctgacatccgtccaacacaaacagcttatcgatcgtccttccagagcgaaacgcttccagtactgcgtttcgtccttcgatcactaatgtatgttcttttgtttcttcaattttttcaatcgtttttctctccattttccaattccttttccatactttccagtccgatcgttacaagctcaacaagccgtttgtactcctttttcaagtaaagataacccactaacgcctcaaaccctgtcgctcttcgataatcggtgatcgactgattttttgcagccgaaacgctccttgtattccttccccttcgatataccgcatgttcttcttctgtaagatgttcctgaattgcccgcatcataaaagactgagcagacgcctgcacatacctgcttgtctcttcatgcagtttatgcacctgcctgccgcctctgcctaccactctcatcttaataataagatcaaagacacaatctcctatataggctaaaacaatagaggaacttgcttttgggtcggcctgcttcattccgggaatcagatccatataatactcaaatccatatcctaagcttttttccattttactccctctcgcgtatcttcaagaataatcccttttgccaggagctcgtctctgatctgatctgccagagcaaaattacgatctttccttgcagcctgacgtttttctatcatctcttcgatttccgaatctaacatttcctcttcttttataacgataatacccaaaacatctgtcagcagacataatctgtcaagcaggttttgcaaatattcctttgagcttgctccgtcggcagtcgtgttcatatatttgacaagatcaaaaatagccgctatcgcatcggcagtattgaaatcatcatccattgccctttcaaaagcttctacatattctgatgatttctcaaacaatctcttctccgactctgtcattttctcttctgacgtgtttgaaataaggaatttcaagttatctgccgcagtaaggattctctccaaagaattttttgctgcttccatcaactctgcactaaaattaagcggacttctgtagtgtgcactcaacataaaaaatctcaagatctgaaggtcatacttttctccgatctctcttactgtaaaaaagttaccgagtgattttgacatctttttattatcaatattaagaaatccattgtgcatccaatattttgcaaattcttttccgttcgcggcttcgctttgagcaatctcgttttcatgatgcggaaatatcaaatcctctccgccggcatgaatatcaatttgttctccgaggtattttttagacatctccgagcattcaatatgccatcccggacggccctcactccacggagattcccaggcaggttctccctcctttttcggtttccaaagcacaaaatcaagcggatcttctttttcgtcttctcctgtaacgagaagcgatcttcctcccgacctcaaatcatccagattcttatgcgaaagctttccgtaaccttcaaactttcttgtacggtaataaaccgttccgtttttttcataggcgtatcctttttcaatcaatgtggaaatcatttccaccatgccgcagatttcttctgttgcaagcggatttttcgtggccggttttacattcattgcttccatgtcttttttacattccgcaatatatcttttcgatatctcatcagcagaaacgccttcttcaatcgcttttttaataattttatcatctacgtctgtaaagtttgatacaaaattcacttcaaatcctttatattcaaaataacggcgtactgtatcaaatgcgatcatcggtcttgcatttccgatatggataaaattataaaccgtaggaccgcacacatacatttttactttgccttcttccaatggcacaaattcttcttttctttttgataatgtattataaatcttcatcataatctcctttcttttccacacatcttatctctttcacaagacgtttcaattccttatgcaatcttaaattttcttcctgaagcctcttaatatccgacaataccggatccgggagatgaatttgatccatatcggatctcggaacttttttattatccattttaacgatacgccccggcacacctactaccgtacagttcgggggcacctcttctaaaacaactgatcccgccccaatctttgaattttctccgatcgtaaaagaacctaatatctttgctcccgcgcttaccatcacattatcttccaatgttggatggcgctttccttgttcttttccggttccgccaagcgttaccccttgataaagagttacgttatcgccgatcaccgttgtctcaccgatgataactccactcccgtgatcaataaacaagccgcgtccgattttagctcccggatgaatctcaatccctgtttttcgcgccgctctttgtgaaatccatctcgcccaaaaataatgtttttttaaatataatttatgagccactctgtatctgagtattacacgaaaacttggataaagcaacacttccatatttgattttatcgcgggatcccgttcccgcacaactcgtatttcttctttaatataagatacaatacccattctgttctcccacaaaatattttttacttttaccggttaaataaaaacttcgtctcagatcagagacgaagtttttccgcggttccactctattaaaagatttttctttcactcaacagcctgtaacgtatgctaaacgaatcaggctacttttcattcacccgatcagctcccggacgcacttcacaaaccatctttgtacaggaatgctttcagcctccgacattccctctctgcgaactttcacaatctgttactctttccgttctctgctttttattcttcgacatataatttatattatgcaaattccacatttttgtcaataccgcttttctttcaaaggcaatcaaaatcgccgttgcttctttttcttttgagcacttttcctctcagacaacctcattgaaatatactcttgtcagtttttctattttctctaactcttcaccaagctcagctgtacagatcacgccctctctttcacgcagttcttccaaatcgatccttccaaacaaatattctgtcaaatccgctatcggaaatactccttgtgaatcttcggtctcctgtacatgtatttctttctcgccctgtacgcttgtcaatttccatacacagctgtttttatacaaaatagagtcaagcacagcaaaagaacattcaagagtttctgtttcatcgacgatcattgcttttaaaaattcaggcaaacaaacaattcttgccataatcatagaccgcattttacaactttttttatttaaaggagcataaattctcagcgattgctgtactctgttttcattttgatccgctttccggatattgcttttatccaacagcatctgcatcgaccgttcaaattccccttcaaattgattcagatacaacggctctcgtacttcaagtccttcttctaaggcgtaggcataaaaccctttcaacacaccgttttcccgcataagtctaaccccgcccttttcactttgctgctccaatatcatcgtctgataataggctgtatctcgctgagcatatacttgccacgaatccgaaaaatgttcctcaaaaaaatctgccatctcttctgcgtcccacaatcccgcatctgaaaattcaagcgttccttctttctgcggctcactttcacgatttctatcatctgctgtctcatcttttttgacttcttgcatgcattggtcataaatatatctaaaatcataaggtctgtaaatcgcttctgccgcaggcattaaaaatgtaaacggcactttttccgaatgcatccgttccaaaacagtatttagcagcgcccgcatatatcctcgactgcgatattcttttttcgttgcaacagcgacaatatattctgacggaaagcttttatcctccagccggatccgatatggattcaactgaagcattgaacaaattctcccatcctcttccacaacgtaaatttgattttttgccgctttaatatagtaataatagtctaggaatgccttcgtatcttccggaaatatttcttcccacaattttcgtgtcgcaatatgttcgctctgctctaatttacggatgatcatttactcgttcctcccgatgcgcgaacaacatcctccgcacatcccacaatccgaagagacatccgtactgctgtaatttgtatatttctcgatcgcacaaatcgcctgagaagaaatcccttctccgtcccctgtaaacccaagtccttcctccgttgtcgctttgacattgacctgatcgatctcaatacagagtgcatctgcaatattttgacgcattgtatcaatatacgggcgcatcttcggacgttgagcaatgatcgtcgcatcgatattttcaatcatatacctattctcatccaaaagccctcctacatgtttcagaagccgaatgctggaaatccctttatattccggatcggtatccggaaaatgtttcccgatatcacctaatgccgcagctcctaaaagcgcatccataatcgcatgcacgagcacatctgcatccgaatggcccaaaagacctttttcatacggaatttccacgcctcccaaaatcatctttctatcttccgccaatctgtgaacgtcatatcccatacctactcgcatgctcatctctcctcataatcattttctatctctgtttccgtctcttcaataaattcttccattgccaattcaggctcctgattttttccaccttcttttatcatttcatcttctgcatcttcctcgtttttgtcatttggcttttctgcctcttttttcactttatcatccgattgttctgtctccgatcctgccttatagcctgatttttccgtttctccttctgctttatcatctaacttttctgcctctttttcgatgttattaccggactgtgctgtttccttatctgttttcccctgctctgcttcttttttcatttcctcattcggaccaatttccggcaaaacattttttcttctttttcgatccgcctgatcttttcccgcatcgaatgcctctttatcttcctcttcaatcctatgatcttcttttttcagatcaaacatttttttcacataataaatagcataggctaaaccgatcaatataaagattacagacatcacacacataaaaaccatattattcggtttttcatttaccatttcaatcaacatccttatcccaagccaagctaaatatcctcctaaaacaatccgaaaggtataccatgcctttttattcattttcctcttcctccgtaattattatgtgctttattgtaacatatttttctt

SEQ ID NO: 7629 - DNA, 36599 bp, Unknown
  gut microbiota DNA sequence
aaaaccttgaattttcaataaaaaacacttgattatatgaggaggaaaaatgatgaagaaaaagatgttggcagtggcagtatgtgtgtctatgtgtatgatggcttttgcgggctgtacaagtgaatccggcggaggttcggataagaaagcagaacagacagaagggaaaaaagaagaatccggaaaagtgtttatgacagtaagtaaccaacagaatgagtttatggtcggaatggcagaaaattttaaagaggtcggagaggcagcagggtatgaagtgcagttgatggatgctgatcttgatgctacgaaacaagtatctcagattgagacggctatttctgaaaacgcggaagctattctcgttgaaccgtgcagcgtggacgggttgacgacagggttgaaagaggctcatgacgcgggaattccggtgtttgttatccataataatgtgtcggcaaccgacttggtcacatctctgattcatgtagatgtaagacaaggcggggaattgaaaatggaacaggttattaaggattgtggagaagatgctaaaattgcgattatgacaggaacgcttgggcaggatacgacaaatcagatctgcggtggttatgacgctgttcttgaaaaatacccgaatgtagaagttgtatttgaaggggcaggcaactggggagctacggatgctgcgcctttggcagaaaactggctggcttcaggaaaagaaattgacgcaatcgtctgcaacaatgatggaatggctctcggagtagtgcctgtattgaaatcggcgggaaaatcggaacagattaaagtttacggtctggacgcaacaaatgaaggattaaaagcagttgattcaggagaaatggcagcgacgatctatgttgattccaaggcagagattgaaaaagcgtttgaaatgcttgaagatctgaaagcagggaaaaaggtggatgcagagtataaagtaccgtctgtgcttgttacaaaagagaatgtaaaagaatatatgaaatagcaggtgagtcttatgaaagcagcaatatccggagagacgcttggaagtgtgatggaattagacgaaattttatctttatttcaaaaaaacgggattcattttatcgaaatatggccggaaaatattcctgtaaaagtcggaaaaacacttctgcataaacgtttgtatgcaaacagagatgtggaacaagcaaaaaagatactggagaaatatcaaataaaagcagcgtgtgtatgctttggagcaggatttgataaagaattggcgaaagatccggaacttttttcgagagaattagaacgagctgttgagatagcttatgagctgggagcaaaagttgtaaatcattattgttatcatgtcgcaatgggtccggaaatttctttttctgaattggaaaagtattatgggcgggcgatcaggaaagcgaagcataggaaaatctatctggctttggaaaatgaggctcatgatattactcaaagtcccgaagggatgaaaacgattgtagagcatatgaattcggaatattttaaaacaaattttgatgcgaccaactattatcaggcgggatatgaaggttttccgtatgcatatgaagttttgaaggagtatattgttcatgtacatataaaaaacggttgtttttatcatcctgaattcggacacgaaaagcagtgcagaggagggaaaatgacggggatgtttgcgggaaatgatatctattatccatatgcatctgacggagcggtgaacatagacggacttttgcggaggcttgaaaaagacggatatacaggtttttgtacgatggaacctcatacgactcctgaaaagtgtctggacttctacagagaagagacggcttatttaagagaaagaggaatcaaagaataaacgatatatacggcgaagatgacagaggtcattttcgccgcatttttatgaatgggcaggtgaactgtcacatttttaccggaaaattctgtataacggttgattttgatattgtacatagagtagattataagtagatgaaacaggataataaacgtgtgcaaatatagaggcaaaagcgaataagatcggggagaataacttatggaagaaaacagatgtcgagcgcggtcagttataggggaagtggagaaatcagtcgttgggaaaacagatattttaagaaaagttatgacagcaattcttgccggaggtcatgttctgatcgaagacattccgggaacgggaaagacgacgctggcgctttcgttctcccatgcaatgggacttaaggtgaatcgggtgcagtttacgccggacgtacttccggcagatctgagtggatttacgatatatgataaagcatcaggggcatttgtgtatcagccgggtgcagctatatgcaatcttcttttggcagatgagataaacagaacgtcgccaaagacgcagtccgcgcttttggaagtaatggaagagcatcaggtaacggttgatggaaaaactcacaggacaggagagccgtttattgtgatcgcgactgaaaatccggtaggttccgccggaactcagcttctgccggagtcacagcttgatcgttttatgatctgtgtgagtatgggctatccgacggcagaagaggaaattgagattttgaaacgggaacagtcaatagaaaaaacgagagaacgaatcgatccggttgtcaatgcagaggaattgatccaaatgcaaagagaagttaaggaggtttttgtacatgaccggattttcggttatattgtggaacttgcaaaagcaacaagggaaaatgaatggacagagttaggtttaagtcctcgcggaactgtcgcgttgacagctatggcgaaagcatgtgcgtggctgaatggacgggaatatgtcgttccttccgatgtacaggaaatatttccgtgtgtcacagagcatcggatcattctgaatatgaaagcgaaggtaggccatataaaaaaagaagaactgatccggcgggttctggagagtgttccgactccgacaatgagacagaaatattgaggatgaacagatgataaaaagaataatcggatatctggcagttcttatacttacgatatatttattttttatgtataacgatactgtaatctcaggacttcttatatttgttataatgtatccgcttttatcattttggtttttgatgatccagcgaggaaaagtcggaacagatatgacgcgtattccttcgatgggtgaagaaggaaagacgataaaagccgggattaccgtaaaaaatcaatccgcatggaatatgcggtatgaagctgtgatccttgtgggaaacaagattgaagaaaaaaagaaacagaagcggatacggggagtgatacaggcggaaaatgtcagaacattttggtatgagctgccggggaatatttgtggcagtatggaaattacgttgaatgaaataagaatttatgatcccctttgtattttttatatcaggagaagagaggctgaaacagtatttgtgaagatcatgcctgaatttgaactgatgcctgttgagatcacaagaaagacgagagaatttcaaacagatgcggaagaatattcctgtgagaaaaagggagatgatccttctgaaatttatcaggtgagagagtatcgaagagaagattctttaaaagatattcattggaaactgactgccgcgaaagaagagcttgtagcaaaagagagggcgtttcctttaggatgtgccgtactgatctggtttgacatcagagaaaaagaatgtactgcgaacggtttttctaaaatgctaaagacagcatcatcattatcgatcactcttgttgaagaaaaatgtattcatctggctgcgtggtatgaagaggatacagaacagattgtgactgtgaaagtgaaagatgaagaaagctgctgtcagatggtatgggaattgatcgatataaagccgtgcggaaatacagagaaaagagattcctatatgagggagcgttttaaaggggcagagtttagcagtatagttacgatcgatggacagggacagattaaaaaagatgggaaagaagagttgtttcttcgtttataaaagtggggatgccgatgtggaaaagaaaaatccggaaataaattttgtgaaagcgcttagtgctgtttgtgcagtcttattatggcggaatgcatttttatctgtatttgatttggaagcgctggcaaatcaaataggacgaaaagaaatcatttttgcagagattgccgtgagttttgcggtatttattttgttgattgcggcattcaaagtaaggaggctgcgcgtaattgcttatttggttatttttgcaccgtttatatctgctgcatgcgcgcgaaaatttccgccgccatgggcgtcgtggatgttggtttttgccgcggtattgtatggaacgtgctgtgcaatggaaggatgcaaagctaaacaggtttttcgttcacttgttttgatttcggcggtctttgggattgctgcgggaatttctgtttttgcgggaaaacagatcgatcagatcagagtaggcgagaatggattttatcaggaaacgagacagaaaatcagagagaacgtaatcggaaaagcagaagaactggctgaaaaaataaaaaataaaaaagacggcaaaaagttagatgaagaaaaaacagatgctgaaagcaagcatgacagagaagatatagaagaaaaaaatcctttccggccggaaaatgatccgacacaacaaaacggaaaaaatgacaatatgacgtcgggcggaaaaatggacgatctcaaagctatttcttcttttaagccgtcttcggaagtgtctacatgtgttgtgcttgagaaaaagaaaacatacctttatgataggtgggggacgacttatgaggacagtgcgtggacaaatgaaaaactagaagaggtagtgtattcttcaaagtattattttgaagaagaaaaagaagagctatttttacagtatccttcggaacttacccgtatgcaaaaaatgtgcgaaggatgggataagagttcgttttctgctgtgaaaaatcagattgacgaagctttgtcgaatatagtttatgatacgaatcctgggaaaacgcctgcaaaatgggattttgcagagtattttctgtttgaaaataaaaagggattttgtgtacattttgccacaacagcagctttactttacaggatgtgcggctaccagtcgatttatgtggaaggtttggtagttccggcttctgcgtttaaagaaaaagaaaacggaacttatgaggcgcaggttgacggaacaatgggacatgcatggtgtgaagtatatgatgagaaaacaggagagtggatcacaatggaacatacgccggcatcttcaagaaacgagatgcagggagcggatgcggcaaaacaaaagaaagaaaacagttttaaaagcaatcaggtttttcggttgattgtgtgtgttgtttttgtggcgggggctgcgtttggaggcgtttttattcaggctgtagtcagaggaaaacgtcacaggagaaagattgggacgactcggggcggaatcggtattcttacaatgtatgacgatgtagttaaagttgcaagactgacggaaaaaccaaagaagcagattttcggaaacaggcattcggatacagatgattattcggaagtttggttgaaacatctgaaaaaacagtatcctcagatttcggaggaagagtggaatagtttttatgaagaagtgcggcgcattttgttttattatccgacaaaagaccggagaatatggaaagaatcctataaattgtatcggaagttttatgctgaggcaaaaaggcggatgaatcccggaatgcggctgcttctaaaatatatttattgcattgaaacgcctttttgtgaaaaagatgcaagttttatgaaaaagaaaaagaaaaggagaaagtaaaatgataagaaaaatgagatcagaagacaaaaagacttatatggagatggcgagagagttttatcattcggatgccgtattacatccggttccggacacctattttgaacggactgcagatgaggcgcttcgctctgatgtctatgccgagatatttctttttgaatgtgaaaacgaagcggcgggatacgggctgatcgcgaaaacttattctcaggaagcgggaggaatggtttggtggattgaagaagtgtatgtgcgggaagcgtttcgttccaaagggatcggaagggaattttttgcatatcttgataaggtgaaaggctcggcggtgacaaggatgaggcttgaagtggaagaagataatacaagagccgtagctctgtataaaaaacttggatacaagcctttggaatatgcgcagatgatcaaagatgctcccttgaagtaaaatcgtttgaaaacagagcattttagccaaacagagatatcgtatacttgtatacaatatctctgaaattcttttaataccccattgcaagaagagacagaacaatgttataattcatagtagcgtacttttgtccgagggcaaaagacagcagtccgcgatacgttcatgcccggactgctgcaaaaatgatgagtaggtgacagatttgaagaataagatcaaacgatttgccaaaggcgactttcatattccgcagccggaaattatatttccggaaacacatattgtaatgagagtcggagaaggggaaaaatacagaggaagtttttcattgaaaaatcagggggaaggaacgatcagaggtcttgtctatccctcttcttatcgtgtgcagtgtgacgaacaaggtttcgacgggaatcctgtcaatatatattatacatatgacggcagcgggttgatgccggggcatgtcgaacatgggaagtttacgatcgtttgcaacggcggcgagtatgatgtcgcatttaccgcgattatcgagaaaccgtatgttatgacgagctatgggaagatacaaagtcttgacgattttaagaagctgtcttttcgggatgcggctgaggcagtaaagctgtttcgctccagagatttttacgaaatactgaaatacgaagataagcggatccaggcgctttatgaaaatatgcggaaatgggaactggatcagcaggctttggaagaatttctcgtaggatgtaagcaaaaagagaagatattcctgacacttgaggaggaaagccgggcgtttatgtcgctttcagaggcgcggaaagagacgtttactatcagaaaaaatacgtggggatatttagaaatcgacgtacatacagaaggggaattcctctctgttgaacatacccgtgtaacgacggaagagtttatcggaaattcataccggctggaatattttctgaatgtggaagcacttcatccgggaagtaatttcggcaggatcatattagaatctccgtacgagactcttacctatgaggttgtcgtagaaaaagatataagcagagatgaggattatcgtgcaaacgacagagagtttgcgggaattgttaaaaactatttaaaatatgaaagtggaaaactggaactgaacgaatgggtcgaggaagcaatccgtcggatcagccatctgagggaagttgatgacagaaatgaattctatcttcttgcgcatgcacatatctgtctgatcggaaaacgtttggaagaggcgaaatggcttctcgaatcatataattataatcgctttgccatcggtaaggatgtggaacttagttcatattatttgtatttgacaacgcttttgtcaaatgacacgatcgggcagcgaaaggttgcggaagagctttccaagtcatttatgaagcatccggatagttggaagattttgtgtatgcttgtggaagtggattcggagtataaaatatacagtgaacgtcttcgggctttggaaaaacagttttatgatgaaaagtcgcatagcgtctggttctatttacaggcgtttaaatgttacagggaaaagagttcttctctgaaaaagctcggaatgtttgaagttcgggttcttctgtttgcagtcaaacataaactgatgacaagagaactggcgctttacactgcaaatcttgcaagtcagatgaaagtttttgacaaacagttatatgcggttcttgtcggttcttataagatgtataaggaatcgatgatactgacggcgatctgtactcttctgatcaaaggaaactgtgtggaaagctgttattttcagtggtatgaaaaagcggtggaagcagagcttaagattgctcagctttatgaatattatatggcttcggttgttccggcggattttcacaaagcgcttccgagatcggtatatttgtattttatgcacggaaattcattggattaccataaatgcgcatttttatattcaaacttgatcacatatgaagatgaaagcagcgagatttacgctcattacagagacgagatggaagcgtttgcatggaatcagcttgaccggagaaatgttgacgaacagcttcgtatcatttataaacggtttgtagtagaggcatctatgaatcctgaaagggtaaaagcgctttatgatgtatgtcatgcataccggattacgacgaaagtgccgaatatgaaatttattcatgttattgcagatgacggcacgattactcagaaatcaccgtatacggaaaacggagcgcgtgtattcttgtatgcgaaaaccgatcggcttgtgtgggagtcaaaagacggaaggcattatacagattctatcccatatgagagtcagagacttttttatgagcttcgctatatggatatgtgcaggaaatatattaacggcctgagaagaacgcgggaggaagaagaagttcaggaactgacgacagagatcgtcagagaaaacggagttgaaaattacgaagaagatgaacttttgggactttgcagcaaaacgatcagagagaataattatgagaatgatgattttcttacatatgtctgctttgaattgtttaaaaaaggtcaatatgacaaggtgatcctgacgtatttggcaagctattactgcggcgcgacatctgatatgaagatgctttggagagaggcgcgggattatgaagtacatacgcataagctggcagagaggatcctgacacagatgctcttttcggaagaattatttcaggaagcgcaggtgtttgagcagtattatgcggaaggtgcatatttcaggcttcagcaggcgtatcttgtgtatatgtcgagagaatatgtggtggaagaaagaaaaatcagcaggagtgtgatcgatatcatctgccgtgaatatgaaaagggcgaggatacgatcgatatatgcaaagtagcggtattaaaatactattcgacgagagagtacagtccgcagacaagaaagacgttaaagaaattccttcaggaattgtgtggaaagcagatttattttccgttctttctttcatatgaaaaagactggctgattgaactgcagctttgggataaaacactgatcgagtataaaggtcagaagggaagcagggtaatgctttattacagcctgcaaaaaggaggagaagaatcgtccgattattcgacggaagtgcttactccgatgtatgaaaatatttatgtgaaaaagtttgttctttttgcaaatgaaaagttaaaatattattttaaagagacgatcgacggaaactcttacagaagtgataaggaactttgtgtgcgggaaactgttcagggagaaccggggcgctatggaagactgaatgatatcctgatcgagaaaaacgaaagtgagcgcaagaaaaaaattcaggcatatgcaagagaagatgcggctgcagcgcagatttttacaaaagaacaggcgtaagattaaacaataggaggttgttttttcatgggacagggaagtatcatcggatatgagataaatgaaaaaacatgtcagatcagtttttataacgaaaaagacttggagccggatacgctggaagtggatacggacaattatcagattccgcttatcataggaaaactgcgagacacgtgggcgtatggaaaagaagcgaaaagacttgttacgatcaaagacggatttaccgcaacgagacttctaagcaaaagtcttgctggggataagatcgagtttggagaagaaacatacgacgcagtgtggcttttatctcaatttattcagatgtcgcttcagtcatttccggagatcgacggtattgtttttacagttccgtctctttcggaagaaatggcgcagatgctcagaggaatcgccgtacggatgaatattgataaacgtaatatttttatccaggattacaaggagagtttttgcaattacctgttttatcagccgaaggaattgtggcagtatgacgcagcgctgttttgctgtgacagaaatgagatcaaagcgtatatgcttaggaggcttcggccggggctgggaggcggaaaaacgacgtttgttacagtagatgaagtggcaagcgctcacatgaaggaacttgcgatggtatatcctgtcttgaatgaagataaggcaaaagaagcggatgcaatgttcagcaaatttatagagagcgtatttgacaaacggattgtttcctctgtatttttgacaggagaaggttttgaaaacgactggtatccgaaatctttgcgagtgctgtgcaacgggcggcgagcatttatcggtaataatctctacagtaagggcgcttgttatacagcgtatagaaagttgtatatgcatattgaaaatccggtatatctgtcagaagataaactgacggatcagattacggtcaatatgcgggttggaggccaggagatgtggtatccgatcgtttcatgggggaaccactggtatgagtcgaataatcagtgggaagtgctcatggaagacgtagaagacatcgagcttcggattgagtctcttgttcagggaaatgtaagaacggaaacactgtctcttgacggatttccgaaaagggcggagtattccatgcgtttacagcttgagacactgtttcttgatgaaaaaacatgcagaatttccgtaagggatgccggatttggagatttcttcccggcgacagacttccatgcggagaagacgatacatttaggaggcaatgatgggaaatttaattctttgtcatgacagacatgcggcacatccgtatgagattacgcgcatccattgccgtatttttacaatagaagaattgtgctactatctgtgtaataatttatatttgatcgattatacgattatgaacgggcagctttgcgactggcttgacgaggaactggagatgaaggcgcttgcatcagagttaagagacgttcttcgtctgcacggttcggttgaaaagtttgttttaactattttgaaatcgtctcgtttgtatcgtgagccggagatgattcgtattcagaatgttttggaacatttgaaaaatcaaaaagatattgaacggcagaaatttaaaggcgacaatcttcttgaaagcggggaagtggaagaggcgattcttgtatatcaggctattttaaacggggaaaaagatgagactgtagatgagaagttttacggaaagatttatgcaagtctcggagcggcatacggtcgtttgttcctctatcaagagtcggcgaaaatgtatgattgtgcatatcagatctgcggggataagacgttgatcaagccgtatctttatgcgtcgtacaaatatatgtcgcttgaagaataccatattttgattacaaaaagcgaagaatatatggaaataaacgcccagatgcgcagggaagtagataagatcaaccaagaggtgtctgtagaaccggaacccggaatcatggaaaagtggaaacgaagtcatagaagaagtcatgcataatatatattggcagatcagattacaatctggtctgttacaatcggtgagaagaaagaccctctgtgtgttgacacggagggttctccatgttagaatacagaggtaactttactgtggtacagtgactcattagtaaagaaagaaagcgagaactataagtttggttgtggaggttatctatgaaaagaagagtgttaagtgttttgttgtgtgcgggacttgttgtttcagtgttggcaggatgtggttctgatgatgcaaagaaagattcgggaaagaaagcagcttcagaaagcgatctcgattatgtaaaggaaaaaggaacgcttgtcgtgggaatcacaaattttgagccgatggattaccaggatgaagaaggcgaatggatcggttttgatgcggatatggcgaaggcgttcggagagagcctcggcgtagatgtagagtttgtggagattgactgggataataagatcttagaacttgacgggaagacgatcgactgtgtatggaacggaatgacgcttaccgaagaagttacaagttctatggaatgtacagacgcatacttaaataatgcacaggttgttgtacttccggcggataaagcagataaatatcaggatgagaaaagcctgtcagatctgtcgtttgcggtagaatcgggaagcgcgggagaagatgaagtggaaaatcgcggacttgatttcactccggtgacagcacaggcggatgcgttgatggaagttgcggcaggtacgtcggatgcggctgtgatcgatcttctgatggcgacggcgatgatcggagaaggaacaaattatgcggatcttgcttatacggtaagattaagcgaggaagagtacggcgttggattcagaaaaggttctgatcttgcaaaagctctgaacgatttcttcgcagagtgttatgaagacgaaagcatagtgaaatgtgcggaaaaatataaccttcaggatatgcttgtgaaataagataaaagacggagttgtagacaaaaaatggatttgatattagaacagtttccgattgtgtttaaatcactgaatatcggatttctccagacattaaagttgttttttgtgacactgctcggagcggttccgcttgggcttgtcattgcattcggatcgatgtcgcggtttaaaccgcttagttatctgacgaagattattgtgtggatcataagaggaacgccccttatgatccagcttttgatcatctatttctttccgggacttgttatgggaaacaatatctggggcgggggagaagccggacgttttcttgcggcggcagttgcatttatttttaattacgcatgttatttttcagaaatatacagaggcggtattcagggagtaccgcatggtcaggaagaggcggggcttgtgcttggcatgacgcgaagtcagatttttttcaaggtaactttgcttcagatggtaaaacggatcgtacctccgatgtctaatgagatcattactcttgtgaaagatacgtctcttgcccgcattattgcgcttcaggaaattatatgggcaggacaggcatttctgaaaggatcgcagggaattgccggagtcatctggccgctcttttttacagcggtatattatctgatctttaacggtattttgacagtgcttctgggacgtcttgagaagaaactggattatttcaagtaggaggtggagcgtgtggcaattcttgaagtagaacatttgagtaaaagttttgatcgaacggaagtgttgaaagacatcaccttttctcttgagaaaggacaggttctttcaattatcggttcttcgggaagcggaaagacgacgctgcttaggtgtttgaattttctggaaagaccggacggtggatcgatcagtgtaaacggagaaacattgtttgatattcatgatcccataacttcacaggagggagaaattcggaaaaaacggcttcatttcgggttggtatttcaatcgtttaatctgttcccgcagtatacggctctgaaaaatgtaatgttggcaaaagagcttctcgcaaaagaacaaccggattataaacaacataaaaaagagatccatgaggagattgaaaaagaggcaaggaggcttctgacccagatgggacttgcggatcgtatggaaaattatccacatcagctttccggcggacagtgtcagcgtgtcgcaatcgccagagcccttgcgttaaagccggatatcttatgttttgatgagccgacgtcggcgcttgatcctgaattaacgggagaagtgttgaaagtgatccaaagtcttgcagaccaggagacgacgatgatcatcgtcacacatgaaatggcgtttgcaagagatgtgtccagccaggtgatttttatggatggaggatgtattttggaacaggggactccggaggaagtttttgaaaatccgaaagaagagagaacgaagcagtttttgtctcgttttactaatggatgagtttctaaataatgttttttataaaaaagtaataaataatactttgtttataagaaaaacttattaaatggcaatgaataaaataatgagatgacagaaatacaaggcggagggtatgttgattttccctccgccttatattataatcggatttgcgggatgtattaaaaataagacatgccgtatactaatcactccagatttgaaaaattaatgaaaaggacaggtgtggatgttatgaaaaaattagaacagctctatgaaggaaaagcaaaaaaagtatttgccacagaggatccggatgttgtgatcgttgattataaagatgatgcgacagcttttaacggggagaaaaaaggaacgatcgtcggaaaaggcgtgatcaacaaccgtatgacgaattatgtattccaggttttggaaaaagaaggagttccgacacattatgtagaagaactcagcgatagagagacagccgtgaaaaaagtggagatcgttccgcttgaagtaatcgtgcgtaatgtggcagcaggaagtttttctaagagactgggaatcgaagaaggaagaaaactgctcgcaccgactttggaattcagttataaagacgatgatctcggagatccgctgatcaatgattattttgcgattgccatcggagcggctacaagagaagagatcgataagattacagagtatacatttaaagtaaacgatgttttgaaaaagttctttgacgaagcgggaatcgatctgatcgactttaagatcgagttcggaagatatcacggagatattattcttgcagatgagatttcaccggatacatgccgtctttgggataaagaaacacatgaaaaacttgacaaagaccgtttccgcagagatatgggaaatgtagaagatgcttatcaggaagtatttaaacggatcggcatcaaataagaaaaggattgtatgatacaaaaaggagagaaccagacatgagcaatgatcgttatgtaagtcctctttccgaacgctatgcgagcagagaaatgcagtatattttctccccggataagaagttccgcacatggagaagactttggatcgcactggcggagacagaaaaagaattaggactcaatattacggatgagcagattgaagaattgaaaagtcatgcagatgatatcaattacgatgtggcaaaagaacgggagaagatcgtacgtcacgatgtaatgtctcatgtgtatgcatatggcgtacagtgcccgaaagcaaaaggaatcattcatcttggcgcgacatcctgttatgtcggagataacacagatattatcgtgatgtccgaggcgttgaaacttgtacgcagaaaactgatcaatgtaattgccgagctggcaaaatttgcagaagagcagaaaagtcagccgacacttgcgtttacacatttccagccggctcagccgacaacagtcggaaagagagcgacactttggatgcaggagttcgagatggatctggaagatttggattatgttctcgggagcttgaaacttctcggatcgaagggaacaacaggaactcaggcgagttttttggagctttttgacggagatcaggaaacaatcgataagatcgatccgatgatcgcggaaaagatgggatttaaagcttgttaccctgtttccggtcagacatattcaagaaaagtggatacgagagtgctgaatgtgctggcgggaatcgccgcaagtgcgcataagttttcaaatgacattcgtcttctccaacacttaaaagagatcgaagagccgtttgaaaagacacagatagggtcttcggcgatggcatataagagaaatccgatgagaagcgagcgtattgcatcactgtcaagatatgtgatgattgatgcactgaatccggcaattacatccgctacacagtggtttgaaagaacattggatgattcggcgaataaacgtctcagtgtaccggaaggatttcttgcgatcgacggcattcttgatctttgtctgaatgttgttgacgggcttgtcgtttatccgaaggtaattgagaaacgtctgatgtcagaacttccgtttatggcaacggaaaatattatgatggatgcggtgaaagcaggcggagatcgtcaggaacttcacgagcgtatcagagagctttcgatggaagcaggaaagaacgtaaaagaaaacggtcttgacaataaccttcttgagttgattgcggaagatcaggcctttaatatgagcttagaagatctgaaaaagacgatggatccggcaaaatacgtaggacgtgcaagagagcaggttgacgcttatctgaaaaatgtcatttatccgcttttgcaggaaaatgaaaaagagcttggtatgaaagcggagatcaatgtataattgatgctgttcatattaaaaaatattatatagaaatgtgctaaggagtgttgcaggggattgcagcattcctttttctttggtattttatcatagtgaagtaatggaaaatttttccaaagcaaagcgaatgagaggatattaaaagatggaattttgtggtgtgttttatgagacaggatatttaagggcagtgtatgacagaataagaaaactgtttttcgtttttcttatggcagccgttttgactgtcggtatgatggggcagggaatggagacgataaatttcggaagtgttcggctgaaagatatggcaggaagagctgtcgccgaatatgcggcgggagtaggaacaacaggttcttttatgatttcggtaaccgagattcagatttcggcagatgtttcagctgatcttttcactgtgcctgcggttatatcggagcgctcggaagatttgaatacgggaaacagcgcggcagttgttttaccggttgaagatgcgatatcggatgctttgatggctgaagaaactatatcgaacattttgcctggagaagaaaccgtaccggatgctccgatcattgagacgattctgccaaatgatccgccgatcagcggagaattgtcagacattccggtaatcgatgaaaatatatcggatgatccggctttagaagaaggcggtgtaggagataaaacagtaataggcggcggatttgttacagacgcgtcaggaatgatttgcgggatttctgatctgtcggttatttcggaagacggatatctcatacttccttcagaaggatgtaggggaattgcggcaggagcattcgcttcctgtaaagatattatttcagaaatctatattcctgctaatatatcagagattgaagaacgtgcgtttacagatttgacttcacttggatggattgaaatggagacctccgcaggatattatacagaggacggagttttattttcaaaagacggaacgtgtcttttggcatttcctccggcaagaacgggaaattataaagttccttcacatgtgacagaaattgcggacggagcgtttgaccgggcgggaatttccgtcttggatgcttctgattgttccgttttagaaatcaggagtttgccgtcttatattgaactgagacggtgaaaagaaagtatacagcgtcttgaacattttttgcagttgttttataatgttgcctgtaagttttatacagaagacggttctgtgacagaaaaatgaaacggccagagccgggacactgcacagagcaggaaaatagaagaaatagaagtggagaaaaaacatggaaaataaagtaagaacaagatttgcgcccagtccgaccggaagaatgcatgtggggaatttaagaacagcgctttatgcatatttaattgcaaagcatgaaggcggagattttattttaagagtagaagatacagaccaggagcgttttgttgaaggcgcgcttgatatcatatacagaacaatggaaaaaacaggacttcttcatgatgaaggacctgataaagacggaggattcggtccgtacgttcaaagtgaaagacaggcatccggactttatctggattatgcgaaacagcttgtagaacagggagacgcttattactgcttctgtgataaagagcgtcttgaaagtctgaaaacatcggtttctgacgacggaacagatattgttgtttatgacaagcattgtctcggccttagtaaagaagaagtggagaaaaaccttgcggaaggaaaaccatgggtgatccgtctgaatgttccgaatgagggagagacaacattccatgacgagatttacgggaatattacagtgccgaacaatgagttggacgatatgatcctgattaaatccgatggatttccgacatataactttgcaaatgtaatagacgatcatcttatggggatcacacatgtcgtacgtgggaatgaatatctttcgtccgcgccgaaatacaatcgtctctatgaggcgtttggatgggaaattccggtttatgtacactgtccgcttatcacagatgaaaaccataaaaaattaagtaaaagatgcggtcatgcttcttatgaggatttgatcgatcagggatttgtgtctgaagcggttgtgaattatgtggctttgcttggatggtgtccttctgacaacagagagatcttttctttggaggaattagtagaggcgtttgactatcgccatatgagtaaatctcccgctgtgtttgatacggtaaaattaaaatggatgaacggcgaatatttaaaggcgatggattttgacagattttatgagttggcagaaccgtatttaaaaaaggcagtcacgaaagactatgacctgaagaagattgcggcgcttgtaaaaacaagaatcgagatccttccggatatttgcgaacaaattgacttctttgaggaagttccggagtatgataacgaattatacagacataagaagatgaaaacggatcctgagaaaggactcgtgcttttgcgggaagtgcttccggttcttgaagcgcaggaagcgtttgacaatgattctttgtttgagacactcaaaagttttgcgggagagaaagaatataagatcggttatgttatgtggccgcttcgtactgcagtatcaggcaaacagaacacaccgggcggagcaacagaactgatggaagttctcggaaaggaagaatctcttaaaagaattcgtgcagggatcgagaaactcagccagactgcagaggcagaataaacatcggtcaaagcgaggaatcagatgggatttaataaggcacaaaatgaagcgatcatgcacggaaaaggaccgtgtcaggtgttggcgggaccgggatctggaaaaacgctgacgatcgtaaacagaattaaatatttgatcgaaagatatgaagtaagaccggaagagattctggtcgttacttttacccgttttgcggcggcagagatgaaatccagactttgcagcctgatgggaaaatcaaatgttccggttactgccggaacgtttcatggcatttattacggcattttaaagtgggcatacaggcttggaccggataatattttgtcagaagaagaaaaatatcgaattcttcgaagagtatcggaagattgcggaacagaggcggcagaggaagaagattttctgcatgatattgcggaagaaatcggacttgtaaaaaataacgggctgaaaataggacagtttgtttccaagaaatgcagacaggatacattcagagaattatatgaaaaatacgaagctcaaagaaaagctgtcaggaagctggactttgatgatatgcttgtgttgtgcaaagacttgtttgtaagccatcctgatgtattgaaacaatggcagacaaagttcaagtatatattagttgatgagtttcaggatatcaacagagttcaatacgatgtgattcgtatgctggctcttccggaaaataatctttttgtagtcggagacgacgatcaggcaatttacggcttccgcggagctgattcggaatttatgtttcgattttcggaagattaccctcaggcaaaaaggatcatattgaatataaattataggtcatcgggaaatattgtaaaaaactcgatgaaggtgataggacataatgaaaagaggtttctaaaagagtttcagtctgtaaaggaaaacggattctgcgtgcatgtgcaggaagtgaaagacccgaacgaagaggcgcagtacgttgcggacgagatagaaaaacgtgcagaactggggatttcgtatgaagagatggcagtccttttccgcattcatacagatgcgcgtccggttgccgaagaatttctggaacggaagatcccgtttcagatgaaagagcggcttccgaatctatacgaccattttatcgcaaaagatatttgcgcctatttcaggctggctcttggaaatatagaacgaaatgatcttttgcaagttatgaaccgcccgaaacgatatataggaagagacagtgttgcatcagggaaaccttcttttgaagaaatgagaaaattttattgcgataaagaatggatgctggatcggatcgatcaatttgaatgggatgtaaaaatgcttcgaaaaacagcgccatatgcgggaattaattatatacgaaagcggatcggatatgatgattttttgaaagattatgcgtttacgagaaaaatcgatcgagcgaatctcaatgaagtgctggcagagctggaggaggctgcgcgcccttttgcaacgatagaagagtggtttcgtcatatagaagaatatacgcgtttgctccggctaaagtcgatgaagagacaggaagacagagaaggggttcgtcttatgacactgcattctgccaaaggacttgagtttgatactgtatttctcgtagaagcaaacgaggggaagatgccatataagaaagcaaagacggatgctgagacagaggaggaaagaaggctgttttatgtcggtatgacgagggcaaaagaagtgttgaaagtatcttatgtaaaaacaaaaaacgggaaagagacaagtccttcccgttttgtagatgaattattagaatagggatgagcggatgaaaagatcagtcctcaagctcgtcgagatctatatccgcaaaatcctgttcttccatcaactcattaaatgcatttgaaacacgttcaaattcctgatcgtcttcgatgttttccagatccggctctgcgtcttcgccattgtcgatgaaacgataaagaaatacttgtccatcgtcattgtctccgttttcgtcaagcggaagaagggcgatgtattctctttcttcggcttcaaagatggaaagaacggcacattccagttcttcatcattttcaagtgtcagtgtaactgtgattgcttcattttcattcatatgattttctccttatctgcatatcgtgtgttttataagatggtatcagaaagaaagagaaaaagcaagaagcaacgtgattgtattgacattcatttgaaacaaggtagaataaaataagaacaaaaaacctatacggtaaagaggagacgacatgaaaaaaagagtgatcgaatttatattgctgacggtatttgccgttctttttttatcaggctgcaagaaaaatgtaggaacacccgaagataatccggttgtagaagaagacgaagagtctgtggaacctgcgaaagattatttgtacggatacagttgtgcggatctcaaagatccgttttatatggctttgaaagatgctatcggggttcaggcagaacaaaacaaagggcagtttattgtgcgtgatgcggggaatgatccggtgaaacaaaatgaacagcttatggagatgattgataagggagcagacgttgtttttcttacggcatctgatcctgatgctgtcacaccggctttagaagctctggacaaagcggatattccggttatcttacttgaaactcaagtgaaagaacgcgacctggcgaaagcgtttatcagttcggacaattataatgcaggaaaagtgtgcggagaagatttgaaagagaagatgcctgacggaggaaagctcgtcattgtggaggataaggcagaccaaaacttaagcgaaggaatttcaggatttgaagaaaagatcaaaaacggaggatttgaagttgttaagcgtgttgacggcgctcagacagatgggatgacaaaagaattgaatgaaattttgtcatcaggtacaaaggttgaagttattatgtgtgcagatgatcagatggctgaagcggttcgcgcgactgtgaaagagagtggaaaaaacgatattctcatctatagtatcggcggttctccggcggcaaaggcagcgcttttggctcaggaaggagcgatggcgggaattggagcacgctctccgattattgaaggaaaaattgccgtaaagaccgcagatgcaattttagatgacggttcctatgaagaagaggttttgatcgaaacattttttataaataaagagaatgtagagatatacggaacagatggctggcagtaagaaaggaaacggaatatgagaaaaacagaaggaagtccgcttccgttcggagcggctgcaaaagaaagaaaagtgaatttttctgtgcaggttccgatgggaaaaacgtgtgaacttctgctttacagagaaggaaacacaaagccggaagtctgctttgacatgccggaggaagaaggcataggagaggtacgtttcctaagtgtagaagaaattgatcctgaaaaatacgaatataactttttgatcgatggaaaggtatgtacagatccatacgcaaaagaaattgcaggaagggaagtatttggaaaacggcagaacgatgataaacatggcgtacgggcgaaaatacaagtttcagattatgattggggcgaagatcgcccgattcggcatccatggaatgaagtagtttcatacagtatccatgtgaggggctttacaaagcacagttcctcaaaagtgctgcatagaggaacgtatcaaggggtgatcgaaaagattccttatctgaaagaacttggggtgaaccagatccagtgcatgccgatttatgagtttgatgagtgtgcaaaaacaaagattaattattggggatatggtccggcgttttattttgcgccgaaggaggcatattcttcggacggatgtgctgtgcgcgagttgaaagatatggtaaaagcatgtcacaaggcagacatagaggttgttttggaaatgccgtttgctgcgggaatttccgagcaagaagcggcggagtgtctgcgcttttacatgatggagtatcatgtggacgggtttgtggtcaatccttatatcgtttcatgggaacttttaaataaagatccttttttgaaaggtattcgtttgatgcgcaaagatgacgggtttcaaaatgtgatgcgccgttttttaaaaggcgatgagaatatggttaatgatgtgatctcatcacttggtcacaatagcgcttcggacggaaaatgtaactatattacagcgcagaccggttttacattgagagaccttgtatcatatgactgcaaacataacgaagaaaatggagaaaataatacagacggtcctgactataattatagttggaattgcggcgcagagggacagagccgtaaaagaagtgttgtgaatctgcggaaaagtcagatcagaaatgcgtttcttttgttgttgttggcgcagggaacaccgtgtcttttgtcgggagatgaattttacaatacgcagaaaggaaataataacgtttattgtcaggataatgcaacggggtggcttgactggagcaggcttaagtctgacagaggattgtttgattacgtaaaagcgttgattacatttcggaaaaatcatccgtgtttgtgtcagaaagaaccgttaaaaggaatggatcgtacggcatgtggaatgccggatgtctcttatcacggagaaaatgcatggcaggtaaaaaacgaagtgtcaagccgccagttgggcgttatgtattcaggagcaggcgttggagactgtgattgctttgtcgcttataatatgcactggcttcctcatagttatgcgcttccatctccgggaaaaggaaaatgctggcatttggcgttggatacggacagaggcgttctgtcaaagagtataaaattggaagatcagaaacgtatcgagatcagagagcggagtattgcagttcttataagctgcgaggaagataaaacagagttacggaatacaaattttcactccaaaggtaagaccgcggagaagaaatctgtttcggaaacagaaaaaacagatatagtaacgtctgatgccgaaaaagaaaagaaatgcagacaggagtaaagaatatgaaagcgatcaaacattttcaaacgatcacaaaacataaaattctcgttatgcaggaatgttttcgcgtaggtttgtatcggcagggacttcttcatgatttgtctaaatatggatggacggaatttcgagtcggatgcaggtattatcagggaacaagaagtccgaataatgcagaacgggaagacaaagggtattcttctgcatggcttcatcacaaaggaagaaataagcatcattatgaatactggcttgattatgattctcacggagaagggaaactggtaggaatgaagatgccggtcagatacgtcgtagagatgtttatggatcggatcgcggcatgtaaagtatataaaggagcagcatacaaagacagcgatccactgatatattataacagtggaaaagcgggagatatgatgcataaagatacgaggaaacttttggaaaaacttttgcatatgcttgcggaacaaggggaagagacagtgttttgctatgttcgccgggaaatattgaaaaagaaatgaaagatataaaaataagccgttaaaaaacggcttatttaatatttatcagaccggataattcagttgttcttcccgaatatccgtcaatacttcttcaagaaattttcgggcaaggaagtttgccatcggaagattcatatcaagataatttccgcagtctttggcagatgctccagggacttctcccttaaaagacgcgataaaagaaaacatttctttcataagaggtaagatctcagaagaagtcagatcatctgcaagaagaagatagaaaccggttctgcatcccataggaccaaagtagatcacctgatctttatatacttcatggttgcggagaaatgtggcgcccagatgttcgattgtgtggatttcggcagtattcatgacaggttcatcattcgggcttgtcattcggatgtcaaatgtcgtgatgatatgaccgttgacagagtcttttcttgatacatagattccgggaatgaggcggatgtgatcgatcgtaaaacttgtgattttattcatattgatgttcctttcttatgtttgttgagccatacgccctgattttttaatcttttatgtaagtgttatgatgcaacatcgttattatagacatgaccgtgaaaaaagacaagagagaaagttgataaaagaaggcggaaaagggtaagggatcggaaaaaagatctattgatcatagtgggaaaatgtgaaaaataataaaaaatctgcaatatacaaaaagcggataagaaaaaagagaaggagagaaaagaaatgctgctttatattgttcgtcatggggaaacagattggaataaggcgggaaaagttcagggacgtacggatattccgttgaatgaaaggggcaggtatcttgcggaagcgactgcagaagggatgaaggacgtccgcatcgatttttgttatacaagccctttgatccgggcgaaagagacggcgcagatcatacttggggaaagagaaattcctctggttgaagaaaaacgcattgaggagatttgtttcggaaagtgtgaaggaatgaagttccgtggggaaatcacagatccggggagcgaagcgtttcagcgcttttttacagatacggaaaactatgttccttctgaaggagcagagtcgatcagtgaattatatgaaagaacaggctgctttttgtcggaaattgcagatcgggaggatttgaaagacagtcatattttgatttcaacccatggagcggccatgacagctttgttgaaccggataaaaggaaatatgcagataaaagatttttggaaatataaagtgccgaaaaactgtgctgtttccgtagtggaaataaaaggaaaggatatcataattaaagaggaaggtctcatatactattaaagtttacaaataaagtatgcttttgaaggagttttttcagaaatttactttatatttttgcaaatgatgttacaatagaagaaaagtgaaaagggatggtggacttatgaagcttacatttgtcggggcagctcatgaagttacgggaagctgtcattttcttcaagcggcaggaaaaaatatcttgatagactgcggaatggaacaaggaccggatctgtatgaaaatccgggacttccgattccggaaaatgagattgactatgtatttttgactcatgcacatatcgatcattcgggaatgctgccgaaattggcaaaaaacggatttaaaggtcagattttcacaacatttgcaactgccgatctatgtaatatcatgcttcgtgacagcgctcatattcaggagtttgaggcagaatggcgaaacaggaaaggcagaagggcaggaaaaccggaatttgagcccgtgtatgtgatgcaggatgcgttggatgcgattgaactgctcgtgccgtgcgggtatggggaaaggatcacgatctgcgatgggatacagattcgttttaccgatgtcggacatctgcttggatcggccagtatcgaagtctgggcaacagaaggtgatgtgacgaagaagatcgtcttttcgggggatatcggaaatgtagatcagccgatcataaaagatccaagctacacagattcggcagattatatcgtagtggagtctacttacggaaaccggatacatactgccgagaaaccggattatctgggagagtttacccgcattatcaaggagacatttgacagaggaggtaatgttgtcattccttcctttgcagtcggaaggacacaggagatgctttattttatccgtgagatcaaagaaaagcatctgcttccggaatacgaagattttgacgtgtacctggatagtccgttggcgatcgaagcgacgaaagtatttacaatgaatatgcgggattgttttgataaagaggcaatggagcttgtcaatgccggaataaatcctcttgtatttcccgggcttcacatatcgacaacgagcgatgattccaagatgatcaattttatcgagaaaccgaaagtgattatatccgcatcgggaatgtgcgatgcaggtcgtatccgtcatcatttgaagcataatctttggcgtccggaatgtacgatcctgtttgtgggatatcaggcaaacggaactctcggacgaagtctgattgaaggagaaaagaatgtaaaactgtttggagagccgattgaagttcatgcgcatatcgaaagcttacacggggtaagcggtcatgcggatatgaacgggctgctttcatggattggggcgtttgtcagtccgattgagagagtgtttgtcgtacatggagaagatacggtgacagaagagtttgcacatacggtagaggaaaagttcgggtattctgcatgggcgccttacccttgctgtgaagcggaccttttgaagaatgagatcgtgaacgaaggagtgcgcgttccggtcaaagcaaagaaagcggcacggcggaaatcagactctgcttttgaacggcttgtggcagcaggcagacgtctgcttgatattatttacaaaaatgaaggactttctaataaagataaggcaaaatttgaaacacagatcaataatctttccgataaatgggaagactaaatggtctgcgtgacgggaaatacaaaaaaagatgattttgtcaaggactaaaagtttataaaaatttgcgggaatcggaatatctttcttattgaatgagaattcttctaagtagaaactacttgggaggattgttgtgatgacagtaaataaggtagaactttgcggggtaaatacagcgaagcttccgcttcttaaagaagaggaaaaagaagaactttttgagcggataaaagcaggggatgaagaagcccgggaaaagtatattaaagggaatctgcggcttgttctaagtgtgatcaaacgttttgaaaacagcagtgaaaatgcggatgatctgttccagataggatgtgtcggactgatgaaagcagtagatcattttgatccggggcgcatggtgaaattttccacatatgcagtacctatgatcataggggagatcagacgatatttgcgggataacagtccgatccgtgtgagcagatcattgcgcgatacagcttataaggcaatttatgcaaaagaaggttatataaagcggcatatgaaagagccgaccgttcaggaaatcgcagaagagattgggattgccaaggaagagatcgtctatgcgcttgatgcgattcagatgccgatgagtctgcatgagcctgtgtacagcgacggacaagatgctctgtttgtgatggatcaggtgagtgataaaaagaataaagaagaaaactggatcgaggaactttctttagaggccgcgatggaacgactgaacgaaagagagcgatatattatcacacttcgtttttttgaaggaaagacgcagatggaagttgcagagcagatcaatatttcgcaggctcaggtaagccgtctggagaagaatgctttaaaaataatgcgcaagtatcttttaggaaaataagagtgcgaaaaaacaatacgtcaggagaaagaacagattgtttaaaagtatcttgtcagataaagtgactgatggtaatataaatctgaccaaagacaagagaggatgaaaaacggtgtacaaagcatgtatatttgacttagacggaacgttgaccgatacgttggagtctttgacattttcggtgaatgagacattaaaggaagtagcgcttccggcgatcacagaggaacagtgcagaacatttgtcggaaacggagcaaaggtactgattgaacaatcattgaaagcggcaggagatacaaagcttcttttgttcgagaaagcctttgaggcatatggacgtatttttgacaggaactgtacctatcatgtaaaaccttatccggggataagagagatgctcttaaagctgaaagatcaaaacatgaaattaggagtgttgtcgaacaaaccggatcgtcaggcagttcatgttgtggaagaaatattcgggaaagagacgtttgaccttgtgtgggggcagagagaaggtgtaccgagaaaaccggatccttcggcattgtttgcgatggcagagtcattaggggtgtcttcggaagaggtattgtatatcggagattcagaggtcgacgctgcgacgggaaatgcggcggatatggatacggttcttgtagaatggggatttcgatcacgagaagaactggaaaaggcagatgcatacagaattgtggcagcggcagatgaaattcttgacattatcaggtaaaggggaaaaagacagatgaatgagtacagtgaagagtgtctgaacacatttttgaaagaacagaaaaaattatttgatgagcctgtggcagaaaacatggaagaagcagaagcgtttcttgcagactgtatggctgtcgtagtcgattctattgacgaggtgagagaatactttgaagaagagggagtagatgtggacggaatgtccgcagaagatcttgaggaagcttcggaagtgttcgctttgccggacggaacgtatttgatcgttgaaggataataccggtgaaagcaaatgtatgaataatatttgtcaagtattgttgtatgaatataaggcagcaaagagaaaaggccgcagttattttactgcggctttttcgacggcttcggaaacggcgtccaatataagttgcgacgtatatggcgtatcttcggacagagtgattgaatcaggtgactgtgtttcatagatttgttcggcaatttcttcgatggcaggctggatgagtgggaacatagtcgttactgtttcatcaagattggaaaaacggattgaattgatcttgtaagcgtctacggaaacttctacttccaggttcgtattatttagtgtgagagtggaagtatatgttccgggcgtgtactgtttttcgttttttacggcgctgtcttttttgcctgttccgaacataaaaataagcaggacgatgacaaggagcgcaagtgccgcaaaaatggcggtataaataatttctttcatgtgaagaacaacgatttttgttctggaactcatagagttacctcccgattatccggctgccgttttacggcgatccgctttttttataagtgtatgtttggaaaaggaaaaatatgcatgttatctgcgtgacaaaggaagagagatattgtaaaatatttgtgctgtataggaggtagaagatatgtttattatcgcgggacttggaaatccgacaaaacaatatgaaggaacgagacataatgtcggatttgaagtaatagacaggatttcagagaaatataatatagatgtggatgcaaaaaaacacagagcgctgatcggaaagggaatcattcaggggcagaaagttattttggctaagccccagacttatatgaatttaagtggcgaaagcgtacgcagtttgcttgattattataaggtggatgaagaacatgaactgatcgttatttatgacgatatcagcttagacgtaggacaacttagaatcagagcgaaaggaagcgcaggaggacataacgggatgaaaaatattattgctcatcttggaagccaagtatttccccgtattaaagtaggagtcggagagaagccggcgaaatacgatttggcggattatgtgctcggacatttttcaaagggggaagcgaagttgatggatgaagggtatgaccatgcggttcatgccgtggaattgatcgtttcaggtcagatcaatgaggcgatgaatgaatataaccggaaaaagaaagaggaaaaataaattatgaaagcgttgcttgctccccttgcggaactggcggattatgaagaaatccggaaaaacagaacaaaagaaaacggaatgatacagatctcgggttgtgtaaatactcagaagatacatttgcttagtggaatcggatcgggatgcgggtataaacttgttgttttttcaaatgaggaaaaggcaaagaaggcatacgaagagtatttactgtttggagaagagacgtatttgtatcctgcaagagatttgcttttttattatgcggatattaaagggaagacacttacaaatcgaagaatggaagtgttaagagcgattgcagaaaagaaaaaagaagagccggtcactgtgattacgacgatggatgcttttttggacgggatcatttccccggatgaaattcaaaaaaacagaattcatattacaggagaagatacggttgatcttacgaaacttgaacaagatctgacggctcttggatatgagagagaaagccaaatagaagcgccgggtcagtttgcggtcagagggggaattatcgatgtttttcctcttgcggaagagatgccggtgcggattgagctttggggtgatgagatcgattctatccgtatgtttgatgctaagagccagaggtcgatagaaaatatttcggagatcacaatttatccggcttcggaaaattgttttggaaacaatggtttggtatcctttttgaaatattttccggaaaatgaaacactattattttatgatgaaccgcacagactgcaggagacggcggaaacagtagaggcggaatatacggaaagtttgaaaaaccgggctgatgcaggtatgaaagaagaaggcgaagaagagttgagagtctttcagacaaaagatatcatcagtgagatgaatcgttacagcgggatcggtttgacaacgctcgaatcaaaatgcggtttatttaaagtaagatcggtttatacggtgcaggcaaaaggggtaaatccttataataacagttttgagcttttgacacgtgatttaaagcggttaaaacgaaacgggtacagagttgtccttttatcgggttcgagaacgagagcaaaacgtctggcggaagatttaagagactatgatttgagcagtttttacagtgaagatatgcagagggaagtaaaaccgggcgagatcatggcagcgtacggctatgcgtcagaagggtatgagtatccgatgcttaaatttgtcgttatttcggagtcggatattttcggaagaaaaaagaaaaagaaaaaacgcaaaaagtatgaaggtcagcggattcaggattttgccgagctgaaacccggagattacgttgttcacgaaaatcatggaatcggcgtatataaaggaattgaaaaaattgaagtagagaagatcgtaaaagattatatgaagatcgtctatgccgaaggcggagtcttgtatatacctgtggcacagatggatctgatccagaaatatgcaggagcggatgcaaagaaacctcggttgaataaactcggaacgatccagtggggaaaaacaaaaagccaagtaaagaaagctgttcagattgtagcgaaagatcttgtagaattgtacgcggtcagacaacagtcggaaggatttgtatatggaccggatactgtctggcagaaagagtttgaggaaatgtttccgttcgaggaaacggatgatcagcttcaggcaatagaagatacaaagcatgatatggaaagtaagaagatcatggatcgtcttatctgcggagacgtaggatacggaaagacagaaattgctatacgggcggcatttaaagcggttcaggaaggaaaacaggttgtatgtctcgtgccgacgacgattttagctcagcagcactataatacatttgtacagcgactgaaagagtttcctgtaagaatcgatctgctctgtcggtttcggtcggcggcagaacagaaaaagacaatagaggacacgaagaaagggtttgtggatattcttgtcggaacgcacagagttttgtcaaaggatgtagtgtttaaagatcttggattgctgataatagacgaagaacaacggtttggcgtgacccataaagaaaaaataaaaaaattaaaggaaaatattgatgttctgacattgacggcaacaccgattccccggacgcttcatatgagtctgatcggtattcgggatatgagcgtattagaagaagctccgaatgaaaggatgcccattcagacttatgtaatggagtataatgacgaaatggttcgggaggcaatcacgcgggagttggcaagagacggacaggtatattatgtttataatcgcgtcaatgatattgccgatgttgcgggacgtatacaaagtcttgttccggatgcgaatgttgcatttgcgcatggacagatgaaagagagggagctggaagatatcatgtatgattttatcaacggtgatatcgatgttcttgtttcaacgacgattattgagaccggattggatattccgaatgcgaatacgatgatcatacaggatgcggaccgattcggattatctcagctttatcagcttcggggacgtgtcggtcgttctaatcgtatggcatatgcatttcttctgtatcagagagacaaattattaaaagaagtggcagagaagaggctctcggcgatccgtgagtttacagatctcggatccggaatcaaaatcgccatgcgagaccttgaaattcgcggggcaggtaatcttttaggagaagcgcagagcggtcatatggaagcggtagggtatgatctttattgcaaaatgctaaatgaagcggtcagacaattaaaaggcgggccggaagcagaaacgtttacaacattgattgatctaaatgtagatgcatatattccggaatattatattaaaaatgaatatcaaaagctggatatatataaacggatcgcggcgattgaaagtgaggaagagttagaagatatgacggaagaactgatcgaccgctttggcgatattccgaaaaaagtgcagcagcttcttgtgatagcatctttaaaaagtctggctcattcggtgtatgttactgctatcgagcaaaaaggtgaagaaattcgatttacaatgtatgaaaaagcaaagatcgatccatccggtattcctaaatttttggatagttataaaaacgatctgatattcagggcagaagaaccgccgtattttctgtattgcagaaaaggcagaaacaaaaaaagcaatacagaaaatgtactggatacagtgagacggattttggaagacctaaaaaagctgacttaaatttaagattttaaattaggacctgactttaagattttaaattaggacttgagatagaaataaaaacacggtatactaaaaacatgttgtgccgtggtgataaagaacggtacagacgatattttaacacgggagaggagaatcgttatggtacgatttggaaaaaaagccgctcttcttgcaatggcaggagtgttgacggcggcgtcggttacaggatgcagcggggcgattgatgcagaagcgactgttgtaacggtaggaaaggaaaaggttccgcttggagttgtgaatttttatgcaaggatgatgcagggacagtatgagacatattatgcggggatgatggggacaactgcagaagaactgtggacgcaggatgcgggagatgacaagacgtatgaagagtcagtgaaagacagcgtgatggaagcagtggaaaacatgtacctcatctcacagcattcaggcgaatacgaagtcgttctaacggaagatgagaaagaagcgattcaaaaagcggcggagcagtttgataaagataacaaggatgagtcaaaagaggcggtttccggttacagaaaagatatcgaaaaatatttggagcttatgacgatccagtcaaagatgagtgaaaaaatgcgtgaaggcgtaaacgaggaagtgtcagatgaagaagcggcacaaaagagtatggaatacgtatatttttcttacacatcaacagatgagtcgggatcggtaacggaactgacagatgaagaaaaagcaaaagcaaaatcaactgcagaaacgatcgcagaacgcgcaaaagcaggggaagattttgcggcagttgcagcagaactcggaacagaggtgcaaaaaaccgcatttgatgcaaagagtacatctccggatgcagctctgatcgaggcggcgaatgctttagcggcagaaggcgatgtgacaggtgcaatcgagtctgacgcaggggtgtatgtggcaaagctgacaagccttctcgatcgcgaggcaacggatcagaagaaagcttccattatcgaagagcgtaagcaggaacagtatgattctcttctgaaaaaatggagaaaagaaacagatatcaaagtagataagaaagtatggaagaaagtagattttgaagaaacaggtgtaaagatcatcacatcggaaaaatcctcttcggaagaaccttcttctgatgaaacaaaataattgttttattaaaataaaaacagaataaaaacagataaagtaaactccgaacagaatctatgattaaaagaatctgttcggagtttttataatgaagctgttttatacaagaaacgagaatgtgaaactttttctgtaaataatgttttagaaggtcttctatggtaaaatattttatcataaggaggccttttattatggcaagagaaaagaaac

SEQ ID NO: 7630 - DNA, 996 bp, Unknown
  gut microbiota DNA sequence
agggcgcacaggagccggaaggagcatcaagatcaaaccagaagcagagaaaacggtcaaggaggccggaaaccggacagtgaaaacagcgccccgtatggtgaaagcttccccggtttcttctcaaaaggtgaaaacccaggcaatcttgcaaaaaaagcaggcattccaatccatgagggcagccagggaagcaaaacgggctgccatgcgctctgtccagacagccaagcaaagcaaaaagacagcacaggcaacagcaaaagggataaaagctatggcagaagcagcggcccatgcagtaaaggcagcgtttgcagcgttgatggcaggaggaggtaccgtatttgtgatcttgatcctcattgtggggatcattggcggtgctgcgtttatcgggagttcccagagcagcgagccgctgagtgcagaagtcctggcccataccccggcgatccagcggtatgccagggaatttggaatctcggaatatgtccctgtcatccaggcgatcatgatgcaggagagtggcggaaggggaacggatcccatgcaggccagcgagtgtccgtataatacccagtatcccaatacgcccggtgcgatccaggatgccgattattctatcaaggtgggcgtacagtattatgcggattgtgtccgggaagccggatgtgaaagcccacaggatatggacaagctaaaacttagtttacagggctataattacgggaatgggtatatctcatgggcaatccgaaaccatggaggctatagcgaggccaatgcgctgcagttttcccaggaacaggcagccgcccatgggtggtcaggttatggcgatccagagtatgtaccccatgtgcttcggtattattctggcgggggattgtttgccggactttttggaaatgggcagcttgtgaccattgcgaaaagccagttggggaacgaaggcggccagaagttctggtcgtggtggggattcacagagcg

SEQ ID NO: 7631 - DNA, 40343 bp, Unknown
  gut microbiota DNA sequence
taaagattattatatatttatattgacagaaatatgcgggggggggtatacttatgctgacattatgtaaacattgtgcgtttttgaaaaaagaaaaaataagtgttttatatataatactttaagcaatgtttacgaagttaaatttatgaaataaacgggtgggaagaaggaggaaaaaagaatgaaaatgaaaagagttctggcgtgtgctttatcagcggccatgattgtgacattcgtgtcatttggcaatatgggagttggaatggtacatgctgctgtagatatcgagaacgagtctgtaactgtagaagaaaaagttttaaaggagattgagtcagaagttctgaaggcaaatgcaaaagcaaattcggagcagaaaccggcagcttgggataatgatggtgaagctgggtgggcatttgatgatgagaatcattggtggcattctagatatcagggaaatcctgtagaaggggaagtaaacagtggattagtaagcgcaagcaatcctatttggattcagacaggatttggagaagcaaaaaaaattaagaaaataacttatctgtcaagagacaatggtatgggttctattaatgcatataaggttcaatatgccaatgttcagcagggcgaaccgagagatgatgattttcatgatattgcaggtgcggccggaaatttgcagaatgctcgtactgcacaggagattgtatttaacgaagcagtaaccgcaacgcatatccgtcttgttgcaacatcgatttatgcgaatggcggacaacagtatgtggcggcaaagcgcattcgtgtgtttgaagaaactgagggaacagaaggagtaacttataatttctataaagaatcagatttttgggattatgaagttgcatatggcaatttggctgatcagacagagaatgcagatagatggcattatcagattaagaagccttcagaaggagggtggattgatattccggcaaatgcattaaaaacaaaagataacggtgaaaaaagctggatgaatgatgataagggcttggatggcacatattattacgcaaagctgaataaggatgaaattacatctacatttcaaggtgaggcgtatacagcagtagcatatgcgtggaaagctccaaagaatggttattttaagatgacattggaaagtccgataacacaggcaagcagtccggcaccgagtttctttgtctgccactcaagtgataatcaggatggcaaagatttattccgtaatatcgttggtgcaaatagtacaattacaagtaaaattgcaagagtccacacaggagaatggcttcgtttaggagcaactacaaagaatgcatgggcaagtggtttgaaaccggtagtgatggaagttactgcaaaagattatgcagttcagtatttagaagaagtaagtggtattgaagaagggaacagttatacagaagcttccaaacaggcagttaaagaggcacgatcagcattacaagaagcgattctgccggaagttccggatatggtagttgttgagcagaagattacagcgttagaacaggcgattgcaggattgcaagagtatgttccggtaacagaagttacattaaatgtaactgaggccaatttgaaagtcggtgagacagtacaattaacggctatagttgcaccggataatgctagccaagaagttctctgggtatctgatgcagagggtatcgcttctgttgatagtgcaactggattagttacagctaatagtgcgggaacggcgattattacagcaacttccacaatgaatccggaaaagaaagcacaatgtacagttgttgttactcgtgatgatacagcattagatgtagcaatcaaagcagcagaagagaaaatacgggaagagaattttgaaaataaatatacagaagcttcaaaaacagctcttagagaaaatttggagaatgcgaaacttgcgaaagagaacgcgaacctttctgtggaagatgtgaaattagttgttgatgcattaaatgcttcaatcgaagaattacaattaaaagcagtagttacaatcaataataacgatcagatagaaacaaaatactgtgaaatcggagaacaggtgagagttgttgcacagactgtgaaagacaagaagttctcacactggacattcaatggaactcctatctgttattcgagtccgtatactttcacagtatatggagatacaacgatagaagcggtttatgtagatgctggagaagaagtaactccgcaggcagctatgttgtgcagcgtgtcatacaataaatctacgcagactattaaatatacggcaaaacgttcagtacctgaaggatgtaagattgtaaaacatggaatgattttaacaagcaaaccagcatgggaagccttgtataaagataatcaagaagcgtttaagctggaagcagacagaattattactaaagtagcaacgaccacaggtttagcaggaaattattctgttagtgtaaaatgcacaaagccgaatatttggtatgcaaaaggttatgttgtatacacggataagaacggtgaggaacagactgtatatagtgatgttgtgagctatgaagtaaaataataaaattaagaggagaagagaaagatgaaaagagcatttttagagccggggatggaagttattaaatttcaggatgaggatatcattacaacttctgttatagaagataacgaagatggtgggactatcgagggtgaggatccgtaaagtaacatttctggcagaagtaatgtggggtatcgtacgagatgcgatacccttgctttttatcattatatattgattgaattttatgttttttgaacagaaaaaaagatatatctgttgtattgggatctgaataaaattaagatagaaaagtaagcatatgaggcaatgaatttatgcgtaatacatctttggaagaagaacttcgatcggggaaagcttgtgtctccacaacggttggagacagcatggaaccgatgctgcgtaatcgaaaggatacaattattatagaaccggttcatggaagactgaagcgatatgaccttccactttatcgaagaccggacgggaaatatgtactgcatcgtattctgcatgtgaagaagaatgggtatgttatctgtggggacaatcgttggtggaaagagaatgtgccggatgaatggatagtcggtgtagtgacagagttttatcgtagagaagagcatatatatataacagatcggaagtatcgtctgtatgttcatttatggtgcgacttcttttggattcgtgtgttgatccttcgagtgaaacatattttacagcgaataaagaagaaatgaatacaggaaaaaagtaagaaaaagtaggtttgcgagaatagagagtcttgtcgaacctttcttttttttgtatactttagtagattataaattatgagagagtgtgaaaagtagcagggaagggaaatgatatgaagaagaaaacactgcttattaaaacagcagatttatgtatccgaattcattataaatatccgtatattgaacaacaatgtgaaacatggagggtgaatgaaggatacgaaccggatattgaagtgtctgttacagatgaagaaattgaaacggaatacgcggggtatcgtgcagaaagcgtgagcagagctttgtgtgagagtacatgtatttaccgtgcgatcgcaagaaagctgattgcctttcaggcatttgttatgcacggcgccgtattggagttagacggaaaagcgtatgtatttaccgcgaagagcggagtcggaaagacaacacatacgaagctgtgggtcgagtattttgaaggcagagcaagttatattaacggggataagccgatcatcagatgtaaagacggcgtatggtatgcatatggcacaccgtggatgggaaaagaaaagtttggaagtcaaagttctgcgccgattcaggcagtttgctttattgaacggggagaagaaaataagattcaaaagattgctgataaggaagttatagacagagtgtttcatcaactgtttttccctgaagatcctgagacgttgatcgagttcatgggattggcagacgattttgttcaaaagcttccgttttttgtattaaagtgcaatatttcagcagaagctgtacgggtggcttatgagactttgagtaaagtataagtttgaagaaacacaattaaggcgataaaaaagaaataaaatcaggagaatacgaagatgaaaataaaagaaggatttatcaaacgtcaggtaggagaacgcgtcgtagtcgttccaattggagaagcggcaaaaaactttcatggtatgatcaaccttaatgagacaggcggagaattgtgggatcttctgaaagaaaatacagatgaggataagttgttagagtccatgctggagatttatgagattgaacctgagcaggcgcaaaaaagcatgaaaacttttctgagaaaattaagagaggcgggggttttggaggaataaagagaaagccttgcagtaagttttaattgaaatcttatagatgttagtatatactaaaataggcagaaattttggtttatttaaacaaatttatttatatggagggctaaaatatgagctacaatgcaacaggaaactcagcgggcagaagaattgctacattgcttgatgagggaagctttgttgagatcggcggcgcagttactgccagaagcacagatttcaacttgcaggaaaaagaaactccggctgatggtgttattaccggttatggagtgattgacggcaatcttgtgtatgtgtacagtcaggatgccgcagtgctcaacggagcgattggagagatgcatgcaaagaagatcgcaaatatctatgatatggcgatgaagatgggagctcctgtcatcggtcttatcgattgtgccggattgagacttcaggaagctacggatgctttagaagcttttggaagtgtttactacaagcaggcaatggcatcgggagttgttccgcagattgcggcgattttcggtatgtgcggcggcggacttgcagttgttccgggacttgctgactttacattcatggaagaaaaaagcggaaagctttttgtaaattctccgaatgcgcttgcaggaaacgagatttcaagatgtgatacttccgctgcaaaataccagagtgagacggcaggtcttgtcgacggtatcggaacagaagcggatattttaaatgaaattcgttctttgatctgcatgatcccggcaaataatgaagatgatctgtcctatgaagaatgtatggacgatctgaatcgtatttgtccggatgttgaaaatgcggcagccgatactgcaatcgttctttcacagattgcagatgatcagatttttacagagatgaagaaagattacgcaaaagaaatggtgacagggtttattcgtctgaacggtatgacggtcggggctgttgcgaatcgtacaaaagtttacgcagaagacggaacagaggcagcatcatttgattgtgcacttacagtggatggctgtaagaaagcggttgactttgtgaatttctgtgatgcattctcgattccggtgctcacattgacaaatgtagaaggattttcagctacgctcgactctgaaaaagatatggcaagagctgtggcaagaatgacttatgcgtttgctgaggcaacagtgccgaaagtgaatgtaattataggaaatgcttatggaagcgcatacatcgcgatgaacagcaaatcaatcggtgcggacatggtatatgcatgggaaaatgcaaagatcggtatgatggatgcaaaccttgcggctcgtatcatgtatgatgacgcggacatggaaacacaaaaagagaaagcggcagaatatgaaaaaatccaatccagtgctaaatcagcggctcgcagaggatatgttgatgcgatcatcacgcctgccgatacgagaaaatatgtgatcggcgcatttgagatgctgtttacaaagagagaggatcgtccgaataagaaacacggtacggtttagtgaggtgaggcgaagtgaagaaaaaaatcagtttattagggcttatcctcattcttgtttttagtttttcgggatgcggaaagtctgatgatacagtagaatatgatcaggaacagcttgagcagtatgccgattttatagttcagaatttcagtatgatgggagaggcggattttcagaacttttccgatatgtctgatcttgaacttgaaatgactcttcttcaggcaggcgtacctgtaacaggagaaaatttcctgacgatgatgggggcgtgggatgccggagaacaagaatgcggagagtttgtcggcttaaaagacggttatacaatggaaacaacaaatgaaggcgcacttctgactgttgaaggagattttgcggaaagagacggagcgcttgaatttgcgtttgataagaaaggaaatatcgagagtctgacgatcggagcacattacagtacggcggagattttgaaaaaagcaggacttaatacgattctcggaatgggaacggtttttgttgtattgatctttatttcatttattatttcactgtttaaatttattccggcgcttgaacagaagtttaaaaagagtgcaaaaacagagattgtaaatgaaaaaccaacggcagctttgaaaacggagatgccggaagtgtcggaagatgttacggaggatacagagcttgcagcggtaattgcggcggcaatcgcggcatctgaaggaacatcggcagacggatttatcgttcgttctataaagagaagaaaatcaaataaatggaattaaagaaaaggagataagaaaatgaaaaattatacaattacagtaaatgggaatgtatatgatgtaacagtggaagaaaaaggcgcaggcgctgttccggctttgaaaccggctccgaaagcagctccggctccgaaagcggcacctgctccagtggcaaaagcagcgggcgcaggaaacattcaggtgaaagcaggcgcggcaggaaaagtattccagatcccgacaagcgtaggtcagagtgttcaacagggtgatacagtgatcgtgatcgaggcaatgaagatggaaattccggttgttgcaccggaagcgggaacgatcgcaagtattgatgtggctgtaggagatgcgatagaatcaggagcagtattagctacgttaaattagttactgacggaggtttttaacaaatggaatatatttcaaatacactgggaaacctcattgaacagacagcgtttatgaatcttacggtcggaaacctgatcatgatcgcagttgcgtgtgtgtttctctatttagcaatcagacacggctttgagccgcttctgcttgtaccgattgctttcggtatgctgcttgtaaatatctatcctgatattatgcttcatgccgaggactcagcgaatggtacgggtggattactttattacttctatgtccttgacgagtggtcgatccttccgtctttgatcttcctcggtgtaggagcaatgacggatttcggacctttgatcgcgaacccgaaaagtttccttctcggagctgccgctcagtttggtatctttgctgcatatttaggcgctatggcaatgggattttcagataaagctgccgcagcgatctccattatcggaggagctgacggaccgacatctattttccttgccggaaaactgcaacagacagcgattctcggaccgatcgcggtagcggcatattcttatatgtcacttgtaccgatcatccagccgccgatcatgaaacttcttacgacggagaaagaacgtaagatcaagatggagcagcttcgtccggtatcaaaattagagagaattcttttcccgatcattgtaacgatcgttgtttgtacgattcttccgacgacagctcctcttgtaggtatgcttatgctcggaaacttgtttaaagagtccggtgttgtaagacagcttacagagaccgcttctaatgcgttgatgtatatcgttgtaattttgctcggaacatctgtgggagcgacaacaagcgctgaggcgttcttgaattgggatactttaaaaatcgttgctctcggactgattgcatttgcgttcggtacagcggcgggagtgttgttcggtaaaatcatgtgctgggcaacgaaaggaaaagtcaatccgctgattgggtctgcgggcgtatctgcagttcctatggcggcgcgtgtttcacagaaagtgggagccgaggctgatccgactaacttcttattgatgcatgcgatgggtccgaatgtcgcgggtgttatcggtactgcggttgcagccggaacatttatggcaatctttggcgttaagtaattgatggaggaaaaataaatggcagaaattgaaaaaaaaccggttaaaatagtagaaacgattctgcgtgacgcgcatcagtcattgatcgctacaagaatgactacagaacagatgcttccgatcattgaaaagatggatcaggtcggttatcatgcagttgaatgctggggaggagctacgtttgatgcgtctttgcgcttcctgaaagaagatccatgggagaggcttcgtaaattccgtgacggatttaaaaatacaaaacttcagatgctgttccgcggacaaaatattctggggtatcgcccgtacgcagatgatgtagtagaatactttgtacaaaaatcagcggcaaatggaattgatattatccgaatttttgattgtctgaatgatatcagaaacttgaagacagcagtgacggccgcaaataaagaaaaagcacatgcacaggtagcgatgtcttatacacttggcgatgcgtatactcttgattactgggtggatcttgcaaagagaatcgaagatatgggagcgaattctatttgcgttaaagatatggcaggacttcttgttccgtatgaagcgacagaacttgtcacagcgctgaaagaggcagtaaatatcccgattgaaatgcatacacattatacatcgggagttgcttcgatgacttatatgaaatctgtagaggcaggagctgatatcattgacaccgcaatgtctccgtttgctctcggaacgtcgcagccggcaacggaagtgatggtggaaacgttcaaaggtacgccgtatgatactggattagatcagaaactgttatctgagattgcggattatttccgtccgatcagagatgaagcgcttgaaagcggactgcttaatccgaaaaacctcggagttaatattaagactttattatatcaggttccgggaggaatgctttctaatctgacatctcagttaaaagaacagggagcggaagaaaaattctatgaagtgcttgaggaagtaccacgcgtgcgtaaagatcttggcgagccgccgcttgttactccgtcttctcagattgtcggaacacaggctgtatttaatgttctgatgggtgagagatataagatggcgacaaaagagacaaaagatattcttgcaggaaaatatggcgcgactgtaaaaccggttgacgctcagcttcagaaaaagattttaggtgagaatgcagagatcatcacatgtcgtccggcagatttgatcccgaatgagctcgatacacttcgcaaagagtgcgagcagtggatacagcaggatgaagatgttcttacgtatgcattattcccgcaggttgccgttgatttctttaaatacagacaggcacagcagacaaaagttgacgctgcagtagcagatactaagaacggagcatatccggtatagataaaaggaatagtgacaggatcgaacgattgaatttattcaggagatcgatcctgttttatttgtactctttttcgtttagtggtatcataaaaaggaattttgagaagcgggaggtcttgaatgaaatattcgggaagcatttcagatagaattaaggctcttagagccgagatgagacgggaaaagatagatctttatattattccgtcaacagattatcataacagtgaatatataggtgaatattttaaggaacgtcaatatatgaccggatttacaggctctgctggaactgtggtgtttacagaggagaaagcggggctttggacagacgggcgctattttatacaggcagaacaagaactgcagggcagtgagatcatcctttttaaagcaggggagccgggctgcccggaaatcgaagaatttatacggacagaattgccggaaggcggaaagatcggatttgatggccgtacgattcgggtagaacaaggaaaagaatttgaaaagattgccgaagaaaaatgcggagcgctgtcttatctttcggatcttgtcgatgttgtctggaaagacagaccgcctttgccgacggaaaaagcgttctttttggatgaattttactcgggagaaacagcagcttctaagttggaaagagtaaggtgtaagatggatgaatcaggagctgatgtacatctgttatcaagtcttgatgatattgcgtggctattaaacatcagaggaaacgatatcttgtgttgtcctcttgttttggcatatttaataatctataaggatcatgttgaattgtttgcagatgaagaaaagttctccgatgatatgaagcgggaatttgcgaaaaatcatgttgctctaagaccatatacagaaatcgaaaatgcggtcggaaaactaagcggcaggaagaaaatgctgatagatcccgagcgtcttagctatgctttatataaattgataccggatgaaactgaaatgatagagaaagagaatccggaaatcataatgaaatctgtaaaaaatgatattgaaacagagcatattcgcagggcgcatttaaaggatgcggctgcacatacaaaatttatatattggctgaaagaaaatatcgggaaaacagagattaccgaacggtcagcttccgctcgtttagaagagtttagaaaagagcaggatggatatttaggaccaagttttgaaccaatcagcgcatactacgaacatggagcgattgtccattacagtgcatcgaaggaaagcgacgcacgattagaaaaggggcattttcttttaacagataccggaggacattataaggatggatcgactgatattacaagaaccgtggctttaggtgaagtgagttatcaggaaaaagaagatttcactcttgttttgcgttcgatgctcagacttatgaacgctgtgtttttggaagggtgcagcggtgcgaatttagactgtcttgcaagagaagtgttttggaaggaaaggctgaattttaatcatggcacgggtcatggggttggatatcttttgaatattcacgagcctccgattaatttcagatggaaggaaggcaaaaatgctgcgccggctcttcaaaaaaatatgataattacagatgaaccggggatttacagagcaggccgacatggcgtcagaattgaaaatgatcttcttgtcgtagaagatacgcagaacgagttcggaaagtttttgaaatttgagccgcttacctatgttccgattgatcttgatgcaattctccatgaaaaaatgagtgatgaagaaaaaaagatgctgaacgaatatcatgctgccgtttatgaaaaagtcggaatgtatttagaggagaacgagcgagagtggctgaagcgatatacaagaccgatataaattatgcacatctgcaaatcggacaatgacagtaaagaaaaaataagatataatcagttggtgataattgagaaaaagtaggaaacaaaaatgggacaaaatgaaacaacgacaaatgaacttttattaagaattaaagaaaaatataaaaaaatgagtaaaggacagcggcgtcttgcagattatgtatgcaatgattacgacaaagcggtttttttgacggctgccaaattaggagagatcgtcggggtcagtgagtcaactgtagtgcgattcgctacacagcttggctataaaggatatccgggatttcaaaaggcattagaagaacttgtccgtaataagctgaattcgatccagaggatggaagtgacgtatggaagaatcagccaaagtgaaatactggaaactgttcttcaatccgatatagataagattaagatgactcttgcagatatcgaccataaagcatttgatcttgcgattgacacgctcctgaatgcgaggagagtttatgtaatagggatcagaagctgcgctccgttagcatcatttttaggattttacttaaatcttgtttgtgataacgtatctgttgtcgatgtaaacagttccagtgaaatatttgaacagttgatcagaattaacgaacatgatgttatcatagggatcagttttccgagatattctatgcggacattaaaagcattggagtttgcaagtaaccgaaaggcaaaagtgatcactttaacggacagcgtccattcgcctatgaatctgtattcatcgtgcaatctgattgcaagaagtgatatggcgtcgatcgtagactctcttgtagcgccgttaagcgtagtgaatgctctcgtagtggcgctttgcatgaagagacaaaaagaagttgtatcaacacttgagacgttagaggaaatatggggagaatatgaagtgtacagcagagatgaattagatcctatgaaacgttcgtttttcccggatgaaacggcaggaggaaaagatgagtaaagtgatagttgtcggaggcggagccgcaggaatgatggcggctgtatttgccgccgaaaacgggcatcatgttcagatttatgagaaaaatgacagattgggcaggaaattatttataacgggaaagggacgctgtaatattacaaatgcatcggatgttgaagaattatttcaggcggtagtcagtaacccaaagtttttatatagtgcattttacagttttacgaatgaacaggtgatcgacttttttgaaaatctcggtgtgaagacgaaggttgaaagaggaaacagagtctttcctgtttccgatcattcgtcggatataatcggggcgcttcaaagagaactgcaccgtctcggcgttcagatatctctttgtacggaagtggaaaaaatatgtgtagaaaacgagaaaataacaggaatcattatttctgatgattcccaaaaacaaaagcagcattttgttgacgcagatgcggtgatcatagcgactggagggatttcttatcctgctacaggatcgacaggagacggataccgatttgcaaaaacatgcgggcataaggttaccgaactttttccggctctcgttccgatggaagtaaaagaatggtatgcaaaacagcttcagggtctgtcgcttcggaacgtatgtatccgtgtgaccgacggaaaaaggaaattatatgaagaattcggagagatgctgtttacccattatggagtgacaggtccggttattttaagcgctagcagtattgtaggaaaaaggctgaaagaaaaagagctgactttacatatcgacttaaaaccggcgcttacagaagaacaactcgacaaacggattctcagagagttcgatgcgaatcataacaaacagtttaaaaatgcagtcgatagtttgtttccggcaaaactaaaacctgttatgacagaactttcaggtattgcggaagaaaagaaagtaaatgagattacaaaagaagaaagaatgcggtttgtacgtctgatcaaagattttaaaatgacgcttacaagtttaagaagctatagcgaggcgatcattacaaaaggcggagtaagcgtaaaagagatccatccgggaacaatggagtcaaagtttgttaaaaatttatatttttcgggagaagttttggatcttgatgctcttacaggaggttataatcttcagattgcatggtctacggcatatcttgcgggaatgaatgccggaagagaagaataaaagaaaaagcagtaagaaaggggaaagaaaatgggatataatgtggcggtggacggcccggcaggagccggaaaaagtacgatagcaaaactggtggcgaaagaaaaaggatatatatatgtagatacaggagcaatgtatagaggattggcgatccattttctgaaaaaaggaatttcgccggaagacaaagaggctgttgcaaaagcgtgcatagatgcagatgtaagtattgtgtacgaaaacggagtacagcaggtttatttaaacggtgaaaatattacaggcatgcttcgtacagaagaagttggaaatatggcgtcaaaaacgtcggctatcccggcggttagggaaaagcttttagaattgcagaaaacgctggcacgcgaaaaagatgtgatcatggacggacgggatatcggaacaaatattcttccgaatgcagatgtgaaaatctatctgactgccagcgtagaaacaagagcaaaacgtagatatgatgagcttgcgtcaaaaggggaatcatgtgactttgacgagattgcacgggatatcaaggaaagagatgaacgtgacatgacaagagaaattgcaccgttgaaaaaagcagaggatgcgatcttagtagacagttcggatatgacgattgatgaagtggtaagtaaaatatgcagcttctgtaattagtgagaggaaaatacagtgaaagtgataaaagcaaagactgccggattttgtttcggagtaaagcgggcggttgacacggtatataagcaggtagatacaaagtgtggacagatttatacgtatggtccgattatccacaatgaagaagttatcaaagatatgagggataaaggggttatcgtactacgttctgaagaagatttggatatgatcagtcaaggtacggtcattatccggtctcacggagtggaaaaacgcatttatgaaaagatcgaacaaaaaggtcttagaattgtagatgctacctgcccatttgtgaaaaagattcataatattgtatctgaaaagagcggagagggatttcatattattataatcggaaacccggaacatcctgaagttgtagggataaaaggatgggcgaaagacaatgtaaccgtcatacaaagtgcggaagatgcggaatgttttacagctgatcgaaaagagaaaatctgcattgtttcccagacgacatttaattacaataaatttaaagatttagttgaaattataatgaaaaagagttatgatgtaagtgttttaaatacaatctgtaatgctacaaaagagcgtcagactgaagctgaaagcattgcagagtcggtggatgctatgatcgttattggagataaacatagttccaatactcagaaattagttgagatctgccgcaaagcatgtgacaatacgtactatatacagacacttgacgatttggatttgaatcaattagggtcagtggaaacagtaggtattacagcaggggcatccacgcccaacaatataattgaggaggttcaaaataatgtcagaattatcttttgaacagatgttagacgagtcatttaaaacgattcacaatggagaagtagttgagggaacggtaatcgatgtaaaaccggaagagattatcctgaatatcggttataaggcagacggtatcattacaaagaatgaatactccaacgatccgtcagttgacctcacaaaagtagtatccgtaggtgatacgatgacagtcaaagttttgaaagtaaacgacggagagggtcaggttcttcttacatataagagacttgcagccgagaaaggaaatgagagactgcgtgaagcgtttgagaacaaagaagtcctcaaagctacagttacacagattctcggaggcggcatttgcgctacagttgatgaagtcagagtgtttatcccggcaagccttgtatctgattcttatgagaaagatcttggaaaatatgaaggtcaggaaattgaattcgtaatcagcgagttcaatccgagaagaaaccgtgtgatcggagacagaagacagcttcttgttgcagaacgtgccgagaaacagaaagaactgtttgcaagattacaagtcggagacagagtagacggcgtgatcaaaaatgtgacggatttcggagcgtttgttgatcttggcggagttgacggacttctccatatttctgaaatgtcatggggaagaattgataatccgaagaaaaacttccacgtaggtgatactcttactgttcttgtgaaagacattcacgatacaaaagttgccttaagtttgaagttcccggagacaaacccgtgggcgaatgcttcagagaactttgcagtaggtacagtgatcacaggcaaagttgcacgtatgacagatttcggtgcatttgttgaacttgcaccgggagttgatgcgcttcttcatgtatctcagatttcgagagaacatgttgagaaaccatcggatgttctttctgtaggtcaggagattacagctaagattgttgacctgaacgaagaagagaagaagatcagcctgagcatgaaagcattggaagctgatcgtgatgaagaagatgcagtatctgttgattacgaagcagatgctgagtaattatcttttgtattttatataatggataagataggggacgatacttgcatagagtgtcgttctctttattatgttaaaaagataacattcttctgaaaatacagaattgtatgattttgtcgtttgaatgactggatttttatgcttcattctagtaaaataacgtaatatgaaaataatgcgggaatagagtgtgataagtagattctgtttcggcgggaaagaaaggaagaatatcatgggacttctgacatttaaaggcggtatccatccggatgacggaaagcgtttttcaaaagacagtgaaatacgtacattactgccgaaaggggaactggcgtatccgctttcacagcatatcggagcgcctgcgaatccgatcgtaaaaaaaggagatcatgttttaaaaggacagaagattgcggaagcaggaggttttgtgtcatcaccgatccatgcttctgtatccggaactgtgaaaggaattgaatatcggtttaatccggcaggtacaaaaacagaatgtatcatcattgaaaatgatggagaatacgcggaaataaacgatcttacggtgaaaccttttggtgagatgacaagagaagagatcattgagagaatcggtgaagccggtattgtcggaatgggaggcgcaggttttcctacgagggtaaagctttctccgaaagaacctgaaaagatagaatatattattgcgaactgtgcagagtgtgaaccgtatattacggcagattacagaaggatgttggagaataccggacaactggtgaacggtatgcgtataatcctttcgctgtttccgaatgcaaaaggaatctttgcggtagaagataataaaaaagactgtattgaaaaattaaacaaagaaacagaaaatgacccgaatatggaagtgaaggcactcatgacaaaatatcctcagggagcggaacgtcagttgatctatgcagtgacaaaacgtgcgatcaattcatctatgctcccggcagatgcgggttgtattgttgataatgtggaaacattgatcgggattcatatggcagtagctgaggggaaacctcttacggaacgtgttgttactgtaagcggagacgccataaattctccgggaaactttaaagttcttcttggaacaaaccatatggaattaattgaagcggcgggtggattttctcaacagccggaaaaattgatatccggagggcctatgatgggattcgccatggtaagtgcagaagctccggtaacaaaaacatcttcttctattcttgcgtttaaggaagatatagtttcaaaaagcgtggagacggcatgtatcaactgtgcaagatgcgttgatgtctgtccgagtcgtattataccttcacgattagccgatcttgcccaaagacatgatgaaaaggcttttgttgcgatgaatggacttgaatgtgtggaatgtggatcatgcagttatgtgtgtccggcgaaaagacctttgaaacaggctatcggttctatgagaaaaattgcgcttgcaaataaaagaaagaagtaagtgagaggtgagagaaaagtgaatgaaaattatcatgtatcagcatccccgcatattcgggataagataaaaagcagcaatatcatgcttcttgttgtgattgccctgctccctgctactgtattcggaatttggaattttagacatgaaaatgcgtggatcttagttgttgctacaacggcggctgctgtgcttgcagagtatatctatgaaaaattaatgcataaaccggttacaatcggtgatttcagcgcagttgttacaggtcttttacttgcattgaatcttcctccgacgcttccgtggtgcatgggggtactcggagccgtatttgcaatcgttgttgtaaaacagcttttcggtggattgggacaaaattttatgaatccggccttagctgcaagatgctttcttctaatctgttttacgcaaaaaatgacgtattttgtgtatgacggcgtgacaggcgcaactccgcttgcacaattaaagagcggcaatgtagtaaatacgatggatatgcttcttggaaatgtccggggaacgatcggagagacatcggtgatcgcgattatgatcggagcgatgttcttaatattgacaggagtgatagatcttagaattccgggatcttatatcgtatcatttgttatttttatcacgcttttcggcggcaatggatttgatccgtggtacataaccgctcatttatgcggcggcggtctgatgcttggagcatggtttatggcaacagattatgtgactgctccgattacgagcaaaggaaagattttgtatggcatttgtatgggaatcttaaccggactgttccgtttgttcggagcttcggcagaaggggtatcttatgcaatcatcatcagtaaccttttggttccgttgatcgagaaggttactcttccgaaacctttcggtaaaggaggagaaaagtaatgaataaaattataaaaaatacgttgatcttaactgcaataacagttgtttcaggacttttgctcggaattgtttacgatgttacaaaagagccgattgcgcaggcgcaggagcgtacaaaacaaaaggcgtttcagacagtgcttcccgaggcttcagagtttacatccagcaatttcgatgaaaaagaggcggcaaaaattttaaaagaaaacggttatacagacgatataacagaagtagcggaagcgacagataaaaaagggaaagtaatcggttacgtgatcaatgtcacttctcacgaagggtatggcggcgacattgaaatttctgtaggaatcgcctcggacggaacagtgaaaggaattgagatgctctccatcggagagacggcgggattaggaatgaaagcgaaagacgctgaatttaaagatcagtttcgggataaaaaagtgcaaaaattcacttatacgaaaaatggagaaaaaggcgatgataagatcgatgccatcagcggcgctacgattacgacaaatgcagtgactaatgccgttgattcagcactgatttattatcaaacggagttaggaggcggtatcaatgaataaatgtgcagaacgtctttataatggccttgtgaaagaaaatcctacgttcgttctcatgctcggtatgtgtccgactcttgcggttacaacatctgcgatcaacggaatcggtatggggctttctacgacagcggtacttgtgatgtcaaatatgttgatttctatgttgagaaaagtgattccggcatcagtgcgtatgcctgcttttatcgttgttgtagcttcttttgttacgatcgttgattttttgatggcgggatttgttcccgggctttataaatcactcggattgtatatccctttgatcgtagtaaactgtattattttggggagagcggaaagctatgcatcaaaaaatccggtgcttccttcgattttcgacgggatcggtatgggacttggattcacggtcggtcttacggcaatcggtattgtgagagaactgcttggtgcaggcgaggtgttcggcattcgtgttatgccgcagtcatatgaacctcttacgatttttgttcttgccccgggtgcgttttttgtattggcatgtcttgtagctcttcagaataaagtgaaagcgaatcttgagaaaaaaggaaaaaaagttccggtatcgtcaggatgcggcgaaggttgctctgcatgtgcaagcaaaggaatctgcggaggtcatctcgcagaaaacgaaccacatcatgaagagacgaatgtaaaagaagaggaggaggcataaatgcaggaattacttttgattgcagtcggagctgcgtttgtaaataatgttgtccttagtcagttcctcggtatctgtccgtttttaggtgtttctaaaaatgtaaaaactgcagccggaatgggcggagcagttgtattcgttatcacaatcgcttcgtttgtaacaggattgatctataaattcatccttggaaacccgaaaattttaggaggagagctccaatatttaaacactatcgtatttatccttgtcatagcagctcttgtacagttcgtagagatgtttttaaagaaagtgatgcctccgttatataatgccctcggcgtttatcttccgctgattacaacgaactgcgcggttcttggcgtagcgctgacaaacgtacaaaacggatattatgaaaaaggtgtcgggatcggtttgctgaccggtgtagtgaacggatttgcgacagcggcgggattttttgttgcgattgttcttatggccggaattcgggaaaaaatcgaacacaataatgttcccgaagcatttaaaggaactccgatcgttcttgtgacagccggactgatggcaatcgcattttgcggattttcaggattaatataggaggtgcgatagaatgaatataacagcgattcttttggctgccgcgatcgtcggtggagccggattatttatcggtattttcctaggtgtatccggaaaaaaattcgcagttgaagttgatgaaagagaagaggcgattctcgatgttttacctggaaataactgtggaggctgcggttatgcaggatgttcaggcctcgctgcggcgattgctcagggaaaagcggatgtaggaggatgcccggtcggaggcgcttctgtagctgggaagatcggtgagattatgggcgtagacgcctcggcaagcgaaagaaaaactgcatttgtaaaatgcggcggaacatgtgaaaagacaaaaagtgaatatgaatattatggaatcaaagactgtatcatggcaagtcagatgcaggatggaggagcaaaagggtgtgcatacgggtgtctcggatatggctcatgcgtggatgcctgtccgtttgatgcaatccatattgtagatggaatagcagttgttgataaggaagcatgtaaagcatgtggaaaatgtgtggatgcatgtccgaagcacctgatcgaattgatcccgtataagcagaaaacatttgtgcagtgtaactcaaatgagaaagggaaagcattaatggacgtctgccaagtcggatgtatcggatgtcgtctctgcgagcgaaactgcgaagccggggctattacagttaataactttttggctcatatagatgccgacaaatgcacaaattgcggcgtatgtgcagaaaaatgtcctcgaaagatcataacagtacggtttgaagcgtgagtaaatgaagcgttaaaagtgtagtgtatcgccgggattttcaacgtgtgtgaggttagaaatgaagaaaaacgataacattcttatacttggcatcctgttcattgcgctggtcgtgctaggaattcagctattacactcggcaaacggtacggagaaagtaaaaattactgtagacgggaaggtttttggcacatatctgttgtctgaagatcgaactgtttcagtgaacgaaacgaatatagttttaattacggagggtacggtttcaatggagtccgctgattgtccggatcagatttgtgttcaccatcagaggatcaaaagaagtggagaaagtattatatgtcttccgaataaagtcgttgtgtcgatagaaggcggaggcgaagaaaaacttgacggaactgtacaatagtcaggagagagtgatttgagaaccagagctgcatatttcggtatatttacagcgctggcattgattttaggttatgtggaactgctgattcccattcactttgggattcccggagcaaaactgggacttgcgaatcttataacaattcttgttctatataaaatggggtggaaagaagcgtttctcttatctgttgcccgcgttgttttaggcggttttatattcagtaatctattttctattttatatagtctggcaggcgggattttaagtctgatcgttatgggaatattgaaaaaaacagggaaatttactgtagtcggtgtcagcgtctgcggcggtgtttttcataatgtcggtcagcttgcggttgccatggctgtggttcagacatacgaagtaggatattacttccctgtacttttgattgcggggcttttgacgggaatgctcataggaatgatatctgccgaagtactgaaacgaactaaaaatttacgattaaaggaataaaaaaatgatttcatatgtaaaaggtgaattagctgcgatcgaggaacaaaaagcaattattgatgtgggcggcatagggtatggtgtgtttatgccacatcaggcactggcgatgttaccttctgtaggaaatgaagtgaaactttacacttatctgaatgtgcgggaagatgccatgcagctttttggatttttgacaaaagatgatttggaaatattccggcttgtgatcggagtaagcgggatcgggccgaaaggcggtttgaatattttgtcatgtatgtctccggatgaactgcggtttgcaatcatgtcgggagatgcaaaaatgatttcgtcagcgcctggaatcgggaaaaagactgccgaaaaactaattgtagaacttcgagacaaagtagatattgaaaaaatgcttgatcatgctgctcatccggaagaaacaatacagacagatatggcgaaaacatcggcaaatgaaatgcaatcggaggcggtacaggctcttgttgcgcttggttacgggagtgcggaaagccttcgcgcggtaaagaaaacttctgtacaatgtcagactgtagaagatatattgaaagaagcgctgcagtatcttttctgatgagaggatgtggataaggcggaaaggaaataatggacggcaatgggaaaacgaatcataacgacagaaaacttagaggaagacattaagattgaaggagaattgcgtccgcaatctctcggcgaatatatcggtcaggaaaaggcaaaagaaacacttggcatctatatagaagctgctaaagcgcgcggggaaacacttgatcatgtgcttttttacgggcctccgggacttggaaaaacaacgcttgccggaattattgcgaatgaaatgggtgtacacatgaaggtaacgtcaggacctgcaatcgaaaaaccgggagaaatggcggcaatcttaaatggtcttcaggaaggagacgttttgtttgtcgatgagattcacaggttaaaccgacaagtagaagaggttctttatcctgctatggaagattttgccattgatattatgatcggaaaagggtcggccgcccgctcgatccgtttgaacctgcctaaatttacacttgtcggcgcaacaacgagagcgggaatgttaacagctcctttacgcgatcgtttcggtgttatgcaccgtttggaattatatactccggaagaactaaaaacgatcatattacgttcggcatctgtgttaaatgtagagatcgaagaggacggggctttagaacttgctcgccgatccagaggaactccccgccttgcaaaccgtctgttgaaacgtgtaagagatttcgctcaagtaaaatacgatggcaaaatcacgaaaaaagtggcagattatgcgcttgaccttcttgatgtcgataagtatggtctggatcatatcgatcgaacgattctgctgacaatgattgaaaaattccaaggcggtccggttggtttggatacactggcggcggcgatttcagaagatgcaggaacattggaagatgtgtatgagccgtatcttttgaaaaacggatttatacagcggactccgagaggacgcatagtaactgatctggcataccggcatctcgggatagaatcttttgcggatgaataatttcggaatagttatgaaacggatagttccgaaaaaagtagttggtttttaccgctaaatagtttataatgaattttaagaaacgcgaggaggaagctatgagttcagcaaaacattttacggaagtattgatcggaggaaaagtatatactttgagcggatttgagggcgaagagtatctgcagaaagtgtcttcctatttgaatcataagataacagaatgtacaaatagtgaaggatacagaaaacagagcgctgacacaagaaatgtacttctcgctcttaacattgccgatgattacttcaaagcaaaaaaacagggtgattcgctggagagtgacattgaactaaaagataaggaaatgtatgatttaaagcatgaacttatttcagcgcagatcaaactggagaatgcagaaaaagagttggcaaaattaaaagaagagaacaacgatcttcaaatgcagattgtgaagctcgagacagaaatgaaaaatcgcagaagataaaaataaggctgtcagtcatatgacagcctgtttcttttggatagtgtctttttagatagttgttgttttatataaagggaaaacacctgtatgttaaaggggatgtagggaaaggagtcagcatggaaaaacgccggattgaaatattggcgcctgccggatcttatgcttcttttaaagctgcgatcaacgcaggagcggatgctgtgtacgccggaggtccgaaatttggagcaagagcatatgcggataattttacaaaagaagagttgatcgaagcgatcaaagaagctcatatatacggaagaaagctttaccttacggtaaatacactgctgaaaaacaacgaaatttcagagttacccgaatatctgagtccgctttatgaagcggggttagatgcggtgatcgttcaggatataggagttctcgaacttgtaagagagtactttccgaagatggatattcatgcgagtacgcagatgacgatcacagggtatcgcggagcggcatttatggaagggcagggaatcagccgtgttgttccggcaagggaattatctcttgaagaagtgcgtatgatcaaagaaaaaacagggttggagatagaatgttttgtacatggtgcactttgttactgttattccggtcaatgccttttaagcagcatgatcggcggacgcagcgggaacagaggtcagtgtgctcagccttgcagactgccgtatacagtagaaggtgaaaaaaaatattatttaagtccgaaagatatttgtacgctggatctgatcccggaacttgcggaggcgggaatcgattcgttcaagatcgaaggtcgtatgaaaaagccggagtatgtagcggcagtaactgcaatgtaccggaaatacacagatttatatatgcaaaacggaaaaaagggatataaagtttcttccgaggataaacgtatactgatggatctgtataacagaggaggattttcggcaggttattatcgacagcataacgggcagaatatgatagcgtcggatcgtccaaaccacgcaggcgttccggcagtaaaggtagaaagccaaaaaggaagattgatcaaaggaaaaattcttacagacctgcatgcaggggatgtgttggatatttcaggaagctatactattggaaaagatcagaaaaaaggggaagctttttcaatggtagtgcagaaacaagtttatataaaacagggatcgacaataaacagagtgagaaacgaaagtcttatcacttcgattcataagcagtatatcggagattcaatcagacagaagatagacggaaaacttacgctggaagtgggaaagccggcaagtttgaaattgtactgtaatgaaagtacatatactgcgtactcaaaagaaattgtcgaacaggcgcagaaccgcccgatggaaagagaacggatcgtttctcaaatagaaaaattagggaatacgccctttgtttttgaaactttggatattaagatggatgaagcgatttttctctcgattaaaacacttaatgatcttcgcagagaagcggtaagcggattgtgcgaggcactatcggggaaatattacagaaaaacaacagatgaaaaaaaagaaaagagaattgcagctgaggttatagaagaaaagaacaatacttatgatcaatttaaaagaaaagaaaacttttcttattcggttctcgtggaaaataaagaacagctttcggcagtctgcgcctatttggagaaaagagaaacggagaatataaaaatcgcacgtatctacgccgaaagcaatatttttcaggaagatatcccgggatacatcgaaaaattaaaaaagaaaaagatagaattttatcttgctcttccgcatgtattcagaaaaggaagcgcagaacggattgaaaaatgtatcagtcggttttcggaaaaagagttagacggcgtacttattaggaattgggaacagtatacgctgctttgtcaattacaatttgacaaaaaagtaatttcggatgataatttatatgtgtttaatcggttttcaaaagagtttatgaaaaaagcaggtttctctgagtttacagcgccggcagaattaaatgagagtgagcttaaaatacttggacttgaaactgcggaactgacagtatatggttatcgcccggttatgatttcggcgcaatgtattatgaagacgagaggaaaatgtacaaaaaactcttcctttacgcagatgaaagacaggataggagaagagtttctcgttcaaaaccgatgtgatgaatgttataatatcgtttataacagcgctcctttatatttgggcacacaaaaagtaaagattcaaaagctttcaccgaaaagactgaggattcgattcggagcagagcgaaaggaagaagtaaagaaagtattagaacaagcaatcgatgcatttggagaaaaaccgcagtttgattatacacaggagcatttcaaactcggcgtactgtaagtgcgctcgattatcgtcaggagaaataacgtggtaaatattatcattcaattatctaaatatgtaattatcatacttatggctgcttatacgttttcctgtttctcgatttttacgagaaattatgaagatgaagaaaaaagagtgcttatccggcaggatgtattgatgtttcttttgcagtttgcagcgtttggtacaatgtatttggcaacaaaagatattcggatcttgtttttatatgcagtattgacggtgattcttcttgcggtcattcttttgtataatttgatttatccgaatgtgtcaaggcttgttgtaaataatatgtgtatgctgatcactgtcgggatgatcatgatcacgagattgtccgcagataatccgtctccttacggcacggcggtaagacagcttgtatttgttgctttgggaattacctttggacttgttgttccggttttgatccgaaaaatgaagttccttgatcagtggacatatatttatgcggcagtaggaggagcagctcttcttgcagttgcattgttcgcacagatttccggcggggcaaagctgggattcgaaattgcaggcataaatatacagccgtctgagttcgtaaaaattatttttgtattttttgttgcagcaagtctgaataaatcaaaagaatttaaaaatatcgttgtgacaactgcgattgcggcagcacatgtattgatcttagttctctctacggatttgggagcggcactgatcttctttgttgtttatcttgttatgctttttgtcgcgacaagacaatggctgtatgcgatagcgggacttggagccggagcagccgcggcagttgtcggttatcatttgttttcgcatattcaggtcagggtagaggcgtggcaggatcccatcgggacgtacagcggaagcggttatcaagtggcacaatcgttgtttgcgatcggtacgggaagctggtttgggacaggactttttaaaggacagccggatacgatacctgtttcggagacagattttatcttttctgctattacagaagaaatgggagtgatttacgcactttgtctgattttgatctgtgtaagctgttatgtgatgtttctgaatattgcaatggaattgagaaataatttttataagttaatcgcacttggattgggaacgtgttatatttttcaggttttcctgcaaataggaggcgtcacaaaatttattccgtctacaggaatgactttgccgtttgtaagttatggcggaagttcgatgttaagtacgatgattatgtttggaatcattcagggactatatattataagagaagatgaagaagaggaacgggaaaaagaaaaactaagaaaagaaaggaaaagaaaaaatggcgtgggaagaacagcgccccgaaagacggcaaaaagcggaccgaaattcgaagaagtcccaagacagaggccgcggaaaaaaacgggaacgcgcacaaaataaagatttcgctaaaattacatatttctttgtgatcttgtttattgcattgatggggtacctcgtttatttcacaactgtaaaagccaagacgtttgtcaatagtccttataatcaaaggcaggattcttttgcacaaagcgttgtcagaggagatattacagatagaaatggcaatgtacttgcaacaacggaagtggacgaagacggaacagagacaagaacgtatccgtacggctcgctgttctcccatgttatcggatataatgattcacagtttggaaaaacaggacttgagtccgcgcagaattttgatcttcttacttcaaatgcattttttatggaaaagattcaaaatgaatttaaaggagaaaaagatcagggagacacagttgttacaacacttgatgcagaacttcagcaggctgcctatgatgcgctcggagagaacaaaggagcggttattgtgatggaggcagacacagggaaaatacttactcttgtttcaaagcctgattttgatccgaatacgcttgctgaaaactgggagatcctaaatacggatgaggaaaacagtccgcttttgaatcgggctacgaacgggtcttatgctccgggttctgtatttaaaattgtgactgctcttgcttatatgcggcaggatacggattataactcgtattcttatgactgtcagggatccattacagaagacaatgtcacaattcgctgttttaacggaacggtacatggatacgaagatttgagaagttcttttgcaaactcatgtaatgcatcatttgcaaatatcggcttaagccttgacgtggacggctatcgggaaacggcggaaagcttattgttcaataagaaacttccaagcgttatggattatacaaaaagttccttcgtgcttgatgcgaagtccggttccgcagaaattatgatgacggcaatgggacagggaaaaacaatggtaagtccgtatcatatggcgctgatcacggagacgattgcaaacggcggtacattgatgcaaccctattatgtagataaagtgaccaattacaccggtacggaagtgaaaaagaatgttccgaaaagttataaacggatcatgacgtcagaagaagcggcacagttaaaagagtacatggcggctgttgtaagtgaaggaaccggttcggtattaagcggaaggtcatatacggtcgcgggaaaaacaggaacggctgaatatagtatgacagacggagaaaaaacgcattcatggtttacgggatttacaaatgttgacaatccggaacttgtgatcactgttattacagaaggttccgacggaagtgcaggaggaaaagcggtatctatcgcaggagctgttctggattcttattataatcggtgaagtttatgagtcagatagagttttatcataatctatatgttagtgaatgctggcagaagaaaaagggaaaaatagtaaaaaggctgaaggaaaataaacttcagccgcaagtatatgttattacattatctcagggagaacaaaatcaactggaatttttttcaagcgtcttgctaaaacaatccatatttgaacattcaaagctttttgtgatcggaattgcagatggatatgatgaagcgcttttccttgttgaagaaattgttcaagacgtatatcaagaaaccaaaagtgcaaatgcaagacagtttcttttaacagatcaggctgaatacgagaaaaaagggcggtaggcaaatgttacatatcatactccttatcttaaaaatacttggatttttgatacttgttttagcaggacttatgttagttgcagttataacagttctttttgctccggcgggatatcgattcgatttaactgcagaagaattcgggaaaagtattttgggaaagctgcgtttctattggataaaaccgtttatttcgggagaaatctgttatgataatgggaatttgacgtggaatataagagcggcttggaaaaagtttggaaatgccgaaatacaaggaaacgataaagacaaaaaaaatataagaaacgaaaccgatagttcaaaaagaaaagacccggaaagagagaaagatcaagagaaggaaaaaaatttttcaaagccagatgatacaaagggcggggaaggcagcgatacaaaagtacttcccgaatcaaatacaattgatacaaaaagtatccgtgaaatacagacagatgaaaaaaatacaggttttgagaggaaagcggatgaagtaaaaaaaattccgaaaaatagaaaaagttcttcgaagtcatttggagagaagattaaatacacatttcggaaattatgtgataatataaaaacattaataaagaaaaaagaagttcttgaacagttcttgaaaaatgagattcacaaaaatgcattttcaaaacttattaaagaaacaaaacaattcgcaataaaattacgtccccgaaaagccgcaataaaagcgaagtttggatttgaagatccgtcagttacaggctatattctcgcgttaataagtattatttatcctttcttggaggggcagaccgagattataccggattttgaacataaagtctttgagatggatctgcatattgaaggaaagataagacttctttatttgtttttatttgcttttcatatgcttatggataagaatgtgagaataacggtcacgcatttgaaaaaattaaagttatgatatttggaagttcaaacaggaggaatgaaaaaaatggcagacagtaataacaattttaaatcaacggtagaggctctttttaaaggtatggatgcggtcgtatcttcaaaaacagttgtcggagatgcgattcatattaatgatacaattatccttccccttgtagacgtttcttttggaatcggtgcaggttcttcttcggcagataaaaaagaaaaaggaatggggggaatcggaggtaaaatgtctccgagcgccgtgatcgttatacagggagggaagacaaagctcgtaaatgtgaaaaaccaggatacaatcacaaaaattcttgatatggttcctgatgttgtcgatcgttttacgggaaaagatgaacgtatgacagagaaggaagtaaacgatattcttgatgccgaaatagaaaaataaaaaagaaaagtaagcggtatattattttgaatgatataatatagttctggatttataggaatgtgcatagggtagaataagaagcttcccgaaagtgaatacgatatatgaaaaaaatatgtggctttgcattattttggatggcgatcggaatgtttataatgatgatgcttccaaacgttatttggggagttattttgattattttgtttctgcttgtcggatatcggcttttttgctgttgttaaaaagaaaaataaagaagcggtattatgttttttcttgaaacgtaaaaacaatgacataaaaaacggatctgaatttacagatccgctttttccgtgtcattgtttccgatgatgtgtgtctgattaagcgcgctcaacgcgtccggacttcagacaagatgtacaaacatacatttttttggaaccgccttctgttttgactctgacggattttacatttgatttccacattttcggtgtttttctatgagagtggcttacattgttaccaaaatgagcacccttttcacaaatagcacatttagccatgactgcacctcctaacaatctgaactcgtcatatagactcataacactgatattctatcagaaacatttcagtattgcaagtattttttaaaaaaaacgaatgtatattgtaaaatgttagaagtgatagtataataaacatgttatttatggcaaaattgtgtgaaagaaccggaggtatatattatgaaaggaagtatgagcacagatcttggcattatcacggtcaatccggaagtgatcgccaaatatgcgggttccgttgctgttgagtgtttcggaattgtcggaatggcggctgtaaatatgaaggacggacttgtgcgtcttctgaaaaaagatagtctgacacatggaattcaagtgacgatttctgataataatgaaattacattgaattttcatgtaatcgttgcatatggcgtgaatatcctttctgtttctgacaatcttatgagcaatgtaaagtataaggttgaggagtttaccggaatggcggtagaaaagatcaacatctttgttgaaggtgtaagagtgattgattaaggaggatattttcgtggcagtgaaaacgataaatacagagctgttccgcaagatgtttcttgcaggtgcggccaatctggaagcaaaaaaagaatttataaatgaactgaacgtattcccggttcccgacggcgatacgggaacaaatatgacacttactattatgtctgcggcaaaagaagtacaatctcttgaaaatgcggatatgttgacaatcgcaaaggcaatttcttcaggatctcttagaggagctcgcggtaattcgggagtaattttatcacagctgctcagagggtttacaaaagagatcagagaacataaagagatcgatgcggtgattttggcaaaggcatgtgaacgtgcaacagcaacagcttataaggcggttatgaaaccgaaagaaggaacgatccttactgttgcaaaaggaatctcaaggaaagcggaagaacttgcggagacgacggaagatttggaagttttcattcctgaagtgatcaaatatgcggaagaagttttggctcagacaccggagatgctcccggtattaaaggaagcgggagttgtagattccggaggacagggattgcttgaagtgattcatggggcgtatgatgcatttcttggaaaagaaatagattatgcggcaatcgaagcaagcggcggaacaaaaatggtaaaaccttcccagcaggcggaagcggatattaagtttggctattgtacagaatttattatcatgacagaaaaagaatttacagataagaatgaagcagagtttaaagcttatcttgaatcgatcggcgattcgatcgtttgtgttgccgatgatgatattgtgaaaattcatgtacacacgaacgatccgggacttgcgattcaaaaagcgctcacatacggtcagctttccagaatgaagattgataacatgagggaagagcatcaggaaaaactgatcaaagacgcagaaaaagcggcagctcaacaggcatctgagaagaagaaaaaagaaccgagaaagtcggttggttttatagccgtatctatcggtgaaggaatgaatgagattttcagagagctcggtgcagattatatcattgaaggcggacagacaatgaatccgagtacagatgatatgctcagtgcgatcgatgaagtgaatgcagaccatatctttattcttccgaacaataaaaacattatccttgcggcgaatcaggcacagtcattaacagatgacaaagatattattgttattccgacaaagactgttccacagggaattaccgcaattatcagttacatgccggaagcggacgtagatacaaatattgaagcgttagaagaagcaatcaaaaacgtaaagaccggacaggtcacatatgcagtccgtgatacgcacattgatgacaaagaaatacatgaaggcgatataatgggaatcggagatcggggaattctcgcagtcggacagtctgttgaagagacgacaaaagagatgcttgcacaactcgtcgatgaagaatccgaattgatcagcctgtatttcggacaggacgttttggaagaagatgcggaaaattttgcgcaggaagtggaagagttgtatcctgatgtagatgtggatgtacacatgggaggacagccgatttattattatgtgctctccgtagaataacagaacaaaatttttataactaagcagtaatatatgatataaagaggcgctcttccataagggggaacgcctctttatatcagatcacataggcagatagaaaaataggcgggaatgaaagtggaaaaaagaaagatcagttccttaaaaggaatcggagaaaagacagaaaaattgtttcaaaaaatcggagtagatacagttgaagatctgattcgttattatccgaaaggatttgagatttttgaagatccgatttctgtcggtgaagtagaagaaggaaaagtttgtacagtagcaggtatggttttcggcagaattcaagtatcgacaaattctaaaatgcagataacaacattacatttaaaagatgtgaccggtactttaaaagttatatggtatcgaatgccgtttttgaggaatacactcgcaaaaggcgggacacttgttctgcgcggtcgtatcgtaagaaagaaaaatgaaatcgtaatggaacatcctgaaatattctatccgtcatcaaagtatgaggaaaaaagagatacaatgcagccggtatatagcctgacagccggcttgacgaataattctgtcattaaagctgtaaaacaagcactgtcttttttggatgatgaacaggatattcttccggaagagcttcggcttaaatactcttttccgaaatatgaagaagcaatttacgcgatgcattttccgagagaaaaagaggattttgtccgggcacgaaaacggtttgtgtttgaagaatttcttctttttattttatcactgcgtagaatgaaggagtccgaaaatcgcagcgaaaatccatttcattttgcagatcgtccggagatagaacaatttttaggagctcttccatatcatcttacaaatgctcaggagaaagtttggacggagattaaaagtgacatgcaaagtgaaaacgtcatgtcgcggcttgttcaaggagatgtcggatccggaaaaacgatcattgcatttttggcgcttttgctgtcagcattaaacggatatcaaggtgcgcttatggcgccgacggaagtattggcggttcagcactatgaaaacatatctgaaatgttggaaaaatataaaatcccgcatcaagcagaacttttgacagggtcaatgacaatgagtcagaaaaagaaagcttatgcccgaattgaatcaggagaagccgctattataatcggaacccacgcgcttatacaggagaaggttttatatcgtaatcttgcgttagttgttacggatgagcagcatcgattcggggtaagacaaagggaaacactggcgcaaaaagggaagacacctcatattcttgtaatgagcgcgactccgatcccgcggacgcttgcaattatcttatatggcgatcttgacatttctattatcaatgaaatgccaaaaaacagattgccgataaaaaattgtgtcgtaaatactgaatatcgggaaaaagcatatcgttttatgagaaaacaggttttagagggacgacaatgctatgtgatctgtccgatggtagaggaaagtgaaagtctggatgccgaaaatgttatcgactactcgcaaatgctcgcagaagaattgggggatggtattcatgtaggctgccttcacggaaaaatgaagcagaaggaaaaagatgagataatgtctgcatttgggaaaaatgaaattcagatacttgtatctacaactgttgttgaagttgggatcgatgtgccaaatgcaacagttatgcttattgaaaatgcggagcgtttcggacttgcccaacttcatcagcttcgcgggcgtgtcggaagaggcggatatcaatcttattgtatttttatgtctgcgtctaaatcggacgagacaaaagaaagacttgaaatcttgaaccgctcgaacgacggtttctttatcgccggggaagatctgcgtcttagaggaccgggagatctgttcggaatacgtcaaagcgggattcttgactttaagattgcagatgtgtttcaggatgcagaagtgttaaaaatcgccggcgaagaagcaaataaaattttaaaaagagatcctgaattaaaagacccttcttataaaaaaataaaaaatcatatcgatcataagattcaacagattatgttagaaacgacgttgtaatggatgaaaggtgtaaaaaattgccagtttaaaaattgttgtcctccatatactatgagcgtaacaaaacaaacggaagcaaatgtatcgtaaccggctgcatagaaagcagattacatacatgtgcagccggaagaattgttacaacaaacgaaaacgataaatgtcgttaaaatgcaaaaggaggaaattgatcatggcaaatcgttcatctaacagagcagcagtaccggaggcaaagggcgctctggacaaattcaagtatgaagtggcaagtgagttaggagtaccgttgacagacggttataacggagacctcacatcgaaacagaacggatctgttggcggatatatggtcaagaaaatgatcgagcagcaggaaaaacagatggcaggcaaataacatcgttttttcgataaaaaagctcgtccctattacaaagaaaaagacgtccgggattgacccggacgtctttttctgataaaattttgcgtagttgttaaagaaaacgaggtgtcattttatgcgtgtaattgcaggaagtgcaagaagtctcagattaaaaactttagacgggatggacacaagaccaacgactgaccgtatcaaagaaacactgttcaatatgatcggtccgtcaatgtttgactgtgtatttcttgatctctttgcgggaagcggcgggatcggaattgaagcgctcagcagaggagctcgcgaagctgtttttgtagagaataatccgaaggcaatgatgtgtgttaaagacaatctgaagtttaccaaattagaaggcaaggcggttacattgactacagatgttatgaatgcgctttacaagctggaaggtgaaaaggtatttgattatatttttttggatcctccgtatgacagaggattcgaaaagagggtattagaatatttatcggattcaagtcttgtctatgaagatacccagatcattgtggaagcgtcaaaagaaactgatttttcgtatttacaggatttgggatttgaaattatcagagaaaaaacgtataaaacgaataagcacctgtttatcgagaaggcggggaaagaggaagtatgttaagagcaatttatccgggcagttttgatccggttacttacggtcatatagatattatgcgaagatcatgcaaaattgttgacgaattaattgtcggcgtattgagcaataaagcaaaaatcccgttgttttctgtagaagaacgtgttaaaatgttaaaagaagtgacaaaagatcttgataatatccgaatcgttccgtttgatggacttttagtggagttcgcttcgcgtatgaatgccggacttgtgataagaggactgcgggcaatcacagattttgaatatgaacttcagatgtcacagacaaatcaaaaactggatccgaatattgagacgatgtttttgacgacgagtattgaatattcttatttaagttctacaacagtaagagagattgctgcttttgggggagatttaacacaattcgtgccggaggcggtagctttggaacttgaaaaaaagatgaatacaaaaggagagtgtaacaaatgagcagccgtattgagcagattatcgaagagattgaagagtatattgaccgagactgtaaattccagccgctgtcaactaccaagattattgtgaataaagaacatttagaagagcttttgagagaacttcgtctgaaaactcctgacgagattaaacgttatcagaagattatcgcaaacagagatgcgattcttgcggatgcacaggcaaaggcggatgcgatgattgaagaagcgcaggtacagacgacagagcttgtcagcgagcatgagatcatgcagcaggcttatgcgcaggcaaatgagattgtaacgcaggctacggcacaggctcaggagattatagataacgcaacgagtgatgcaaatgcaatcaggatcggagcaatccagtatacagatgatcttatggcaaatgccgaaagtattatcggacatacacttgatagttatacaacaaaatacgatggtctgatcagctccctccaggaatgttatgaaaccgttcgcgcaaatcgcgcagaacttgatatcccaacagaagaagagtccggaatatataattctcaggacgatttattctagggtgacggatatttcgactatttttaattatatatgatacaataaaagcagacgcttttaagaaaaaagagatgcctttcaagcaagattgtttggaaggcatcttttgtaccggaaagcagcggtattgaaagccgatgtgcacatgttcgacttccggaggacatcttttcgaaatgtgacagatctagtgtcggaaagtgttcaaaaatgggaacttttgcagttatctggatgtagcgtccattcatctgaaatacattttcaagaagtattaaaaatagaagaactctgttcatttgtctgaaaaagcgttacaatcgtttcagaaggacggggaggtgttccagagatcagaaagaacaaacagagtgcatgggtttaggtttagatggaatgcagaaaatgaacggcgcgattaatgttgatttcatgactgaggaagagattcatcagaagctagaagcgggatataaggatatggaaagcggaaaagttcgggaggcatcaattgtatgatacaaagcaaacgatagaacaagtaacagactttgcaaaaaaagcaaccgctttgggattttataagcaatatcgggtatctgcggaattgggttctcagattgctggcatgatggagaaagaattcatagactatttagaagagaatggtgtttccgtatggaaatagaaaaaagatataaaatgctggcagatacataaaaaaatgagggaagcacatagaataaaaccggtatgagttgtccttgacaaaggagtttgttgaggatatcactatacctagtgatcgcactacggaaacttgagaagcccgtagtccggaaggcccctgcgggggcctttcgttattttcggggaagtacaaaggcggcggggaaatgaa

SEQ ID NO: 7632 - DNA, 97102 bp, Unknown
  gut microbiota DNA sequence
agttatgacaaagttcagaaatgtgtgtgctcatagtgatcgtctgtttgactttcgtaccaaggatgctttatgtgatatgaaaattcatgaaagacttttcttaccaagagagcaaggaagatatgtgtatggaaaaatgacttgttcgcacagttgattatcttgaaacttttattgccggaagatgagtttaaaacacttttccacgaattaaaaatttgagtgtatgaagaaaagtctgtaattaagattttctatgataatgatagggggggggaagctcgttccggagctttcaacccttgttttggaactttatggttttgtggacattaacaccacaacaggttagataataagtcggactcctttcgtaaaaggtttcattatattgtaaagccattgaaagtagatattataaaaaaagcagtacataaccatacgctgcagcggccgaaattacagctgttattattttctggattaaatatggaatgaaaggaattccggaagaatgaatcatactttttgtctgtgcgagcgcgcataatcccccgaatgaagttaatgcaataatgagcggatatgaaacagcaatattctcgaatctctcaaaaagaatgataattccgtttgtcagttccaaaacaggaagaagataaaaaaacgcaggaatatccgtggaaaattttgtgagaaggcgtataaaaacagaaaagataatgatatagccgcctacctttacaatgttttcaaaactatccatcatacattcgtcgaatgtgcggaaggaaaacggattgtttttacattctgtctggcgcaaggattctccgtatgattcactatgtttgaaataaaatcttctgaaaaagaaactaagaaaaatcggaaccgcaattaatatgataagcgttggaacaagtaacgtccgatcacgcaaaatcttgtgtataataaaattaacgataaaaacaggacttgtattattacagaaagataacagataagcagcctcagagcgttcgatcttttttgtacacacaagatctgcggtaacttttgcacccatcggataaccgcataaaaatccggcaataacagaaaatgcccctgcggcagatacggaaaatatttttccgagaggttttccaagtacatttgctattatatttagtcctccgctttttaaaagaatagcagtaataaacataaatggaaaaagtgtaggaaaaattgtgttaaaccagagtaaaagtccgtctgcagcacctgtaaaaacgatatcaggagaaacgagcattgcaagaaaaagaaaaacagtcagacttccggcattgagaaaacctattttttttaataagtttttactagatgagcatttcacaatttttactccttttttccagaaacaaaatcatatagtaatgcttatgatgcacacatcttttgtatgaaaatatcatatagtgaaagacagaataaaatgtgttttttatattgacaaaaaacggaaggggcagagtgtgagaaagtttcaaaaagggaaaagagacttttttaaaaattttacaattttgtcttccgtactgtttttctgcgtattgcattcggctatatggattccgaaacttcaatatcaaagcgagaaaagccgattgtcggaagatattgtgtattccaatttttttcgcagacagcctgtatctgatgaagtgttaaaaaaattgaaagaaagtgaagatccgggaaagtttctcggtttgtactggctggaaagtgattttgaaagggaaaaaacagtcggagatattacaaaatcagaaaacagatggaaaaaagcagagaggtggaactcgtatgtcagtgtctgtcgggcaatctggaatgacctggaatattttcctgtagcggaaactaattttgggaaagcgaacgtttctttttcagattcgtggatgttggatcggacttacaaaggagatagaaaacatgaagggacagatattatgccgtctgtcaataagcgggattactttcctgtcgtaagtatgactgacgggattgtaacgtcggtcggttggttagaattaggtgggtatcgtgttggaatcacttcaccgggaggcgcttacttttattatgcacacttaagttcttatgccggaataaaagaaggagatcctatatcagcgggcgatgtgatcggatttatgggagatacgggatacagtaaaagagaagggacaacaggaaagtttcctgtgcacttacatcttggaatttatatttataaagacggaaaagaaatcagtgtcaatccatatgcagcgttaaaatatgttgaaaacagaaaaatcaaagcatactcagacaggtagaataatcatcggaaagtcttttatgaagaggcaaaacatgatatgatagataacacatgaaaaaagagttgtgaaaagcaacagaaaacagaggaaatattatgaatctaccgattgaatttgaagaaaaaatgcaagatctgcttggcggggaatataacgattatttaaaatgttatgaagaaccccgccattatggactccgtgtaaatacatccaaaatatcaatagatcgttttttagagattgctccatggccgcttcgtccgattccgtggattgaaaacggtttttattatgatggagaaaaatatcagcctgcaaagcacccgtattattttgcgggattgtactatttgcaggaaccaagcgcaatgacgcctgcaaacagactccctatcgaagccggagaccgagtgcttgatgtgtgcgcagcgccgggaggaaaagcgacagagttaggggcaaagttaaacggatcgggagttttgatcgcgaacgacctgagtaattcaagggcaagaggacttttgaaaaatattgaacttttcggaatcggaaacgttcttgttttaagtgaagaacccggaaagcttgtgaattattttccggagtattttgataagatcttgatcgatgcgccgtgctccggagaaggcatgtttcgcaaggacagaaaaatggtaaaggcatgggaagaacatggtccggaattttttgtaaaaattcaaagaagcattattacacaagcggcgcagatgctgaaaccgggcggaatgctactttattctacatgtactttttcaccggaagaaaatgaacagacgattgaatttctgttacaagaataccctcaatttaagatttgtgatatcaaaggatacgaagggttttcagatgggattttaaaagcttctttgagcggcaatgaacagttaaagaaaacaatccgcatttttcctcataaaatggaaggagaaggacattttatcgcgcttttaaaaaaagaagaagaggcagtttcagaaaacttaaaggaaaaagaaaaaaacaatcgaaataaaaatgaaaaagaaaaaagattaccggacgaacttacggaatttttgaaaaatgtaaaaagaaaattcgattcatccagaattgatatgcggggagaaaatgtatattatatgccggaaggtcttccaaagttaaacggagtgcggtttttacggtccgggctactcttgggagaattgaaaaaaaggcgttttgagccaagtcaggcgctggctatgaatttgaaaaaagaagaatatgaaaatgtactagatttttcggttgatgatgaacggattataaagtatttaaagggagagacattggaagttgaagatctcgtttcctcaaaagagaaggggtggtatctcgtatgcgtagacggttatcctctcggttttggcaagctgtcaggacagatgttgaagaataagtatctgccgggatggcggtggcagtcatcatgaaattgcggttagataaatatttgacggaaatgggatgcggcacaagaagtcaggtgaaaaaagagatcttaaaaggaagcgtttccgtcaatggagagatagcaaagaaagctgagcggaaagttgatacagaaaaagatgagattatatttaaaggagaaaagatcttttatgcagggtatgaatattttatgttgaataagcctgccggagttgtgtctgcaacggaagataaaaaagagcgtacagtcatagacctgatcaaagaaagcaaaagaaaagacttatttcccgcggggcggcttgacaaagatacagaaggtcttcttttaattacaaatgacgggcagcttgcgcaccgccttctttccccgaaaaagcatgtggataaaatttattatgcaaaaatcaaaggaattgtgacagaagaagatgtacgattgtttgagaaaggcgtacatatcggagatgaaaaacctacgatgccggcggcgcttgaaattctttctgtacaaaaagaacggcggaaagaaaagataaaagagcagaaaatattgcctgaaacaaaaaatgaaacagatgaaaaggaagacggatattcggaaatctatcttacaatcaaagaaggtcgtttccatcaggtgaagcgtatgtttcgtgcggtaggaaaagaagttgtttatttaaaaaggattcagtttggaacattgacattggatccgtctttaaaacccggacaatatagaaaattaacagaagaagaggtagaacaattatgttgacaggaaaaaaagcggtcatttttgatatggatggatcacttgtagattcgatgtggatctggccggaagttgaccgtatttatatggataaatatcacttgactgcaccggatacatttcacagagatatagaggggatgagttatgtagagaccgcacaatattttgtcgatacctttacaacattaaatcaaacagtagaagacgtaatgcaggaatggcgggatatgacagttgagctgtatgcaacgaaagtatttccaaaggccggcgcagttgagtttctggatttgatgaaacaaaacggtatccgtctcggtattgccacaagcaatgatcgggaaattgcagaagctgcgctgaacggacggggactgacgaaatattttgattctgtacgtacttcttcggaagttgcggcagggaaacctgcgccggatgtctatttaaaagtcgcagacgacatgaatgtagacccgaaaaactgtcttgtatttgaagatgttatcaatggaattctggcaggaaagaacgcgggcatggaagtgtgcgctgtagcagatgattttacaaaagcagacgaagcggagaaaaaggctgccgcggattattttatccgagatttttttgacgttttaaaaaacacttacgaaaggtgctgaattgaaaaatatgaaccatgattttttacctgtatgcagggaagatatggaaaaacgcgggtggaagagcgttgattttgcctatattatcggagacggatatgtggatcatccgtcttttggtcatgcgatcatcagccgtcttttagaatcaagaggatatcgtgtcggaattatttctcaaccggattggaaagatccggaaagtatttgtatttacggagaaccgcgactgggatttcttgtttctgccggaaatatggattcgatggtaaatcattattctgtatcgaaaaaacgaagaagaacagatgcttataccccaggcggagagatgggaaaacgcccggaccatgcctgtgttgtgtatggaaatctgatacgacagaaatataaaaagaccgcagtaattatgggcggtatcgaagcaagtttaagacgtatggcacattatgactattggtcggataaattaaaacggtcgatccttcttgattccggtgcggatattgtttcttacggaatgggagaacgctcgatcctggagattgccgaagctttagaggcgggaataccaatcgaagaaattacttatattgatggtactgtcgttaaaataaaagagaaagaaaaaatatatgacgcccagtttctgccttcttatgaggagctaaaagcagatcggaaaatgtatgcaaaaagcttctatacacaatatttaaatacggatgcatttagcgggaaacgacttgcagaaccttattcggaacatttatatgtcgttcagaatccgccgtcaaaaccgttaagtgttacagaaatggatgatatttatgatctgccgtatatgaggacttatcatccgtcttataaagcgaaaggaggaatcccggcaatttcggagatccgcttcagcctgatcagcaacaggggatgtttcggaggatgcagtttctgtgcgcttacatttcaccaggggcgtattgtacaggtcagaagtcatgaatcgcttataaaagaagcggaacaaatggttgaagaaaaagattttaagggatacatccatgatgtaggaggtccgaccgcaaattttcgtcatccatcttgtgaaaaacagcttcggcacggtgtatgcgcgacaaagcagtgtctctttcctgctccttgcaaaaatatagatgcagatcatagtgattatgttgcactattacgaaaattaagaaagatcccgaaagtaaaaaaagtatttatccgttcgggaatccgatttgattatttgctggcagataaaaagaatacatttttaaaagaactatgtcagtatcatgtaagcggacaactgaaagtggcgcctgaacatatcagcgctcccgtgctttctttgatgggaaaaccggaacatcgaatatatgaagagtttacacgacagtttaagaaaatgaatgaaagactcggaatggatcagtatcttgtcccgtaccttatgtcttctcatccgggatcaacgttaaaagaagctgttgaactggcagaatactgccgtgacctcggatatatgccggagcaggtgcaggatttttatccgacaccttctacgctttcaacttgcatgtattatacgggaatcgatccgcgcaccggtcagtctgtttatgttccgaaatccccgcatgaaaaagcgatgcagcgcgctttgattcagtatcgtgatccgaaacattatgaccttgttttggaagctttgagaaaaacgggaagaatggatcttgtcggctacggaccaaagtgtctgatccgtcccggacgtgaaaaagacagtacaaatacaggacgtgaaaaacaagtaaatacaagtaaaaagccagcttataaaaagatagataagaaaacaaactataagaaaaagacaatcagaaatgtgcatagaaagaaatgaggataaatgaaaatgagagttgcagttgtcaccggagcgtcatcaggtataggaagagagtttgttcgtcaattggaatatttttataaggatctcgacgaaatatgggtaattgcacgaagggaagaacggttggagcagcttaggaaagaagttaatgttccgcttcgcatttttgcgggagacttacagaaaaaacatgtatacagacaattttatacagagctttgtcaatggcaccctaatataagaatgcttgtcaatgcagccggttttggcaaaagcggaactttttcggaaattgccgaaaaaggaaaacggattcatacggatatgatcgatctgaattgcactgcgcttatccgcataacgcaaatgacgcttccttatatgaagatgggaagccgtattataaacatggcaagtgcggcggcgttttgtccgcagccttcttttgctgtttatgcggcgtctaaagcatgtgttttaagtttttcacgtgctctgggacaagaattaagagaaaaaagcatttatgtgacggcagtttgtccgggacctgtggaaacagaatttttcgaggtgagcggagaattaaaaaatcccctcaaaaagctgaatatggcggcggcaaataaagttgttcatagagctcttattgacagcagaaagaagaaatctgtttctgtatatggagcaggaataaaagcggcagaaattatgacaaaactgctgccggtaagtcttattttgaaagcggaggaactatttgtatcatgaaaaagacagaaaaaggaatgccgggatatttaaattataaaagaaaaatagaaatcataagaacgcttgcctattttggcatcgtgatcgcaatattgcttctcggatattttcagacaggaacaaaattaaatcttcttacagtagtagctattgtcggatgtcttccggcatcgaaagcgcttgtaggagttattacacgctttccttatcgttcgatcgatggagaacgagcgaaagaaatcgcgtcaaaaactgatcttctgactgtttgttatgatatggtgatcacgagcagagatcatataatgcctgttgactgcattgtgatatccggacataatattttcggatatacccattataataaagtaaacacgacagaacttgccgatcatataaaaacaattttagcacaaaacggttacaaaggatttcaaattcgtatattaaatgagtataagccgtttattacaagagcggaaggtttaaataatattgcggctgtcgaacaggaagatacaaaaacaaaagaagaaacggtacgtggtcttattctaaacatctctatgtaaataaaaaggaattaagtcaaatgaaagagatagaaatcaactcaaatgaagcgggacagcgatttgataaatttttaggaaaatatctggatcaggctccgaaaagttttctctataaaatgcttcgtaaaaagaatattacattaaacgggaaaaaggctgcgggaaatgaaattttagctctcggcgataatgtgaagttgtttttttcggatgaaacaattaaaaaattttcaaaaacttcaaaagaagtttttcggccggtacagaaaaataccgctaaaagcaaagtaaaactgaatgtattatatgaggatgaaaatgtgatctttctgaacaaaccggtcggaatgctttcccagaaagcaaatcgggaagatacttctcttgtagaatatttaatagagtatcttttggattcagggcaggtaacaagagaggaactaaagacttttcatcccgcggtatgtaaccggctcgatcgaaatacgagcgggatcgttgcgggaggaaagacactgagcgcgcttcagatattaaatgagatgttccgaacaagatcattggaaaaatattatttgtgccttgtttcgggaaagataaaggacggacagaggatttgcggatatttgaaaaaaaatacaaaaacaaataaggtatctgtcacaaaagaaaagagggaaacaaaagaagcgcttccgattgaaacagaatatacccctctttttgtttctgatcatgtaacacttttaaaagtacacctaattacgggaaaaacacatcagatccgtgcacatctggcagcgatcggtcatccgatcataggagattataaatatggagattttaaaataaatgaagcctataagaaaaaatatgggttgaaaacacagcttcttcatgcttatcagctttgttttccggatgtggaactagtaaaaaatctgccaaacaggcagatcattgcgcctgttcccgatttatttaaaaagatctgtattgataaaggagtgaacaataatggctgcatggaattcaagaggtcttcggggttcgacctttgaagaacttatcaatcagacaaatgaacaatatgaacagatgaaccttgccttaatacagaaaataccgacgcctattactcctgtaaaaattgatcagggaagcagacatattacgcttgcatactttgataaagtaagtacagttgattacataggagcagtacagggaattcccgtatgttttgacgcaaaggaatgtaagacagatacgtttcctcttgcaaatgtccatgaacatcagattgagtttatgcaaaagtttgaagaacagggaggaattgcttttctgttgatttattatacgacaagggatgagttatactatatgcggtacaggcaaatacaaaaattttgggatcgtgcgaaaaacggcggcagaaaaagtattcgatttgatgaattggagtcaaattggtttatggaactgaaaagaggatattttgtcccttatctggattgtatacaaaaagaccttgacagaagggattgacagattgaacgaaacttcgtataatatccgaaagagtttaacgaattagcatagtaaagtgaagggggttttatttgcgatggaacaaaaattacatacgcctgaaggagtaagggatatttacagcagggaatgtgaaataaaactcacactacagaaaaaattaaatcaagttctccatttatatggatatcgcgatattcagactccgacgtttgaatattacgatgtatttagagaagagatcggttctacttctacacaggagttatacaaatttttcgatcgtgaaggaaatatattggctcttcgtccggacattactccatcggttgcaagggcggcggctacactttttgatactgaagattttccgcttcgtttttgttatgtcggaaacacttttatcaatcatacaagctatcgcggcaagttaaaggaaaatacacaattcggcgcggaactaatcgggcttgattctgttgaggcagatgcggagatgatagcaatggttgcagacgcattgaaaaagacgggactggaagaatttcagattagtatcggtcatgtcgattttctccaaagtattttatctgcagcggagttagacgaggaaactgtggaacgtatacgggaattgatcggaaatcgcaactttttcggagcagaagagcttcttgaagaaaaggatgtaaaaaaagaaatcaaagaggcgtttgcgatcctcccggaattaatgggaacagaggatgttctggacaaggcgcagcaatttgcaatcagcgacaaagcaaaagccgccattgaacgacttcgtcagatcaatcatcttctttgcctgtataatgcttcggatcatgtaacttttgatctgagtatgagcggaggttatggttattacaccggaatcgtatttcgggcatatacatacggaacaggtgatgcggttgtaagaggcggaagatacgatcatcttcttgaaaaattcggaaaagagactccgtctattggatttgcgatcattgtagatgaattgatgaacgctctttcaagacagaaaatttcggtagacacgataaggcggaacatcattgtatataacgaagagactgaaagcaatgcgatcatccttgccggtaattttcgggaaaagggacgctgtatcgaattgatcaggcaaaaagaaggacaggataaatcgctgtatgaatcatatgcaaaaagaaaaaatgctgcggctttaatctatctttgcgacgataaaaagttggaaatgaccaatttgattacaggagaaaagaaaacggcaaacattgcagaataattgccgtcagtataaaaggagcagaatatgagatatttgacatttgcccttacaaaaggaaggctcgcaggaaaaacgatgaaaatgcttgagagtcttggtattacttgtgaggagatgaaagaaaaagattcacgaaaactgatttttacaaatgaagaattaaaactgaaattctttcttgcaaaaggcccggacgtaccgacatatgtagaatacggagcggctgatataggagttgtcggaagggatacgattattgaagaaggacgaaaagtccacgaagtcttagatctcggtttcggaaaatgcaaaatgtgcgtctgcggacgtcaggagacaaaagaacttctgaatcgtcatgaattaatccgggttgcgacaaaataccctaaaattgcaaaggattatttttataataagaagcatcagacagtcgaactgatcaaaatgaatggttctatcgaacttgctccgattgttggtttgtcagaggtgattgttgatattgtagaaacaggaacgactttgaacgagaacggtctggttgttctggaagaagtatgtccgctttcagcaagaatgatcgttaatccggtgagcatgcgtatggagaacgatcggataaagaaaatagtcacagatttaagagaacttttacgagaggagcaatgcggccatgcgaattgaaaaactgaatcaaactacgaaaaaaaatcttttggaagatttactcaaaagaagtccgaatagctatgagatgtatgaagaacaggtaaaagcaatcttagataatgtgaaaaaaagaggagatgaagccctttttgaatatacagaaaaattcgacggcttctgtcttgatcagcagtctgttcttgtaaaagaagaagaaattgaagaagcttatactcaagtcgacagaggattgattgagataatcagaaaggctttgaaaaatattgagacgtatcatgaaaaacagagacagtacagttggtttgacagtaaacctgacggaacgatccttggtcagaaagtgacggctctcgatcgggtaggcgtatatgtgccgggagggaaagctgcatacccttcttcggttcttatgaatatcgttccggcaaaaacagcgggagtaagagaaatcataatggttactccgcccggaaaagacggaaaagtaactcccaccacacttgttgcggcaaaagaagccggagcggataaaatctataaagtcggaggcgcgcaggcgattgccgctcttgcttacggaacggaaagcatatcgaaagtagataagatcgtcggcccggggaatatttatgtcgcactggcaaaaaaggcggtatatggtcatgttagtattgactctatcgcaggtccgagtgaaatactcgtgcttgcagatgaaacggcgaacccgcgttatgttgccgcagatcttttgtctcaggcggaacatgatgaaatggcaagcgcgattttagtgacagtaagtatggaattggcagagaaagtttccgagcagacagaactttttatcagtcaattatcacggggagagattatcagaaaatctctcgataattacggacatattcttgtggcggatacaatggatgaggcgattgacgccgcaaatgaaattgcatcagagcaccttgaaatcatgactgcatccccatttgaagtgatgacaaagatccgaaatgcaggcgctatatttatcggggaaaattcaagcgaaccgcttggcgattattttgcgggaccgaatcacgttcttccgacaaacggaactgcaaaatttttctctcctctttctgtagatgattttattaaaaaatcaagtattatttcctactcaagggaagcacttgaaaaaattcattcggatatcgaacggtttgccgaagctgaacatttgacagctcatgcaaattcgataaaggttcgttttgaatcagaacgaggagagtaatattatgagtgaaaaaaacaaacgtatagcggtttgcacgcgaaaaacaaaagagacagatatcaccttgtctgttaatttagacggtcaggggaaaaataaaatagatacggggattgctttttttgatcacatgcttgacggatttgccagacatggactgtttgatcttgaggtaaaagtagacggagatcttgaagtggacagtcatcatacaatagaagatgtgggaattgtccttggaacagcaattaaaaaagcgctcggagataaggccggaattaaaagatatggttattttattcttccgatggatgaagtgcttgctctttgtgcagcagatctttcgggacgtccttattttaagtttgacgccggatttacaacagacaaattagggacaatggatacagaaatggtgaaagaatttttctatgccgtttcttatagtgcacagatgaatctgcatttgaaaattttagacggaggaaataaccatcatatggcagaagcgctttttaaagcgtttggaaaagcgcttgatatggcagtgtctccggagcctagaatgacagaaatatggtctacaaaaggggctttataacaaacggctgactcaatgccgtttcgtacaaataaaaaattaggagaataatcatgagttataaaagactgactccctgcatttttattgcgggaggtaaggcggtaagatggtttgacgaccgcactgtattgacagaggatgtaattgcgcttgctaagcaatataatgcaaacggagcagatgaactgcttgtatttgatctttcagattctgatgaagatcatgaagaatccatcgatctgatcaaaaaaataaaccggatcatcagtattccgatggttgcgggaggaaatatacgaagagcagaggatgttaaaaaacttctttatgcgggtgtaaaacgtgcgatgttgaatttttcaaaaaaagtttccatcgatttaattaaagaagtttccttacgtttcggaaaagaaaaaatagcagtatctttaaatgattttgacacgctttttaaacaacagcatttaatagaacaatatagttctgagatcgtgttcatgcaccgtcttgatctgaattctgttgtaaatgtaacggaaatcccgtgcgttgttgtaacagatacaatggatgaaagcgaaatattgcggattttaaaaagcaacggtgtaaagggcgtatccggaatgtttatcagcagtgtcgatatggattttaacgactttaaagaagtgtgtatgcgagccggaattaaaatgacttcgtttgaaagcatgatggatttttccgagtttaagttaaattctgacggtctgatcccggtaatcgtacaggattacaagacaaacgaagttctgatgatggcatatatgaatgaagaggcgtttgatcatacagtaaaaacaggtcgtatgacatattacagtcgaagcaggaatgcacagtgggtaaagggtgagacgtccggacattttcaatatgtgaagtcattatctgtcgattgtgataaagatactttacttgcaaaagtcgatcaagtcggcgctgcctgccatacaggcaacagatcctgcttttatacaacgatcgtcggcactgattatgatgcaaaaaatcctcttcaagtatttgaatccgtatataatacgattgttgacagaaagcagaatccaaaagagggttcctatacaaattatctgtttgaaaaaggaattgataaaattttaaagaaggtaggagaagaagctacagaaatcgttattgcagcaaaaaacccgaatcccgaagaaattaaatatgaaatttcggacttcctttatcatgcgatggtactcatggtagaacggggagttacgtgggaagatattacaagtgaactggcagacagataaggcgattacgtctttagaaaccggtatagaaaagaatctaaaagcataagatgttgtaaaaacaatgtcttatgcttttttgtatggcgaaaaaccttgcgtttcccgaaattttaacaatcgctttcaattctggaatgtatctttaggtttcggcggtttatctgctttggaatgcaatacaaaaaatcaaaagaagagagacagaggggaaaaaacagtatgaatgatgctcagttaagaagaagagaacttcttcgacaaacgaaacagctctatggtgaacgtgaaactgttcctccgattcatcctcgttatggcaatttatgtaaagaacaagacgaaggcggtgaagaagcaggcggaagcttttatatgcggcttgtaatctgtattctctgtttcatcttctttgtatatatggatcaaaatcatgcggaagtagctaatgtaaacagtacaaaaatcataaatgaaattgaacgggatgtggagctggaagccgtgaaggaagtatgggaaaattttgaatgataactatttattcagctgatttacctgaaaatttatattaaaacgaaaagagttgtatacaatgctgactgcgaaatcatatcttttactttggagtttttgtctaagaacaccagcaccgattgattccgattgacgaaagatatttgcttgaagttcttccctaaaatgtatataatgatgtagattggatgattcaatcacatagaagatgtttctgtaatgttgtatcgtcttgtataaatacgaaaaacaacataaaaaatatcgatttttccctttgaaaagtccaaaataggttcgtaagaatttataaaatatatacaaaaacaggaaggaaatatatgagaaagcttgctttagatgatgaaatattactaagtatcgaaaaacctgcccggtatatcgggaatgaagtaaactcgataatgaaaaataaaaatgaggtggatatccgtttcgccatgtgttttccggatgtttacgagatcggcatgtcgcatctcggcattcagattttgtatgatatgtttaacagaagagacgatgtttggtgtgaacgcgtctattctccgtggacagatcttgatacaattatgcgtaaagagggaattccgctttttgcattagagtcacaagatccgatcagagaatttgactttttaggaattacgatccaatttgaaatgtgctatacaaatattttgcagattttagagttgagccaaattcctctgcattcatgtgaccgcgcggaaaatgatccgattgtgatcggtggaggtccatgtgtctataacccggaacctcttgcggaatttttcgatttgttttatatcggagaaggcgaaactgtttatgatgaacttttagatacatataaaaaatgtcgggcagagggaagtacgagaacagagtttcttgaacaggcggcccgcatcgaaggaatctatgtgccgtcattttatgatgccgaatacaacgaggatggtacacttcgatcatttataccgaataatatatgtgcccctgcaagtgtgaaaaagcaggttgttatggatgtaacagatacggtatatccgatgaagccggtcgttccgtttataaaagcaactcaagatcgcgttgtacttgagattcaaaggggatgcacccggggatgccgtttttgccaggcgggaatgatttatcgtcccacaagagggcgtaatgtaaaacgtctgaaagagtatgccaaaacgatgttgacaaatacaggacatgaagaaatctcacttagttccttgagttcaagtgattattctgatttgaaagaacttgtaatgtttttgattgatgaattcaaagaaaaagcaatcaatatttcattaccgtctttgagaatcgacgccttttctttagatgtaatgagtaaggttcaggatatcagaaaaagcagccttacatttgcgcccgaagccggatcacagagaatgagaaatgtaatcaataaaggacttaccgaagaagatattatgggtggcgcaagtcaggcttttgaaggaggatggacaaaagtaaaactgtatttcatgctcggacttcctacggaaaccgaagaagatatgaaggagatcgcccatttatgtgaaaaggttgcccgcaaatattatgaaatcccgaaagatcaaagaaacggaaaatgtcagattactgcaagttcctcattttttgttccgaaaccgtttactccgtttcagtgggcgccaatgtgtaccgctgaagaatatacgagacgtgctcaccttgtcaatgatgaatttaaagcgcagttaaatcggaaaagcttaaaatataattggcatgatgcaaatgtaactgttttggaaggtattatggcaagaggtgacagaagaatcggaaaagtgattgaagaagcttacagactcggatgcttatttgactcatggaccgaaagttttcgagatgatttatgggagaaagcttttttgaacacgggaatcgaaaaagagttttatacgcttcgtacaagagataaaaacgaacttttcccatgggattttatcgataccggggtcagtcgaaaatttctcagaaaggaatgggaacgggcaatgaatgctgaggtgacaccgaattgtcgggaacactgttcaggatgcggcgcatcaaaattcggaggaggtgtctgttatgaaggcaagaattaaattcagaaaatacggagcgcttcgttttatcggacatcttgatgtaatgcgcttcttccaaaaagtaatgcgcagggctgaaataccgatcgcctttacaggagggtacagtccgcatatgatcatgtcgtttgcgagtcctcttggaatcggtctcacaagtgacggggaatattttgatattgaactgactgaagcgatcgacagtaaaacggctgtaaaacgtatgaatgaagtcagtatagaaggaattgaaataattagtttcagaaaaattccggatgataaaaaacagacgggaatgacgatccttgcaggggcagattatctcgtctctgtcagaaaaggagcactgccttctgactggaaagaacagttttccaagtttatgtctcaaccggaaattcaagttatcaaacagacgaaaagaagcgagagaatggttgacatacgtgcccttatcgattcatgggagattcgtgatgaacagatctatcttcttcttgcagcgggaagttcggaaaatttaaaaccggatcttgtgatggaaacatttttaaaatatgcaaatatttcagatgatgtacgatttttttatcatcgccttgagatgtatgcagatgaaagcggcaacggagaaaggaagctcattcctcttgaaaatctcggagaagaaatctgtatgaattcaaagacagacctgtagtaaatctgtaatgacatgggaaggattttggtttgaaacgaaaaatactaatagaaaaaagcaaaaataaaatacggacataccttattgaagatgatgatattgttgaaatacataccagtatcaatgaagagcaagtacctccggggaaactaggggatatttacatcgggaaagtgcagaatattgtccaaaatatcggtgcggcatttatagaaattacaaaaggagtaaactgttattttgatttgaaagatgcagaaaacgcatattttacccataaatccgggaaaaaaccactttgtatcggcgatgaacttgtcgtacagatcagccgggaagcggtaaaaacgaaagcgcctactgtaacttctcatttaagcttcacgggaagatatgccgtcttaactcatggaaacacccggatcggcgtatcttcaaaaattccacgggcgcttcgggatgaattcaaagaccgcctgtcacgtatgaaaaatgaacagttcggcatcattatacggacaaatgcaaaaggcgtaccgtttcaggaggtcgaagacgaaattgaacgtctgaaagaagaatataaaaagttgttaaatacagcattgtcaagagttgctttttcacgtttgaaatcggctcctccgacgtatatatcagacttaaaaaacgtatacatggaaggaatggaagaaatcgtcatagaaggaaaagacttgtatacggaaatacaagaatactttcttacagaatttcctgaaaaagtaaaacttctcagactttatgagaatcctgattttccactttgcaaattgtattctacagaaaccgcattggaaaaggcgttgaaagagtttgtatggttgaaaaacggcggatatcttattatccagccaacggaagctttgacagtcattgacgtaaattccgggaagatggcagtaaaatcgaaaaacagcgccggagcgatgaaagtaaacatggaggctgctcaagaagcggcgaagcagattcgtctgcgtaatctgtcaggaatcattattgtagattttgtaaatcttgaatcaaaagaagataccgggatattattaaaagaattccgaaactttttgtcgaaagatccgattccgactactttggttgacatgacgatgctcggacttgtagaaatcacaagaaaaaaagtaagaaaaccgctttatgaacaggaaaattatttacaagcagagatcgaggcgttataatattttaccgaaagcgcgctgaaaattgcgcttacaaaaatttttctcattattcatgagaagagaaatggatcgataaataaaagcagcgaaaaagcgctgcgtgagttctacatttggaggaaagaagattgaaaaaagtagtaaaattcgggggaagttctctggcaaatgcagatcagttcaaaaaggtcggagcgatcattacagcagatgatacaagacggtatgttgttccgtctgcgccgggaaaacgatttccaaaagatacaaaagtaacagatatgctctatgcctgttatgaaagtgcagccaacggagaagatttttcagaacagcttgataatattcacgcaagatatcaggagattattgatggattgaatctcgatttttctcttgatcttgattttgtacaaattaaagaaaatttcagtaacaaggcgggagctgactatgccgcttccagaggagaatgtttaaacggaaagatcatggctgcttacctcggctttgagtttgtggatgctgccgaagttgtccgttttaatgatgacggttctttcaatgatgaagttacgaatactcttttatccgagcggcttcaggattgtaaaacagctgtaattccgggattttacggagcaaaaaaagatggaacgatcgtaactttttcaagaggcggatcagatattacgggatctcttgtagctttggcagtacaggcggatctgtatgaaaactggacggatgtttccggatttttgatcgcggatccccgcattgtaaaaaatccgaaatcaatcgaaacaattacttataaagaacttcgtgaactttcatatatgggagcgagcgtgctccacgaggatgcgatctttcctgtaagaaaagcggggattccgatcaatatccggaacacaaatgcaccgcaggataaaggaacattaattgttgaaggaacatgtcgtcagccgaaatatacgattaccggaattgcaggaacagatggatttgtagcaatcacagtcgaaaaagcaatgatgaattcggaagtcggattttgtcggaaagttctgcaggtatttgaagataacggagtttctatcgaacatatgccatcgggtattgatacaatgtcgattttcgtaaacaaagatgtctttgaggaaaaagaacagaaaatcttagcggatatccataaagcggtaaatccggatcatatcgaactggagtctaatcttgcgcttattgccgtagtaggacgcggtatgaaatcaacaagaggaactgccggccgcattttctccgcacttgcccacgcacatatcaatgtcaaaatgatcgatcagggatcaagtgaattgaatatcattatcggagtcagacatgatgattttaaaaatgcgatccgtgcgttatatgaaatttttgtccttacccagatataaaaatctatatccgtttgtttttattggattaccattataggaagaatatatcaagaaaaatttgttaaaaaaccgcataagatctatactcaataaacgcatcattttgatgcgtttatgtgtggaaagggaaatatacaatgaatatcttattctttttaaaaccaaaaagcgaagtggcttatgttcacgactatggcactttaagacaggttcttgagacaatggagtatcataaatatgcatctatcccaatgctgaataaatcgggcgaatatgtcggaacaattacggaaggagatcttctttggggaatcaaaagatatacgaatctgaatttgaaagaggcggaaaatatatttatacaagattttccacgaaaagtagattatgtagccgtatcaattaattcagatatggaagatcttctgcaaaaagcaatgaatcagaattttgttcctgtcgtagacgaccagaagaaatttatcggaattgttacaagaaagagtattatggaatattgttacgaaaaattaaaaaatttaccggaagactattgacttgttccagaatgatatgttatattctaacagtatgccgcacaatgaggttcaagttctgtaaaacagacaccgtaattggcgagtaatgataataggaggtgctatatgtacgcgattatagcaacaggtggtaaacagtacaaagtagctgaaggcgatatcattaaagtagaaaaacttggtgttgaggccggagaaacttatacattcgaccaggtgctcgcagtaaacagcgataagcttgtcgtaggtaatcctacagtagaaggagctacagttacagcatccgtaatcggtgacggaaaagcgaaaaaagttgttgtttacaagtataagagaaaaacaggataccacaagaaaaacggacatagacagcagtatacagctgttaagatcgacaagatcaacgcataataacttttgttatgattgaggtaaccgtttataagaccatgcggcatgaatatgcagggtttgatatgtccggacatgctggatatgacgatatcggaaaagatatcgtatgcgcagcggtttcggtacttgtcattaatacactgaattcaatcgagcgttttacggatgataagacaagttgtgtttctgatgaaaacagcggaactgttgaatttcgtttcaaagatcatccatcgcatgacgccgcactattgctggattccatgattcttggtctggaagatatagaagacagtgaagagtatgaatcatacattgacattattttcaaggaggtgtaagtaccatgatgaaaatgaatcttcagttttttgctcataaaaaaggagtaggttctacaaagaacggacgtgattccgagtctaagagactgggcgccaaaagagcagacggacagtttgtaaaagctggaaacatcctttacagacagcgtggaactaagatccatccgggtctgaacgtaggacgcggaggagatgacactttgttcgctctcgtagacggtgtagtaagatatgaaagaaaaggaagagataagaaacaggtttctatctatccggtagctgaataatcggacttgacgaaaagtcttgccggaacttttcactcgtataacaggcagtataagccccagactttttgtctggggcttttgtttctatacatgagataaacttttaatgaagtttttcggtaacaattatcatttgattcttcctgatatacaaagcaggaaagataaaggagaaattatgtttgcagacagagcgaaaatatatatccgttccggcaagggcggagacggacattgcagtttcagaagagaactctatgtaccgaacggcggacccgacggcggagacggaggacgcggaggagatttaatctttgcaatcgatgaaggattaaatacgcttgtagattaccgccataaacgaaaatatgcggcaggagacggagaaccgggcggaaaacggcgatgccacggaaaagacgggaaagatcttatcctttatgttccggagggaacagtgatcaaagaagctgtgacagggaaagttattgccgatatgtccggcgataaccgcagacagattgtattaaaaggcggaaaaggaggacttggaaaccaacatttcgccacatcgacaatgcaggttccgaaatatgcacagccgggacaacctgcaagggaattggaagtaaaacttgaattgaaagtaatcgcagatgtgggactgatcggattcccgaatgtaggaaagtctactttactttcccgtgtgacaaacgcggaacccaaaattgccaattaccattttacaacattaagtccgaatctgggtgtagtagatcttgaaggtgcaaaaggttttgtgatggcagacattccgggactgatcgaaggagcgtctgaaggcgtcggattaggtcatgagtttttacgtcacatcgaaagaacaaaattgatgatccatgttgttgatgccgcaggcacagaaggcagagatccgattgatgacatttataagattaatgcggaattggaagcgtataatcccgaaatcgcaaaacgtcctcaagtgatcgccgcaaataagactgatcttatttttgaggctgatgaagatcctacagaacgtttgaaaaaggaatttgagccgaagggcatcaaagtttttcctatttcgggagttacgggaaaaggtatctccgaactgctttattatgtcagcgctcagttagaaacgatggatcgcaagactgttgtttttgagcaggaatatttccctgaagacgaacttatctacgaggaacttccgtatactgtagaactggaagacggtatgtatatagtcgaaggtcccaaaatcgaaaaaatgcttggatatacaaatcttgattctgaaaaaggatttgctttcttccagaagtttttgaaagaaacgggaatccttgatgagttagaagcaaaaggaatacaagaaggtgatacggtgaaaatgtatggtcttcaatttgattattacaaatgattttttttaaacaagagtgttcacgaaaaaatattcttaaaaggaaggagataaatatgactacaaaacaaagagcttatctgaaaagtctcgcgatgaaaatcgaacctatttttcagattggaaaatcaagtatgagtccgggactgacagaggctgtttcagaagctttagaagcgcgtgaactcattaagatcagcgtgcttaataactgcggggatgatccgagagaattggctgagatcatcgcaggaagaacacgttctcaagttgtacaggtgatcggtaaaaaaatcgttttataccgtgaaggaaaagatgataagaaaaagatcatcctgccattatgagaataggagtcatgggcggaacatttgatccgattcatatcggacacttgcttctcgcagagtttgcttatgaagattttaagttagatgaaatctggtttcttccgaatggaaatccgccccacaagaaaacggacgaaagtaaaaaagctcttgcacatcgaattaaaatgatcgaacttgcgatcagtgatatgcctcattttaaaatagatctttccgaagccgaaacagatgtacattcgtatacttacagtactatgcagaaatttaatcgcatgtatcccgaatgtgaattctattttattttgggcgcagattcactctttgcaatcgaagagtggagatattttaaggagatttttccgacatgtacaattcttgccgctatgagagatgataaggatgttcgtacaatgcaggaacagatctcttatctcaaagagcgctatggcgcaaaaatcgaattgctcagagcgcctcttttggaaatctcatcaacgactataagaaagcgagcggcaatgagacgcggcatacgttatatcgttcccgattctgtttcaaattatataaaagaacatgaactttatcaaacaaacgaattcttataacggatatatctgtatccctcctcaatcgaatacagataagcagtacgcataataagaaggggtaggaataaaaatgaaagaagaactgcttcatataaaaaaggaattatcaaaaaagttaaaaaaagaacgtttcgagcatacagtcggcgttatgtatacatctgcttcgctagctatgcgttacggggcaaacatcgaaaaggcaatgactgccggactgcttcatgattgcggaaaatattgttccgcaaaagagcagttaaaattgtgtgaaaaatataaaataacgctgactgatttagaacactccatgcctgcgctgatccatgcaaaactgggcgcttatctggctgaaaatgaatatggcattaaagatagggaagtgctcgatgctatcacttatcatacgaccggaagaccggaaatgacaatgttggaaaaaattctttatattgcagattatattgaacccaatcggagggaaattccgggactttctaaaattcgacaaatagtatttcaaaatatcgatcaggcaatctgtttgtcttccgaacgaactatacgttatctggaagataacgggaataaaattgatcctatgacaataaaaacttatgagttttacggaggaaagttatgactcagtcaaaaaaaatggcacgtatcgcctatgatgcattgaatgaaaaaaaaggtgaagatattaaaatcatagatattgcagaagtatctactcttggcgattactttgtaattgctaacggaaacagctcaagtcaggtgacagctcttgtcgacaacgtggaagaagaaatgcataaagcaggattctctcttcgtcagagagaagggcgcgcatcgggaagttggatactgcttgatttcggagatgtgatcattcacgtgtttgataaagaaagcagagatttttataacattgaacgtgcatggaaagacggaaaagaaatcacggtaaaagatctcgattaattcagcagatttctgaaaatcttaaaatgaaatcctaaatacgcagattttcttgacaagtaaacttggtatgatataattaaatcaacaagtaaacttggcaagatgggaggtattattatggataaagaatctgttttacaaaaaagaaatcgtgcagagcacagttcgcttctcatcgtttcagccgggtttttgcttttgtgcacttgtgaagtgttcggaattattaccggcaaactctggatcggacaaagggaaattgtttttggcggaacactctttttcatcatgtttttaagtcagtttgctttgaatttaaagtattatttgattgataaaaagaaatggcggattgccgaggggattttactgatcttttgtatcggacttacgattttcagaattttgaatcccggacactatcttatggaatttctttaaggtgaattatggaaaatgaattagttttaaaaaataacttaaaagaggcgcgtgccaagaaacagatttcacaaagagagcttgcagaaatggtaggagtatcccgcaatacgatcagctcgattgaaacaggacagtttaatccgactgcaaaactggcgctgattatatgtattgcattggataaaaaatttgaagaattattttatttctgattgttttcagataagagtcgatttcttttggaaaccggctctttttgtaacggtgataaacagaagtccgggtgacggatccgcaacttcgatgaccgcttacaatcccggaatgcgcctttgaacacttccggtgacgtattgatacaattaatcatatagcaataatggaggtaaaagatgctaagaatcagtcagctaaagctccctgtggagcatacagaagcacaattaaaaaagaaacttctgaaaacagctcatataaaagagcaggatctgaagcagttttttattagaaaacgatctgttgacggccggaaaaaaccggaactttactacgtatacacagttgatcttatcgttgcaaatgaagagcatgtaaaaaaaatttccaaagggaaattacaaactgttcaggaaaaaaactatcatattcccgaacacggcgccaaaaagctccggaaaagacctgttgttataggaagtggaccggcgggcctgttttgcgcgtatttacttgcctttgaaggatacgaacctcttgtgatcgagcggggcgcgcctgtgagagaacgccaaaaggttgtagaacaattttggaaagacggcatattaaatactgcctcaaacgtacagtttggagagggtggtgcaggcactttttcagacgggaaattaaatactcttgtcaaagataaattcggacgaaatcgtttcgtactagaaacatttgtaaaattcggagcccaggaagaaattttatgggaaagcaagcctcatataggaacagatattttaatcgaagtggtagaaagaatgcgagaagaaattatccgactcggtggggaattcctttttcattcgcaggtaacagatatccttcctaaagaaaactgtctgatcgtaaacggatgccatcggatagaaaccgacgctgctgtctttgccgtcggacacagtgcaagagatacatttcaaatgctttttgaccggaatgttgcaatgaaatctaaatcatttgccataggtgtccgcgcggaacacagacaggatatgatagatgaggcgatgtatggcagaaaagaaagaggcccgcttggtgccgcagcatataaactgacagcacagcttgaaaacggaagaggagtatacacgttttgtatgtgtcccggcggatatgttgtcaatgcgtcgtccgagcaaggacgtctagccgttaacggcatgagttatcatgacagagccggagaaaatgcaaacagcgctgtgatcgttaccgtaacaaaagacgattatggatctgatcatcctcttgccgggatggaatttcaaagacggctcgaaaaaaaggcatgggaagaaggcggcggcaatgttccgatacaacgatttgccgatttctgcacagggacaatatcagtaaagacaggaaatgttactccgaacataaaagggaaatatgtatttggcaatgtgcgcaatatatttcctccggaacttgcagaatcgattgaatcggggattcgtgcgatggggaaaaagatcaaagacttcgatcatgatgacgtcatactttccggtgtagaaagcagaacatcttcacctgtaaaaatattcagaaaagaagactttacttcttcttttccctggatttacccgtgcggtgaaggagccggatatgcaggcggcattacttctgcggctatggacggcatgaaagttgcggaagcgattataaaaaccttctctgctcccgatagtgtctgaatcttcacagaattttaaggaacaatctctatacacattttttaaattgtgctaaaatatatcgttgtattgtatcatcgcactgattataaagtgagaaaatggaaaaaatcaatacgatcaaagaaatgtacaaagaagatcgtccctatgaaaaatgtgaaaaattcggagcagagaatctgacagacacagaacttctcgcaattttgatacgcacagggacaaaaggggaaaattcattagaactttcacgaaagcttctctacaaaaacggctttcataatggactggcagggatacacaaatggtctctcgacgaattgatacagattaaggggatcgggaaagtaaaagcaatccagcttgtatgtctgtcagaactttcaaaacggctggcacgtacaagcacagtcggaaaacttgatttttcatccccgcgcacgatcgccgattattacatggaagatatgcgtcacaggacgagagaaatattaaaattaatctttttaaatacacgctgcagattaataggggagtgtaatgtttcggaaggaacgatagacagtgcacttgtatctccgagggaattgtttatcgaagcattcaaaagaaacgcctacggaatcatactgcttcataatcatcccggcggagatcccactccgagcagagaagatgtaatgataacaagaagaatttatgaagccggggaactgcttggcatccgccttttcgatcatatcgttatcggtgataactgttttgtaagtatgaaagaaaaagggtttttcggaaaatagcatactgcgcaatataagattgaagtatacagtttttattaagggagagtattttatttaaagtaagggttggttaatatgtttggaaatatatacggacttgatctcggcacatatgagatcaaagtatttgataaaaagcaggataagatttgtcgggagagagacgttattgcaattaaaaataaaaaaaatatttttgcgatcggtgacaaagcatatgaaatgtacgagaaggctcctgatgatatcgaagttgtctttccgatgaaaagcggtgtgatcgcccgttttgataatatgcagacattgctcggtactttgttaagaacaaaaaaacgttcagtctggggatcggaatacgttgttgccgttcctacagatgttacggaagttgaaaaaaaagctttttgcgacttggttctgcattcagaggcaaaagcaaaatcagtccgtattgtcgaaagaggactggctgatgcagtcggtttaggcattgatatttttagagaaaagggaatttttattgcaaacttcggtggcggtattacagaattatcagttctttcatccggcggacttgtcttaaaccgtcttttaaaaataggcggtgatgatttcgattctgcgatcacaggacttgtacgtcataataaagaatttctcataggaaagacaactgctgaaatgcttcgtaaaaaattcggggtttttgagcaaagcacaaacagtacgattaccgtgtcaggaagagatcttgtgaccggtgttccttcgcagaccgatgtatctataggaattgtccgcgctgcaataaaagacccccttgatgaatgcgtccgtgcgattaaactaatgttagatagaacgcctccggatgtaagaagggcaatcgaagaaaaaggaatttatcttaccggaggactgacaaatttaaaaggacttcctacatacataagagaacgtgtcggtcttcctgttacaactgttgacgaacccgaattatgtgctgtgaaaggacttcaaaagatcattttggacaaggagtattataaaaagctcacttattcgatgttagacgaagattataggtggttaaggtaatgaaaaagaaaaatcaaatgtctcatacaaacagatatatcctgcttgggctttccatattttgtgtgcttatgatggtgctttcctctttctctgacaaagtcggcggtccgtttaagacggttgcaaatgttacggtaatcccactccaacaagggatgaatcagatcggtggctggatgggagatatgaaagacaatttctcaacgatgaaacaactaaaatcagaaaataaaaaactgagggaacaagttgatgctttgacaacagaaaataactatttacaggaagagcgttatgaatttgaacgtcttcaggaattatataaactggatcagaattatgccgaatatgagaaaacagccgcccatgtgatcgggaaagacgccggaaactggttcggtacatttacaatagacaaaggaagtaaagacggtattgaagtcaacatgaatgtccttgcaggaagcggacttgtcgggatcgtaacagatgtaggtcctacctgggcaaaagtacgctcgatcatcgacgattcttccaatataagcgcaatggcgatttctacttcggatacatgtatcgtaagcggagatatggcgcttatgggaacaggtcagatcgctttttcccagatggaaaacaatgacaatgtagtcgctgtaggcgatcagattgtgacgtcttatatcagcgataagtatcttcaaggtattttgatcggttcggtcagtgaagtaaatgtagactcaaataatctgacgcgttcgggatacattacaccggcagtcgattttaaaaatattcaggaagtgcttgttattacgacaacaaaagcagaacttacaggtgaaaacaagacagaatgagtttctttacagacggacatataaagaaaggaatgaagattaaaatatgaaaagaatgaaggtcaaacgcatttttataacggcgcttgtcattctcgtggcatatgtacttcagtgtacggtatttccggtacttgatattgccggaatcaagccgaatcttctattaatcgtcactgcgtcatttggatttatgagaggttcaaaatccggaatgctcgtcggatttttatcgggacttttgattgatatacaatttggaaagatgatcggattttacgctttgatctatcttgtagttggtttcctaaatggcttgtttgagcagatgttctatgacgaagatattaaacttcccctgtttcttatagcggtcagtgacttcctttatggaatcactatatatttcttcacatttctgctaaacagcgattttcgttttacctactatttaaaccggatcatcgttcctgagatgatttacacgattgtaataacgcttggagtttatccgcttcttttgtttatcaatcataaacttgaagccgaagaaaaaaggagtgcaagtaaatttgtttagaagaattatagatcgaataaaagaagctgttgaatatttgatgagttcaaggttgatcgttctcattattgtcttttgccttacatcttcgatattgatcggacgacttttttatcttcagatcgtgcgcggagaagattacttggaaaattatgagctgcaaataagaaagacaagaactgtacccggaaccagaggcaatatttttgatcgtaacggagaagtgattgcttacaatgaattggcttattccgtgacgatcgaggatatcatccctacagacactaaaaccgaagataaaaacaaaatattaaatgatacgcttgacagtgtgctttcgatcgttgaagaaaacggagacagtgtgatcgacaatttcggaatcattcttgattcatcgggtagttatcaattcgccgagacaaacgaaacatccagacttcgttttgtggcggatgtgcatggaaaaagttttattgatgatcttacagaaaaagaaaaaaataagacagccgagcagatcgtacattatttatgcaaacgatacggattggattattccgaacatgatgccgcatatattctgaaaatggtcaatatgcgttatgctatgggactgaatagttatcagcaatggcttacaaccgtacttgcttccgatgtcagtgatgctacggcagcggctattatggaaaatcaggattcccttcagggagtagatatttctgaggattccctgcggcgttatcctgacggtcaatattttgcatcgattatcggatatacgggtcagatatcgcaggaagaatatgatgatctaagcgatgatgaaaaaaagagatattctttgtcggatattgttggaaaatcaggcattgagcacacgttcgatagcgttcttcagggcgaaaaaggtaaaacgacattctatgtagataatctcgggaaagtaaccgatactgtaagtatgacagatccgaaagcaggaaatgacgtctaccttacgatcgataaaaatttacagatttctgcttataaacttctggaagaaaaacttgccggaatcgttttaagcaaattaagcaatgtattagactatgatccttctgcggaaaaagatacgaaatatattaaaattcccgtaggagatgcatataattcatttattgcaaatgagattatcgatatgaaaaaattcggaagaacagacgcaaaacctgccgaacaggctgtctataatacgtttactcagaaaaaagccgagatactttccgaattaatggcacagcttcagaacgaaaatgctccggcatataaagatctttcaaaagaaatgaaagcttatatggactatatatgcgatactcttctaaaacaaacgacaggaatcctgatgtcagacaagatcgaagcagaagatgaaacacaaattgcctgggcaacgcaagagacaattagtttgaaccggtatttaaattatgcaatctccaaaaactggatcgatacctcaaagttgggagacagcgcttattcgagttctgaagagatttatagcggtgttttggcataccttgaagaatatttaaaggaagacagtaatttcgacaaacttctctacaaatatcttataaaatcaggaagtgtcaccggcgcacagatctgtgcgatcgtttatgaacaaggcgtactgccaatggatgagaatgcgtataacggtcttttaaacggaacgacagacgcttatggctggctatatgataagattaaaacattgcagattacgcccgggcagctcgctttagagccgtgttccggcggaattgtagttacagatccaaatagcggagatgttctggcatgtgtatcttatccgggatatgataataaccgtctggcaaatacaatggattccgcttactacaatcagcttaataccggacgtgcaaatattttctataaccgtgccacacaggaaaaaacagctccgggatcaacttttaaaatgatctcggccacagccggactggaagaagggtatattgacgcttacacaacaacatattgcagcggttcatttaatacggttactccgagtccgaaatgttggatctatccgggaggtcacggagcgttgaatgttgttcaatcattgcagcattcctgcaacgtcttttattatcaactgggatacaatatgggaatcgattccaatggaaactatgacagtgatcttggaacagacaagttgagaaaatatgcggctatgtatggcttagacaggaaatccggcgtagaaataccggaagctgcaccgcagatatctgatgaatattcgattcaatctgcaatcggacaaggtacgaacaactttacggtaagtcaactgaaccgttatgtaaccgcagttgcaaacagcggaactgtttatgatctgacgcttatcgataaaacgacagatgcggcgggaaatcttattaaagattattctgcagaagtagacagtacaatggatgaaatcaattccagcacatgggatcttattcaccagggaatggaacagatggttgcaagctcaaccacttttacaggccttgatttttctatggcgggaaaaaccggtactgcccaacataacgaattgcatgccgaccatgtattatttgtaggatatgctccggccgaacagcctcaattatcgattgcagtccgcattacttatggctataattcgggatatgcatcagagatcggcagagatattgcaaaagtctattttaatcctgaaacagccggtgaattaattaccggaagcgcagctaatctcggagaaggaattgcaggagactaaaagacgggggaatgacaatgaacaaacttgtgaccatcagaagtaatcgatacggattagatattgaatttgattccgaaacagaattcgatcaacttcttgaagttctcggacaaaaattcaaacaatccgggcgcttttttaaagatgcacagatggcgcttagtttcagcggacgcgaactgacgcgagcagaggaagatcgtgttcttgccgtcataagagaaaatacacaaattgaaattttgtgtattatcgaaccaaatgataaaaatgagatgatgtacagaagcgtagtagaacaaagtctttcagatatctataaaaaagaaggaattttctacaaggggactttaagaaaaaggcagatattagaggcagaagaaagtattgtcatactaggtgatgtagaacttggtgcaaaagtaattgcaaaaggcagtgtgatcataatcggtacgttatatggatctgtctgtgccggagcatccggcgatacgtcggcgtatgtcgtagcactttctatgcagcctaaatatctcagcatcggagatatcgtagcaaaacgtcagatcatttatcaggagagcttaaatattaaaggccccaaaatcgccgtgatcgacggaaaccgtatctatcttgatccccttacggattgagacaggacatatgtaggaggaaaagcatcatgggagaagtaattgtcattacatcaggaaaaggcggagtcggtaaaacgacaacgacagcaaatatcggaatcggtctagcaaaactcgggaaaaaagttatagtgattgacacagacctcggccttagaaatctggatgtcgtattagggctggagaataggatcatttataatatcgtggatgtcataaacggcaactgccggttaaaacaggcattgataaaagatactcagtttccggagctttgcctgcttccatctgcccaaacgaaagataagtctgcggtttccccggaacagatgaaaaaacttatcgaagatattcggagtgattttgattttgttttactggattgcccagcggggatcgaacaaggattccaaaatgcaatagcaggcgctgaacatgctgttgttgtcacgaccccggaagtttctgccattcgggatgccgaccgcattatcggacttctggaagcgtcgggtattcgcaaaacagatcttttgattaatcggctgcggatcgatatggtcaagagaggcgatatgatgtccgtagacgatgtcaccgaaatccttgccgtaaatctcctcggagtaattcccgacgatgaacaagtcgttattgcaactaacagaggagaagccgttgccggagaagaatgtctggccggaagatcctacatggatatctgccgcagactgacaggagaagacgttccggtcaacgactattcaaaatcagaaggtttcttcggaaaaatagcgcaattttttcatagaaatcaggaggaaaaccgatgagtgttcattcagtttcgatcgccaaataccggctgaagaatctgcttgccgcagacagaatgcactgtacggcagatttgacggaacaaatgaaaaatgacttatatcatgcggtttcaaaatatacggaaatcaatcccgcatatttttcaatcgatattacacgcagcgatatacatataaaatacatgggagaagatcgttgaaatttttaatcaatcatattaaacagcaatatcatataaaagattataaattcggacttattatttcagtagttgcaatttctgtcatcggtatcatgatggtcggaagcgctaaaccggattttatgacaaaacagatcatgggggtgatccttgggttcggagcaatggttgttgtctctttgatcgactataaatggatcatgaatttttattggatactttatgttataaatttgattcttttgatcgcagtaaaaattccaggattaggtcattcggcaaacggggcgcaaagatggatcaacctcgggtttatgcagcttcagccttccgacttgacaaaaatacttcttattattttttttgccagatttttttctgacagagagcttaagatcagcagccccaaagtaatcattcagtctgttgcgctgcttattccgtcgctcatccttattgtgacacagccgaatctttccactacaatctgtatcgcagcgcttttttgtgctctcatttttctggcaggattaaattacaaatttgtcggaacagttcttgcgattacgattcctgccgttgcgatctttcttgccgttgcggtgcagccgaatcagccttttttgcatgactaccagcaggatcgtattcttgcctggttagagccggaaaaatatgcggatgatgaatcatatcaacagttaaactctgttatggcaatcggttcgggtcagctttcgggaaaaggatacaataacgatgccacaacttcagttaaaaacggaaattttgtttccgaaccgcaaacagattttatttttgcaattatcggagaagaattaggatttgtgggttgttgcggagtcatatttttgttattattaattgtaatacaatgtatcttaataggtttaaaagcgaaagatacgggaggacgcattatctgcggcggcgtagccgcactgattggcattcaaagtttcatcaatatcagtgtggcaactttgattcttccgaacacaggtctttcgcttccctttgtcagctacggacttacatccgtcgtatgtttctttatgggaatcggactcgttttaaatgtcggattacagcctaataagtatcaataaggagaatgacagctatgaatatcggattgatcgcgcatgacgcaaagaaaaaattaatgcagaatttttgtatcgcttatcgtggaatactcagcaaacacagtttgtatgcaacggaaactacaggagcactgatcgagagcgtaacaaaccttaatatccataaatttcttccgggacatctcggtggaatccaacagctttcctctcagattgaaagcaatcaaattgatttgtttatctttttcagagatccgcttactccacgctctcacgagccgagcgtaagtgatattgtaaaaatgtgtgatatgtacaatattccggcagctacaaatatcgcaactgccgaagctcttatactggcacttgacagaggagacttagattggcgtgaaatgtacaaataatacatctaatacatcaaaaaataaatggtaggaataaaatgaagggaaatcattattcagataacaggcgcagacgccgaaaacctatttacgtaaaaaaaagacggcgccgaaaacgaacttctacagtaattgcggttcttctgatctgtcttatactaattgcaggcgcaggcgctgtcggatttttcatattgcaggaatattcaaaagatcatatccggcaatatgagtttgcatcatataataaaaagcaatacacaggagaacttttcgctgaagatctctgtgttgcttcagaagatgtatctcttgacggcgttgaagcagatccgggatttcacggtgaaggactattcaatatagcagattctcagatcaaatacggatacaaactgtttgacaaattatatcctgcaagtacaacgaaagttatgactgcttatcttgctttaaaatatggaaatttggatgacgttgtaacgatgagcgccacttccacgaattttaattgggatgagtctacctgtggtctttctgccggagattccctgactttgtacgatctcatatgcggtctgctcttacaatccggaaatgactgtgcggccgctattgcggagcatatatcgggaagccaggaagcttttgccgaattaatgaatacagaagcaaaacaacttggagcgacaggaactcactttgtaaatcctcacggacttcatgacgaaaatcattacacaacaacatatgatttgtatttaatgtttaatgaagcattaaaggatcaagcttttctcgatattatttctatgaactcatatacggcaaaagttacctcggcagacggaacttcgtatactcctacatggcaggcgacgaattattactcagccggagaagcgacgccgcctgacgggatacacgtatacggaggaaaaaccggaacaaccgatcaggcaggaaactgtgtaattttatatgaaaaaaacaccgcaggagaaccgtatatttccgttatcatgggcgcttctgacaaaccgcttctttacgaagaaatgaacgaactgcttgatgcaggaatgaaatagatccccgaaagtgtcaaaagacatctttcggaatcgcaaacgatgcaagttttcggacaaatctgaactttgatctgccgccgttataaaaaatacaacaccccgtaaaaatgaaatttccgataaataattcgatcatatcattttacgaggtgtttttcttttattctgacattgatttgattctgccaaaaagactgatcaagtataagccgcacaaacctactagcgtataaatgatcctggaaagccagctcatattcccgcatataaatgccaccagatcaaatctgaacacccctataagaagccagtttacggcgcctataataacgagtgtcagagctgtattgtcaaaccatttcatgttatttcctcctttatcatctcaatatttgtaacaattcagctaccaatattttttattatgtccataaaaagtggaaatatactaaaaaaaatgatatactagcaacgccagaaaaaagcaggaggtgtatactgaattgtcatccaaaaaaaataattcagtcaatataaaaaaatataaaacaaaaagagaattcaatctcggtatctttctttttgcaatcgtgtttatttatttggttgtaacaattattttgtattttactggagaccggatctctgtttatgaagtacgggaaggcagcattgtgaaagataattcttataccggacttattattcgtaaagagacggctgtaactgccgaatcatccggttatataagctattatcaggccgaaaacagtaagatcaagcgcggaatgaatatttatgccctttcccctgaaaagcttgatacaagcagcaaaacagactccacacagggagaacacacagaaggtcagtccataacagtaaatcctgaagtcagttctgcgattacccttcaaatacaaaattttatcgaagggtatcgtgcaaatgatttcggttcggtatattcgctgaaatctgaaatcactacaatgcttcaaaacgaattcagcgcgacccgaacagaacaacttggagcagtgattgccgcaagcggtctggatgtgttgtcttatcaggcacagcaggatggcattgtagccttcacagtcgatggatatgaaggattgactactgaaacatttactgaatctgcttttgataaaacaaaatatgaagtttcttctttatccgatgaaacgaaagttaaagcaggagatcctgtttaccggatgatcacaagtgaagattggtcggttatcgttcctctttcaaaagaaacagctataaagttaaaacatgaagatgtatccggaataaaagtacggatggacaaagacagcgaaactctttggggaaaacttactgttatcgaacggcaaggaaaatattacggtcagcttgattttgataattcaatgataagatatgccgaggaaagatttttaaatatagaattgatcatggaagatgaaagcggattaaaaatcccgaaatcttctgtagttaacgagaaattttttatcattccgaaagaatacattacgacaggcggaaacagcagcgcaagcggtgtaatgcttgcaaaagagaatgggagcgccgtatttcacgccgtaaatatttatgacatttctgaaaatggagacgtttttgtcagcaagcaggatttagaagatggaagcgtactcgttaaaccggagtcatccgatacatttgtagtcggaaaaacaaaaaatctgcaaggtgtatataatatcaataaaggatatgccgtattcagaaaagtaagtgttctctgtgaaaacgacgaatattatatcgtgcaggaaaacgaaccgtatggtctttctaattatgaccatatcgtgcaggaaggttcaagcgtaaattcaaatgatgtcgtatttcaataaaatctaaaaaataaaacttttaactattcggaaagaggagaaataaaaatgcttaaagaaaatctaaagacggtggaagaacgaatacaatcggcatgtaaaaaagccggaagaaaacgagaagaaattactctgatcgccgtaagcaaaacgaagcctcctcatatgcttcaagaagcttacgatctcggagtgcgaatcttcggcgagaacaaagttcaggaaattcgtgaaaagtatgaagtcttgccaaaagacattgattggcatatgatcggacatcttcagacaaataaggtaaagtatattgtcgataaagtaaaattgatccactctgtcgattcttttaagttaggagaagtaatcgaaaaagaagctgccaaacaaaatcgcataatcgatattttacttgaagtgaatgttgctcaggagagcagtaaatttggattaaagacagaagaagttattccattaatggaaaaattttcgcaattaccacatatacgtgtaaaagggcttatgacaatagctccatttgtcgaaaatccagaagaaaaccgtgcaatttttgcagatttacataaattatatgttgacattaagcaaaaaaacattgataatggtactgtgagcatactttcaatggggatgaccaatgattatgaagttgcaatcgaagaaggagcaactatggtccgtatcggaacaggaatctttggtgccagaaattacaatatctgatgtaagatctgggatgaaagtataacatggcagaagacttgtccgacagaatagctgtagtcttagagccgtgaaaataataaaattgcgcgagcatatgcagcgcaagataggagtgtaaaaaatgggtgtatttgataaatttctggacattatgaaactgaacgacgatgattatgatgatgatttttatgatgaagaagatgaatatttcgacgatgaggaatttgatgaaaaacctgcccgtcgttctttgttcggaaagaaaaatacgaaggaagaatcttttgatgattttgatatggaagaggaaaagaaatttcagcctgcttcctcaagcaaggtgactccgatgagacatcctgcatccagaaagggtggaaatatggaagtttgtgttgtaaaaccaagttctgttgacgattcccgcgaaataacagagacattgctttcaggacgcactgttatcctgaatcttgaaggtatggatcttgaacttgctcagcgcatcattgattttatttcaggcgccacatttgcaattaacggtaatcttcagaaaatttcaaattacatattccttgtaacaccgacaaatgttgatatttccggtgatttacaagatcttctcggcggttcgatggaaacaccgagtgtgaaaggaagatattaattcagatatgggaagcggcaatcttgagaaagatcagtatcttctggaaaagcgttttattgaattatccagaaatgcatatcaaagagattttatcacatactctgattttctgaatctaaatgaacaaaatatactgcatacgctgccgaaagaaaatttgtttacacaaatacttactttcggcggatatggcatggcagagcgtcagatggctgcatttatccctgatgctctttatttgcgttgcggaaaaaaggagctcgatcctgctttgataagatatcctttcaaagctcttcaggtccttccgttaaaccgaaaattttcagaagatctcacacatagagactatctgggatcaattcttaatttgggtattgaccggtcaaaaaccggagacattcttattgaaaataatacagcgattttatttgcacatgatgatattgtatcttttttatgcagtgagctgacacggattcggcacacatcggtcaaaacagaagaacttccttcatttgacattcaatatacgcccaaatatgaagaactcacgggaaccgttgcgtcagttcgacttgatagtttattatcacttgcattttcatcttcccggacaaaacttagcggattgattgaaggcggaagagtctttgttaacgggaaacttattacaagtaatggctaccagccaaatgaaggtgatcttatctctgttcgcaaaatgggaaaatttcgttttgcaggaatcggaaataaaaccagaaaacacagaatatacgtcaggatacagaaatatatttagagatggagaaacacaatggctttgcaaaaagaaaatccgaaatttcgtttatttaaaagctatattatagcatttttttggataggaacagcaatttttatagatcagattacaaaatattttgcagtggcgtatctgaaaaataatcatgcaaaagttttgatagacggtgtttttgagcttcaatatcttgaaaaccgaggtatggcttttggaatacttcaaaataaacagtttttatttgtcgttggcgctctggttatatgtggagcgattctcctcatatacgggagaattccatatacaaaaaagtatatgcctcttcgtatctgttcgatccttttgatcgccggggctgtcggaaatctgatcgatcgggtaagactaaattatgttatcgatttcttttattttaaattaatcgatttcccgattttcaatgtggcagactgctatgttgtcgtggcatgcattattttcgcttttttgattttattttattataaagaagactctgattttgattttctgcgcaaacaaaaaaatcggatttgatcagataaaatcagtctgcactgcaatttaacctataaaacagaaaggttcgtatattatggaacagattaaatttacagccgatcgcagcggggaaaggattgatagatttttgagtgaaaatcttgagaacctttcccgttcttatattcaaaaactgctaaaagacggcaaaatttccgtcaatcaaagctcggtcaaacccaactataaaatcagtgaaaacgataagatcgaagtttttattccggatcctgaagtattggatattcttcccgagaatattccgcttgatattttatacgaagacagtgatatccttattgttaataaacccaagaatatggtcgttcatccggcgccggggcattatgagcacactcttgtaaatgcagtaatgtatcactgcaaagataatctgtccggaattaacggtatacttcgtccgggaatcgtacatcgaatcgacatggatacaacaggttcgcttttgatatgcaaaaatgataaggcgcatcagatcatagcagaacagctaaaagaacattcgattacccgacgatatcatgcgatcgttcatggaaagataaaagaagataacggagtggtaaacgctcctatcggaaggcatcccattgatcgaaaaaaaatgagtacgaaagcaaagaacggaaaacatgcagttacccattataccgtcctgcgcagatttaaagattatacttatatcgaatgcgaactggagacaggacgaacccaccagattcgtgttcatatggcaagcattggacatcccattctaggagacagtatgtatgatccgtcaaaatgtccgtttaaacttcagggtcagacattacatgcaaaagttcttggaatcactcatccttccacagggaaatatatcgaagtcgacgcacctcttccggaatattttaataaacttctcaaacaattagaagaacgctgattttgttgaaggaaaaaagaaaagaaaatagaaatttgattgtatttttctttgtttttagttataatactcacatatagttcatttgtatatgtattttttatgcaaaatcacatattgttgacgtaaaggagagtgaccttaaatgaaaacaaatacgatcattactattggaagagaattcggaagtgccggccgggaaatcggatataaagtagccaaagaattcggaatcaaactttatgacaaagaaatgctggcccgtgcagcaaaagaaagcggaatctgtgaagaaatatttgaatcacatgacgaaaaacctacaagcagttttctctattcactagtaatggatacatattcaatgggatattccggaaacacctatacagatatgccgatcaatcataaggtttttcttgcacagtttgatgcaatcaaaaaaatcgcagatgaaggaccttgtattcttgtcggaagatgtgcagattatgcacttgaatcatataaaaatgtagtaagcgttttcattcatgccgatcttgatgcaagaatacgccgtattgcaaggatctataatctgacggatgcgaaggcaaaagatatgatcttaaaaacagataaaaaacgagcaggttattataattattatacaaataaaaaatggtccgactcaaaaagctacgaactttgtcttacaagttccgaacttggcatagacggaacggcgaatgcgattattgactatgtaaaactaaaagaaagtattgcgaaagaaagcaaacgaatttaaataaagaaacttagaataacttaaaaagcccgaaaactataaaaccgatcttgaaattaagatgatgttttatgattttcgggtttttattgtgtaatttcataatttttattcattgattttagttgatttgtgtagtatcattaaaataataggtaatttttgtatgaaataacgaaaaaggagcgggaacattttatgaaaaagctgaaactctttaggaaaatcaaaagcatattgagcattttgctcatatcactacttatcatacctctatgcagcggtatcggaattcatgccaaggaaaaaaacacagaatcaaacgaatataaaatttatccgattcctcattctgttgtatatgataacgaacaatttgtgatgtcagatagagttcatgttgtcttcgaggaaggtatagataaagctacacagaactttttggaagaagttataacagactatgggaaaacagttgtacattctgaagagatcgtcaacggagaaactacgatcctgttgggaataaaaggttccaatggaaaagcggacagctatatcaataaaaatacaacgattaaaacgtctgatcttttcaatcgaactgattcatatatacttagcgccaaagaaaatattatctcaatcgtaggaaaagataccgacagtacatttttcggtatcgctacgttacagatgatgcttacatcttatgaagatccagcccttcgcagcgtacagatcgaggatttttctgacatacaatatcgaggatttattgaaggcttttacggagggtgggattataaatcacgggaaagccttatgagatttgcacgtgatgttaaaatgaaccattatatttatgcatcaaaaactgatccttatcatacatcaaaatggggagaactttatccgcaaagcgaaatcgatcagatacaaaaacttgtaaaagtaggtgaagagacaaaatgttactatacatggtccgtacatatttcgggatttttcaccaatttagatacatcgaatgaaaccgcctataatgaacggtatcagaaactacttgcaaaattccgtcagctttatgacgcaggcgttagaaaatttgacattttaaatgacgacttcggacaaggaactcatgaagatgtagtaaatcttttaaataagctgacaaaagaattcattattccaaacaactgcaagccgatcacttactgtatgcagggatataacaaagcatggtcaaaagaggctgaattaagtgcattaaaaaaacttgacaagtcaattatcctatattggacaggtgatgacgtaaactcgccgatcacacaggaaacaatcgattatgtttcagagaaaacaggacacaaagtttgtttctggctgaattatccggtaaacgaacatggaaaatcaggactttatcttggagatatcacacattacgcccgcgatggcataacaggacttacaggagctgtctcaaacccttcccgctttgcacagagtaataaagtcggtctgttccagcttgcatcactattctggaacaatactaattacactgcaaacgcgcaaactgtttggcaggatgcattccgttatcttgaacctgaagtacaggacgcttactttaaaattgcatctaatgttgcaaactgtcctcgttccgtacgtgtaccgcaaggctttccggaatcagaatatctgaaagaaaagcttgaaaatgttacagctaaaatcagtaatggagagaacttgaaaaatgataaagaaacggcagctttaaaatcggaatttgaatctattcttgctgcaatcgaaacatttagatcaacatgtgacaatgctgatttaaaatcagaattagatccatggctgaaatcactgcaagatatcgcttcaggcggaaaggcaattatcgaaagtatcattgctattcaagaaaaagacatagatacagcttgggaaacgtttgcaacagcaggcaaggcgctacaaacatggaatacatatccgacagcagaaggagtaaaagaaggcgcagaagcaggaagtaaacgtatccaaccgttcgtatcgaaagcagccgcaacggcaaaaaataaattaacaccgtttttcgatcctgataatacgaatgtaattccttcgttttatgcagttcttgcaggtgtaaaacgaacagatgatactgtttccgcaaaattatttgacaaagatccatcaactgccggcgaatggaatcaaaaccaaaagataggagattactatggcgtagatttaggtcgtgttatccctgtaacagatattacaattcttcagggagcatcagaaactgatcatgactatttccacaatttcgttttagaatattctgaaacaggtgaagacggttcatgggtcacaattcaggagtacaaagaaacagatgaatcacataaaatagaaaaaacagggttaaacataaatgcacgctatgtgcgtctgcgtcttaccaagacaggaacgacaactccgaacaaagcaaattattggacaaaagtacgcgaatttacagtaaataagaaatttactgacggggaacgtatttatacaaatattgaaaaattaaaagagactccgatccacatttacgaaaacgaatttcgtataagagacattaaggatttagaattaaaaccgaatgaatatgtcggtatcaaaatgacctcccttgtctcagtgtctgatattttttccgaatcagacgaatttgaaaaagcaaaaatacaatattcaacaaatggaattgaatggacagatgcgaaaaatttcaaagggccacaaccgatgcgatatgtccgtcttgtcaatcagacaaatgaaacgctaaaaggatcattgacaaaactaggtatttccgtaaataatcttaagatcacaccgaagatgagcgaaacaagttttacaaatccgcttaaagaaggtacgtgggagaatatgtttgatggagattttacaacccatgcctggacgaatcagggtcaaaataatggcggatacattattatagacctcggaacttcaacaccgctttatgatgttacaatcgtcacagcggatggaaaacctcatttatacgatgcagatatacaaatctcctctgataaaaaagagtggaccacgatcgcgtctgtaaaaaatgacaatacaaaagtggaacctccctatcgttatgtaagagcaaatgcccagggagctaagagcagatatcttcgtattctcgtaacagatgacgttatcggtaaatatgataatccgttcctttgtatcaaagaaattgaatttaacaaaaatattgaagaaaatacaagtacatatccgattgcttcgagtgcagaaggtaatcttgaaaaatgtatcgatcaggatctgtccactgtatttacaacagaaaacaaaactgccggatggctggaatataaactgacagacaatacaaaattaaaatcgttctctattttgcaagatgtacatactatttccgaagctaatgtaaaggtacgaaccggaactgataaatggaaagacttaggtacatttgataagggaacaaaaacttttgatgtatcagaatatgacaatattttcgcgattcgacttgaatgggcagagggaaaagcgccttctatatatgaaatttatacaaacgaagatgaaaaacaaaatacagatgatatcggaatctatgtagaacaaatcatcgatacagaagcagattccgaaaaaccaaagcctgaacaacctgaaatcccggattcagaaaatcttgctataaaccgtccggtagaggtatcaggaaccgagcttgacagagatcaaaaagattttgccgtggacgggaaccgtgagacaagatggaacagcaattacatcaaaggcgatcatgcatctgaagaagcatggatcatcgttgatctcggtgaagaaacaaatatcatcgaatcacttactgcagagtattttaatttagtttatccgacagactatgacgttctcgtatctgctgataaagaaaactggatcactgcaaaaacgataaaaaacgaaccgaacggagcagcccatccaacagatgaaatttcacttgatcaaccaatcatcggaaggtatgtcaaattattattccgtgaattaaacagtgctgctgtcggaaactgtgtaggtttagaagagcttaccataacaggaaagaggatatcctccgaaacagaattaaaagaatatatgccgatcagcgatattaaaatcgacaaaggtacgtcacaagaagaattaagaaagctgcttcctttaattatcagtggaaagcttgcattaaaagacagtgataaaatactggacttggcatcattatttgtaaactgggatctttcagaatatacttctgctgaagatacgatcctcactttaaaagggaatttgatcggtgcaggaaaagcaactggagacgagatttccctaaatgtgatcataggcaccggatcaacagaacctcctgttgaccctgaaggtcctactgatccggatacacctgattcaggaaagattgaacaattaaaacaggaattagctctactcattgaaactgctcaagcaaaagtggaatccggtaaatacacagacgaaacagtcaaaatacttaaagagcaaatcataaaatctgaggcgcttttaacagacaacgtcactgccgaacaacttgaacagcaaatcaatagtattaaaaaatcaatcaacggattaaccgaaaaaaaagccgacttagaaacttctgaccggccaaatcaaaacatcactcattcagaaaaaagtacagcagtaaaaacaggtgactcaactcatataatacctctatttctgctgatgatttgcaccggattttccttgatcctattcaggaaaagaaatacttataataaataataggtgttgacatgcgataatgtcacatattataaaaacacatccgatggattaaacatcggatgtgttttacttgccgctagtttattcacttttaagatcttatttaacgtctcgatatcgtgcgctgcggccaacctttaatatctcctgttaaaatagcgtgaaacattcgttcttttgttcccggatgttctttgttaagttctcttaaaagttcttttgcatattgccgcttcgtatgtccgtctacaggacattttccttttacaaccggaagagaatatttattgcgaaaaccgattacttccatttcatctataaacatcataggacggataacagtaagatccatacgatctaaatatgtttttggagaaaaggaataaaatcttccttcaaaaatcaatgagagcaacattgtttcaataatatcatctttatgatgagcataagccactttattacaccccatctccttaaccgcctcatttaaggcgcctttacgcatttttgcacaaagcgaacaaggattactctcttggcgtacattaaaaagaatatcataaatatctgattttactattttataaggaacttctaattccctgcataaattttgaatcggttccaaattaaaatctgcaaatccaagatctacagttacagcacttaaatcaaacttacggggataaaaccgttttaatccatgaagcgcatagagcagggtaaggctgtcttttccgcccgaaatacctaccgcaatatgatccccttcctgtatcatactatattcatccactgctttacgcgtataactgagtaaccgttgtaactgcattttcttcctacctttcatgattgatctgtaattataacgtttatattatatcggcagaagaatataaatacaagtcgaaaacttacagaaaatcatagaatcaccggttgtttatgaaaaaaatcagattacgatccgtaagttaaaaatagtaataaataatcaaagaatttgattgaaattcatctctgatagagataagatattgtttagggaaaatttattttttatttttttgtaaatagatgtcccgtaactatattttaccagaaaagagagtattaaaatgaaaaacaaaggaatatctattcgtgaaatattaatcattacatttggaatgtttcttgtagccgcaggggtttatttcttcatgattcccggaaatatcgtagccggaagtgtttccggtctggctctcgtattatcgaaattgttagggatacaagtttctgtattaacatttatcttaaatacattccttcttattatcgggtttatcttcatcggaaaagaatttggagcaaagacagtgtacacatctatgcttctccctgtatatctttggattttcgagcatttcataccacttgacaaatcgattaccaatgaacaggtaatcgatctcgtaatttatgttctgctgattgctcttggtcaggcattactgttccatgtaaacgcatcttccggaggattagatattgtggcaaagatgctgaataagtttacacatattgaaataggaaaagcactgacaatttccgggcttatcactgcaatgacttctatatttgtttacgatataccgacacttattatcagtcttctcggaacatatgcaaacggagcagcagtagactattttattgacggcttcaaaaaacgaaaacgcgtatgtattattgcagatgattaccgtccgatccaacaatatattattcatgatctaaatcgcggagcaactttatatacagctcaaggcgcttatgacgaaacacacagaaccgaattgatcacaattatcacacaacaagaatatcgtacacttttaaattatcttcattcatgtgggcagaaagtattcgttaccgtctctactgtaaatgaagtgatcggtcaatggaattcaaaataaatacttatacctcgcgaagtttcactatgtttgcagcctgccggcgtctgtcttcatcaatggctgcataatgctttttcgttgtatttacatctttatgtccgagaacatcggcaacaagataaatatctcctgtttctttataaagggaggtaccgtaggtacttctaagcttatgaggagttattttcttgttaggcgttacttcccgggcatatttttttaccatattctcaatagcttgaacgcccatacgttttcgctgagtagataagaaaagcgcattttcatgccccggaagcgggagagtagttctccgtgttgtatacatatatgtctttagtgcattttccacttcttcgccaaaatatacaatcatttcatttccgccttttcgcatcactttgattccattattttcaaaatccacatcattgatatccagccccacgcattccgaaacacgaatgcccgttcctaaaagtaaagttaatatagcaagatctctgtttctcgttttctcaaaataagcctttttctgtccggttaaatgatcgcctccatgatcaacataatcaagcaatcggacaacttcatccgcatcaagacgaataattgccttttcgtgaagtttaggcatatctacaagaagagtcgggtttttcgatattgcctgacgtttaaaataatatccataaaagctacgaagcgctgacatttttcttgcaagtcctttttctgtatttgtaacttgcttttcatcatttttatatacttttaaatattcttggtattcctcaatatcaaccggttcaagattttctatatctgccaatgtaaactgatcgatcgtatagtttttataaaccggattattttccattaaaaaacggaaaaacacacgaatatcgtatgcgtaggaaattcgtgtgttagcggatgtcgttggctctatagctctgaaataatctttcgcaaacgatggtaatgtttttaatatttcccttagccgtaatgtataatcgatatatttttgttcatgatatgtttttacatcataacttacacgtaaaccttcatctgaagtattttccttatttgccataattatattcctcctttatttattcggatatacatattatatcaaatgtatatctttacgtccatatcttttggaaaaatcagtatttgtcgtatagattgatctatattataagacagccgataaaaatgagtattacttctatttctcacggctgtcggttggagtgtatatatcaatacatagggtgtatattgataccgatttaaacatatcattcagtcatatacataatcataagattttctctcgaataaattttatcagaagaaagtccgtttatctccttaagaactttaacatattcttctgtcgaactatatttttcaggaagattttcatttgcgatatcccacaaagtatcgcctttttcaatcttaatacttttataatagatataagtactttcgtgatccggcgtatccttttcctttgcggaaacaaaaaatgcactaaacgacatacttacaaataaaacaataacaactcccacgaataaattacgagcatgttgttttaatatagccgatttttttgatcttttttcatttctttttcccttcataatagtatcccctttatctctgcttatttttacactttgttttctcttattattttgtaatattcagtctgcaagaaaaatgtatacatgtattcttcgattcgaatatttgttccgcgaacttatgttctatatttggattatacaataagaacaaatgtttgtcaacacggaaatcgaacatattttcgcaacaaatgtttgctttttgttcttcgttgtgttaccattattttaataaaataaacggactataatatcggaggaaactatgtcacaaggaaaaataagtaaaaaacaacaggaaattttagaatatattaaatcacagattcttcaacgggggtttccgcctgctgttcgggaaatatgcgaagctgtaaatttaaagtctacttcttctgttcattcacatcttgaaacattagaaaaaaacggttatattcggcgcgatccgacaaaaccccgtgcgatcgaaattttggacgatatgttcaacctgacgcggcgtgaaatggttcatgtaccgattatcgggcaagttgccgcaggagaaccgattctggctcaggaaaacattgaagattactggccggttcccgctgatcgtatgccgaataaacagacattttttttaaaggtaaaaggagaaagtatgatcaatgccggtatacttgacggcgatatggttcttgtggaagaagattccacagcttctaatggagatatggtcgttgcgttgatcgaggacggagcaaccgtaaaaacattttataaggaagaaggagtttttcgtctccagcctgaaaatgattttatggatccgatcattgtaaagaatgttactattttaggtaaagttattgctgtgatgagatttttctcataacttccgaatataaagtaccgaaaaaatcataagacaaaaagagaagtatcctgtatttaaagattttggatacttctctttttggtttttaatcaggttttctaaaaacttgcttctcttccgctgactgcaccgctcgcccatgcccatgtcagattatatccaccgcacatgccatctacgtcgagtatttctcctgcaaaataaagtcccggaacataacgcgattctaaagtatcaggatgaacgtcctttgtatcgatacctcctcggcaaacctgtgcctgctcataagaatttgtttctgttacaatcactttaaaattcttgattaaacggacaagctgctgaatttctttttctgcaaacactccgacttttttctcttttgaaatccctgcttctttcacccaaagatcggacaactttttattagataaccctgtgaaaaattgatctgctctcttatacggacgcattttcgcccgttttattaaaaacttttccagctcatcttccgaaaattccggcataaaatcaagaatcgcctgaacttttttctttttatataatgcaatcgccgcatatctgctcacttgaaatacaggaatacctgatatgccataattggtcagttgtaattctcccgtatcttttgccagacattgattttccgaccatatcgaaacagttccctgaactcttactcctgcgattgatttaaaaaatttttcttcacatcttaattgtacaagagcaggaagaacaggaattattttatgtccgagtttttttgccagatcataaccggaaccatcggatccgctggcagggaaagctctggatcccgtacacaggattacatgatccgcatatattttcccctttttcccgtctttaacaatctgaagagtaaacccctttttacgagggaaaatatccgtgcattctgtttgaagtcttacatcgatttgcagacgctctaattccattttcaaagcctcagttacagacgatgcctgatccgaatagggatacatgtatccatttctgtttttcgcataaacgccgagttcttcgaacaattttataatctgctctgcattaaatttctcaatgatcttccatggaaatgattcgttatcagagtgataacagcttcgatcctgataagtatttgtaaaattgcatcgtccgttccctgtcgaaagaatttttttcccgacgcggtccatatgttccaatacaactacttctgccccgtttgaagctgctgtgatcgctgccgtcatcccggctgctcccgccccgattatcgctacttttctcataatataaatccttttcttttctaagcatcaaaacactgttttaaagcgactgaagtttggatctgtcaataactcctgcatcaatcaaactttgaagagattttaaaatgcccagcttcgcatgctgccatgtaagaccgccttgaaaataaacggcatagggaggtttgatcggaccatctgcagatagttcaatcgaggacccttgtacaaatgctccggcagccatgatgacttcactgtcgtatcccggcattgcccaaggttcgggagttacataactgtctaccggagccgctgcctgaattccctggcaaaatgcaatcactccatctgcactgccaaacgtaactgcctgaataatatcatgacggctctcgcttgcatttggaacaaccgaatacccgagtttttcataaatattcgctgcaaaaacagctcctttaagcgctccgcatacaactgtcggcgccataaaaaatccttgataaaaagactgcatcactccgagagacgctcccacttctttccctaatccgggggatgtcaatctatacgcacagttttcgataagttcttttttgcctgccacatatcctccgatcggtgcaagaccgccgccgggatttttaatcaatgaaccgacaatcatatctgcacctacatcgcttggttcgatccgttctacaaattctccgtagcagttatctaccatacaaataacatccggtcttttcttttttataaatgcaatcagttctcctattttttctacagaataactcggacgtgtctgatatccttttgaacgctggatcgtcacaagctttgttctttcgtttaatgctttttcgattgccggataatcaaaataaccgtcttccaacagatcgacctgtttatatgtcactccatattctgcgagagatcctttagactggcgaatgccgattacttcttccagtgtatcgtagggtttccctacaggagataacaattcatcaccgggtcttaagtttgccgataacgcaagtgcaagtgcatgtgtaccgcatgtaatctgcggacgcacaagagccgcttctgtatgaaatgccgccgcatatacttcttccagcgtatcgcgtccttgatcgttataaccgtatccacttgcataattaaagcagctttcatttacccggcattgctgcatggcagagatcaccttcagttgattatattctgcattactgtcgaattctgcaaatcgttctttcagaccttcctctatcttctgcccatatatccacacatcttctgaaattcccaactgtcggtatatcgtttttgtttctgtattactcatatatattttcctctttttttattagtttttctctttaatcttgtaaagttttcgttatattgatccattattttgttggttttatattttatactaaaatctgcttttttctcaactcttcgatcataaaatcaagaatatgttcctcgtcgtctccgataacggcacgatctatccatgtgacatccttttctcgcttaaaccatgtaagctggcgcttggcaaaatgtcttgtatcgcgttttataatacgtaccgcctcttccaatgaatactctccgttcatatatgcatacaattctttatacccaagtccctgcatcgctgtagaagttgaactcacgcctcggtcttttaagaaacgaacttcctcttctaaacctgattccatcataagatctacgcgtcggtcaatacgttcatacagttttgctctgtcgtctgtcaaaacaaaatatgcatattgatacggagattccttttctctttccgcttcattatgttcggatattttcattcctgtctgatgataaaattcaagcgcacgtattgtccgttttatattatttgtatgaatctgcaatgccgacttaggatctacttccgtcaacattgtatgcaagtattctgcccctttttcctttgcgagaatctccagttttttccgataatcatttggagaatcattttccgtaaaatcaatattataaagaaccgattggatataaaaaccggttcctcctacaatcaaaggaatttttcccttttcataaatctgttccatttcctcaagagccatcttctgaaaacgaacaacattaaattcctcttccggctcgagaatatcaatcaagtgatgcgaaatcccgctcatttcactgcgcgtaatctttgccgaaccgatatccatatgtttatatacctgcatagaatctgccgaaataatttctgcccctattctttttgcaagccctatagatgcttttgtttttccgaccgctgtaggtccggccaaaataatcagtggttttttcatttatacaatcctcttaaacttcttctctaattctcgtttcgtcatggcaatgatcgtcggtcttccgtggggacaatgatacggattatctaaagtaagtaattcaccgatcagagcgtctacttcttttgccgataaacggttattgccttttaccgccgccttacaagacatagacgctaccttttcatcaatcaaatcaggagtcatagatgtgtttatcccatctgccagatcgtcgatcatctccataagaagttctttttttgcgataccgaacaaattatccggcactgccctgacagcatattcttctcctccaaaatgttcgatttcaaaaccgattctcgtaaaacgatctatatgctcctccaaaagctgagcttcctgcatcgaaagcgataaaatgatcggagggcttaaatactgagatgtatattccctggatttcatctcttttaaagttctctcatacatcactctttcatgcgcggcatgctgatctataatataaagactgtcttggaattgtacaagccagtatgtatcgaacacctgaccgatcaatgtgtattctgccttcacttcacgcttcaagaaattttcttcaaacagatccatctgcttcggagtcttgtctgcctcttttgcccgatatgcagcagcttcccggattcgttctgcctgttgctgcggacgataaatttccccacggtctaaaacttctgcagacgaggagcgttcatgatatgccttcaccctttcccgcattttccttataaaataatcttcatcatgaatttgaggttcagactgcaaaacagattctttatctgcctcgatagcagacgtctgtttccgggcttgcccctgttcttcatcctgtactttttcccgtacttgctccggtttcgtttcctgcgctttctcccgtacttgctccggttctctttcctgcatcttttcccggattttttctattggatcatattttgtattttctatagatttgggtttcagcaaaaacggactttcttttttcttttgagctgcatctgccggatccggaactgtagctgtttgaatcaattcaggttcaagaagccttctgtgaacagcttcgtacattgtattgtaaacttcctgctgacgttgaaaacgaagctccattttcgtcgggtgaacatttacgtcaataagatccccttctacctggaaatgaagaacagcaaacggaaatttatgctgcatcgtaaaatctttataagcgtcttccagcgacttagagagcattgcactttttacataacgcccgttcacaaagaaattttcaaaattccggtttcctcgggtgatgaccggtttacctaaaaatccggaaatagaaagaccgtcttttttataatcaagttccaaaagattcgacgtcacttcgcgtccatatacattataaatcacatcttttagttttccgtttcctgacgtccgaagtttttcttgtccgttattgataaataaaaatgaaacttccggatgtgacagcgccagatggatcaacagatcctgcacatgccccgcctctgtcaccggtgtttttaaaaattttcgcctcgcgggtatattataaaataactgatgaataagaaaagtcgttccgttgggagctcctgtctcttccaatgcagtctcttttccgccttctatgacatattttattccactttgtccttcctctgtttttgtgataacttctgttcttgttaccgcggcaatactcgacaaagcctccccacgaaatccgagagaatgtatggatacaagttcttccgctgtacggatcttactagttgaatggcgcaaaaaagcacatcttacttcatctgcttcaatcccgcatccattatctgtaacacggataaatgaaattcctccgtctttaatttcgactgtaacagaggtggctttcgcatcaatcgcattttcaaccagttctttcacaatagacgcgggtctttcaataacttccccggctgcgatcttatcaatcgttatctgatctaaaacttgaatatgaggcatgactgctccttttctttttgattttatcaactttaccaacggttctttaatttattctgtaatctgtatatcgtattaagagcatcgatcggagtcatatttccaacgtcaagatttttcaattcttcaagaacatcgtcatcttttactgtgtcaaagagcgacatctgcgcaatatctacatcatcgtatttttttactttcggtttcttttttacgacacgttcttttgacgcaatctcacttactcttgccgtaatatcttcatcacttagctcttctacaatctcttttgcgcggccgatcacaagctccggaacacctgcaagttttgcaacttgaattccgtaacttttatctgctccgcctttgacaatctttcgtaaaaatacaatgtcatcacctttttcttttaccgcgatacagtaattgtttacattatcgatttttccttccagttctgtcagttcatgataatgtgttgcgaacagcgtttttgcacctaaaagtctgctgtcgcttatatattcgatcaccgcccaggcaatcgacaatccgtcaaacgtacttgtgcctctcccgatttcatcaagaatcaacaggctttttgacgtagcgtttctaagaatatttgcaacttccgtcatttcaaccataaatgtactctgaccggaagcaagatcgtccgaggctccgactcttgtgaaaatacggtctgaaagaccgatattagcgcttttggcaggtacaaacgagccgatctgcgccataagagcaatgagcgccgtttgacgcatatacgtcgattttcctgccatattcggtcctgtaataatagaaatccggtgttttttatcatcaagatatgtatcgtttgaaataaacatttcattcgggatcatccgctctacaacagggtgacgtccttcttttatatcaattactcctttttcgttgatcttaggccgaacatagttattgcgttccgcaacgagagcaagggaagcaaaggcgtcaagcgccgctactgctttagcggttttttggatacgctctatctgacttgcaatcaaatctcttacttcactgtacagttcatattccaatgcataaagtttgtcctccgctccaagtatcatgtcttctaattctttcagctcgggagtaatatatctttctgcatttgccaatgtctgtttccgtgtataatattccggaaccatttctttgtaagagtttgtcacctctaaataatatccgaatactttattgtacttaatctttagatttttaatcccggtcttttcacgctcgtcattttcaagctttgccaaccagtcttttccatcggactttgcgcggcgcagcttatcaacttcttcgttataaccgtcattaataatatttccttctttcatcgcaatgggaggatcttcccggattgctttttttacaagtatacagagatcttcaagaggatcaagatcaacagcaagatcttttaaaagttctgctttcatttcttgcaatatatacaaaagtgcgggaagcatctccagagaacttctaaaggcagtcaggtctcttggattggcagatccgtacgctatctttgtgatcagtcgttccaaatcatacacaggagacagatattctctgatttcttcacgagaaatcgcctgttctttcaattcctgtactgcatccagacgacgaataatctctgtcttatcgatcagcggctgctccacatattttctcaatgtacgagctcccattgctgtctttgttttatcgagaacccacagaagagatccccttttttgtttttcacggagagtttcgcaaagttcaagatttcttcttgtcgaactgtcgatcatcataaacttgcctgcggcataaggcgtaatatgtgtcagatttgaaagcgagtttttctgtgtttccaacagatactgcagaagagctccggcgctgatgattccgcaatcataatctgcaagtccaagtccggcaaacgaggaaacctcaaaatgttccaaaagttttttacggcatacttcatcgtcaaaataccatgattcaagcgaataaatcgtaattccaagccgatctttcattccgtccatgtcgacgccgctcatataaaacgcttcattgcatataatctccgacggtgagaatcgatagatttcatctaataatttcgcactgtccggaatctccgttacaaaataatctcccgtcgaaatatcggcaacagaaacgccgtacctgtctgcaatatatacaatacacataatatagttgttctttgtttcgtccaacgcttgtgtatcaagatttgttcccggggttacgatacgtacaacttcccttttaacgattcctttcgtcgttttcggatcttctacctgttcgcagattgccactttatagcctttggcaacaagtctgtttaaatatccttctacggcatgatacggaactccgcacataggcgccttttcttcctgcccgcagtttttcccggttaaagtgatttccaactcccttgatgcagtcagggcatcttcaaaaaacatttcatagaaatcacccaatctataaaatagaatgcagtcttgatattgagactttgtctccatatactgcttcatcattggtgttaattcagccacattcctactcctttgtacataaaaataacagttttaaacatagtaccactacgctcttattctatggtagtatagcatttttagacaatgcgttcaacatcaagaattctaatgagcaaaaatcggcatcagttcattttgacagcaatataaatttatagaatatgaaaacccggctttatttctctgtataaatagcaaagcagatatccgcttataataatcccgaatgtacatagtcccgaaaaaagaacagcgaacggaaagcagatctgccccataaggtgaaacggctgatctgtataatcccagacattccatcccataactttatttactatgatccctgtgataaattcagcagatactacaaacgccgtacaccaaagcacttgtttccagagaggctctctccacttcgtccataacccttgttgtgcgaaaaatataaaacagattccgcccaacaaaaacatcgaccaatgagaatatcctctgaaaataatttctatcatataataaagcgttcctcccaacgctcccataaacaaatattcacttaattttttcattttcatcttccggactcatctcctgtttttatctcttattatagtctgaacattttaaaaaaatatataacatattccttttcgactttcaaaataattgcctaagttatcactgtatgatataataaataagattatggacagttcaaagtatccgagaccactgaaaaatatatttttcgtaaaatatgtttttcagtagtttcgggacatttgtaaaaaccgttcacgattgatgacaacatagattgaaaaggagaataacatgtacaaaatgtatgaaatggaacttgcaggcagaacactgcgtgtagatgtagacagagttgccaaacaggcaaacggcgctgttctgatgcattacggagacacaactgttttgtgtacatcaacggcatctgaaaagccaagagacggaattgattttttccctcttagtgttgaatataacgaaagactttacgctgtcggaaaaatcccgggaggatttaataaaagagaagggaaagcatccgaaaacgcaattttaaccgaccgagttatcgaccgtccgatgcgccctcttttcccgaaagattatcgaaatgacgtaactttggaaaaccttgtaatgtcagtagatcaggactgcagcccggaacttaccgcaatgcttggagcttctcttgcgacaagtatttccgatattccgtttgacggcccgatatctacaacacaggtcggactcattgacggagagtttgtgtttaacccgacggcagctcaaagagaagtttctgatctcgcacttacggttgcttctacaaaagaaaaagtgattatgatcgaagccggagcgaacgaagttccggaagaccgcatgatcgaagcaatttttgcagcacatgaattaaaccagaaagtcattgcttttttcgatacgatcgttgcagaatgcggaaagccgaaacatgagtatgaaagctgtgcgattcccgaagaactgtttgacgcaatcaaagaaatcgtaccgcctgccgaaatggaacaagctgtatttacagacgaaaagcagataagagaagacaatattcgtcagattacagaaaaattagaagaagcatttatagataatgaagaatggctctctctccttggcgaagccatttaccaatatcagaaaaaaactgtaagaaaaatgatcttaaaagatcacaaacgtccggacggacgcgctatcgatcagatcagacctcttgcagcagaagtggatcttcttccaagagtccatggttctgcaatgtttacaagaggacagacccagatttgtacggtaacgacactggcgcctttgtctgaagcacaaagacttgacggtcttgatgaatcagaaacgactaagcgatatatgcaccattataatttcccttcatattctgtaggtgaaacaaaaccgtcaagaggacctggaagacgtgagatcggacatggtgcgctggcagaaagagctcttctcccggtacttccaagcgaagccgaatttccatatgccatccgtacagtatctgaaacatttgaatcaaacggctctacttcacaggcaagcgtatgcgcatccagtatgtcgcttatgacagccggagtaccgatcaaagctgcagtagccggtatttccgcaggtcttgtaactggagatacagacgatgactatcttgttcttaccgatatccagggactggaagacttcttcggagatatggactttaaagtagccggtacacataaaggtattacagctattcaaatggatattaagattcacggacttacaagaccgatcattgaagaggcaatttctgcgacaaagaaagccagaacctatatcattgacgaaatcatgaataaggcaatttctgagccaagagcagaagtcggtgaatttgcacctaagatcattcagatgcagatcgatccgcaaaagatcggcgatgttgtaggacagcgcggaaaaacgattaacgcaatcatcgaacagacaggtgtgaagattgacattgatgatgaaggttccgtttccatttgtggtacagaaaaaacagcaatggaaaaagctgcgaagatcatacacacgatcgtaaccgactttgaagcaggtcaggtctttgaaggaaaagttataagtattaaagaatttggcgcttttcttgagtttgcaccgggaaaagaaggtctcgttcatatctcaaaaatcgctaaagaacgtgtaaataaagttgaagatgtactctctctcggagatgttgtaaaagctgtttgccttggaaaagacaaaatgggaagattcagcttcagcatcagagacgttgcagaataataattaagggcaagttgagatagcgtagtagaggcaaaatttcccaatcgccctcatcccgcccaaattaaaaattgagactcagtacggaggatgattcctctgtattgggtctttttctaaaacggtcgtacacaccaagatccttccagacaaggaattagactttccgtcatataaaaaaggaacagatcaaatctgccccttttttgcttacattgaaacctctgactattttctgagtccgagtttctcaatcaatgcacgatatctttcaatatctacttttttaagatatgcaagaagacctcttctctgtcctaccatcttaagaagacctcttcttgagtggtgatctttcgggtttgctttgaagtgatctgtcagttcgttgattcttgctgtaagaattgcgatctgtacttccggtgatcctgtatcaccttcgcttcttccatactctttgatgattgcctgctttttgtcctttgcgatcatgttgtaactcctccttaaatacttttataaacgcctgatattaagtaacggtcggagtgatccgattaccgaacatcggctggttttctaacctcaagtagtatatcatatgccacttacaatgtaaagaatttattttagatttcttttgaagccttaaagtagtcttttccataacggagatctttcgccacttgtttttttaattcgttcacagaagaaaatcttatctcgggtctttcaaaatcacaaaattccaccgtaatttctttcccgtatgcatctccttcataatcataaacaaatacttcgacaagacgcttgtgttcttccgtaactgtcggcttcacccctacgtttccaatgccgttgtaccattttccgtctatattgatacggcagacatacactccgaatcttggcagtatttttttttcttcaggctcgacattcattgtaggaaagccgagcgtccgccccagttgtctgccatgccgaacaattccggttactccataccgatatccgagaagctctgccgcaagagttacattgccttgtgaaaggacatctctgatataagtactgctgatcacgatctgatcatatcgttctttttcgatgacatccagcgtatatccccctttttcggaaaacattttcaacatttctgtatttcctcgtttttcatgaccaaaagcaaagtctgttcctacaacaatatgcgccgcatgaagtttttcgcacaagatgttcttaataaacacttccgcttccatttcacgcagttctttcgtaaaaggatattcgatcaaacaatcgattttcccttcaagatgactccgcctctcctgctttgtcattaacgactcccggtgcatatcgaaagcacagaggacgcttttacaattttctcccgaataagcgcatattttatcgatcagtttttgatgtcctttatgaagaccgtcaaacttgccgagagttaacgctgtcttttctattcctgcatattgctcaatccccgtgatgtactccatgatctactcttccttttatccgcttcatatcattctcatctcatttacataatttgaaacgaatttttctattttccatcaggatcgaaaaacattttttcgattctgaataactgcctttgtttttgataagagtatatagcgataaaccgtccctgctcatcgtatactctatattttttatatctagaaaaaatgtcggaaagatcatcctctcctccgtcttttccgggtaaaatcaaatttttcgcagactctttcggaaaaggatttccgttatatgccaactgagcctggcgtcctgttacgattatcttaggatattcgacaaatacttcatccagaggcaatattatttcttctgtccttccttcattcttcgccttttcaatatctgcaagcttcatactgtcttttaactcaaaccgactgacttttgtacgaagcagtgattccatacatccgccaacgccaagaacttctcctacatcattacataaagtacggatatatgttccctttgaacaagaaacttccatccgtatgcgaggaagtttcatttccttgatccgaatgtcataaatctgtacttttctgcttttccgttctacgactttcccttcccgagccaattcataaagcttttttccatttacttttagtgcagaatacataggaggaatctgatcatattcccctataaaactttcaatacatttttttgctgtttcttcagtgatttccgatggatcacattcttttaaaacagtccctgtaatatcttgagtatctgtttcttttccaagcaaaagcaccgcttcatacgttttatctttatctgtcagcagatcacatacttttgttgcccgtccaagacataccggaagcactccttccgcatccgggtcaagcgttccggtatgaccgatcttcttttgtccgaagattccccgaagacgagccaccacatcatgcgatgtataacctttttctttgtaaatatttaaaattccgtttatcatacttctgattctagtccttatttcattgcggaatcactgatttttcttccagtttttcaaactgacgggcgatctgctcggtaatattgttgatcacgtcatgtgcagatcctgtcattgtcacacctgccgcccgtatgtgtccgccgcctccgaaatgttttgcgattacactcacatcaatatattgtttagaacgaaggcttactttatatttttgaggttcaagctcatgtaagaagatagcgacttccacaccttttgtctgcctgagaatacttactaccccttccagatcagacggctctgcatggaaaaattccatcgaacttttgcggataaccgacacaacgcattgacgatccataatgagcatactctcaaggagcgctcttcccaaaatctggttttgcacatatgttttttcgtaaaaggtttgctcaatgatcgcgtttccgtttatcccttttctcatcagtttagccgcattttccatcgtttccggcgatgtgcacgaatatctgaaaacacctgtatcgtgagcaattcccatataaagagcttctgccgattcttttgatattttctcttcatcgagcaaagtaactacaagctcagacgtagaacttgcatccggaacaatatagttcaagtctgcaaacgattcgttgctgatgtgatgatcgatgcaaaccgtctcttttgcgttttcaaagaccgaacttgaaaatccaagtctcatcggatctgcacaatcaagacagataaacagatcatacggcgtttcgttattgtttacttctgaacgaacttcatctgttcctttgatcagacgaaatgtctcaggtattttttccagataaacgtctgtctgaatatgcggatattcttgttttaaataaagatataaccccattaccgatccgatgcaatcgccatccgggcggacgtgtccgcccagggcaatttttttcttctctttcagcagctcttttaaatcaatttttttactattcatcaatatcaccggcctcatctttcagatcctttgtaacctcgtcgatcttcttgctgatatttacgccatattcgatcgactgatctacaataaacttaatctccggagtgtttctcatattaatcgttctggcaagctcacgacggataaatccttcagcgctttgcagccctttgatcgtatcctgctgtgccttttcatctccgagtacgctgatatatgctttgcatgttttcagatccggcgccacttccactgccaccacagatgtcatgggcgacactctcggatctttgatcccgccacgcagtatattgctcagttctctttgaacttccgcatttacacgggtattttttatgctgttttttctcattaatgctccctcttttcatctgcgaaactaatcattcggtttttttgaatcaaatttattttctctcagtctcaaccattttataagcttcaacctgatctccttctttgatatcattataattttcaaatacaaaaccacattcatatccggctcttacttcttttacatcgtctttaaaacgtttcaaagatgccagcggtccgtcaaatactacgattccgtcacggataagacgtacagaacagtttctttcaaaaataccgtcctgaacataagatcctgcaatcgttccgactccggatgctttaaatgtctgacgcacttccgcgtgaccgagaattttttcctcaaataccggatcaagcattcctttcattgcagcttccacatcttctatcgcattataaatgactctgtaaagtcttaaatcaacgccttctctatcggcgatttcttttgccgtcgcatccggacgtacattaaatccgataatgatcgcattggaagccgatgcaaggctgacgtccgattcattgattgcgcctactccaccgtgaatgatcttgattacaacttcatcatttgaaagtttcaaaagactctgtttgattgcttctactgaaccttgaacatctgcttttacgataatgttgagttctttcaaattgccttcctgtatctggctgaacagatcatcaagagacattcttgattttgtctcatcaagaagtttcactttattctgagcgataaacgtctctgcaaaacttcttgcatccttttcggaatcacatccgacaaacacttctcccgcatttggaacatcatttaatccgagaatctctaccggctgtgacggacctgcctctttcacccttctgcctttatcgtccatcatcgcacgaacgcgaccatgtgcgcttcctgccgcgattgcatctccgacatgaagagtacctttctgaacaagaactgtcgcaacagatccttttcctttatcaagttccgcctcgatcacaagacctcttgccgcacggttcggatttgcttttaactccataacttctgctgtcagaagaaccatttcaagaagctccggaattccttcttttgtatgtgcggatacaggaacaaaaatcgtacttccgccccaatcttccggaatcaactcatattctgtcagttcttgtttcacacgttcgatatttgcacttggtttatcaatcttattgattgcaacaataatttcaattccggcagcttttgcatgattgattgcttctactgtctgaggcattactccgtcgtctgccgctacgacaagaatggcgatatccgtagagcttgcaccgcgcatacgcattgccgtaaacgcctcatgtcccggcgtgtcgaggaacgtaattttttctccgtttgcttccacaacatatgctccgatatgctgagtgataccacctgcttcacgatcgatcacatttgagtgacggatcgcatcaagaagagatgttttaccatggtcaacgtgtcccataacacatacgaccggaggacgttttaccatcatattttcatcttcctcttcctcttttaacagttcttcgatcacatctacgacttcttctttttcgcagagaacttcaaattccattgcgatctcttctgcagtatcataatcgatttcctgattcactgttacaacttttccttgaaggaacagttttttcacgataacagaaggaacaatcttcattttatctgcaagttctttgatcgtaagaacttccggaattacaatctgtttaatcttttcttctttcttctcttctttcggctgcggtcttttcacttctgctacctgtttttgttttttgccttttttgccttttccgtcaaaggcttcgtctctgtattcttttttcttattatcacgttctttatctttcgccttattacgctggctcttctgctgctccacgatcggtgccgccacatcatctcttcgtgactctcttttctctctgtcagatcgaccattttgtcctcccggtctgcggtctctgtctccgcctcggctctgtcttccgtcaccgaactgacgatttccctgtggtctttcctggcgcgaacgatcattggatccgcgatcgaatctgccttgtctgtcagacggttttccgtctcttaccggctttccgtctctgttttctcttaccggacgatcattggactgtcttgcttcacgattttctcttgccggacggtcattctctgttcttttctccttttcggactgtacctgtaccggtttttccgcacgtgccggctgttgcttttcctgacgtactccctgcggcttttccgctgctgactgcgcttgcgtacccggtcgtttttctgtagttgaatgttcggcagcagtttcggcttttacagtttgagcaggaaccggccgcgcagcctgtgacttttctgcacctgacttttccgaacgtgctccctgtgatgccggacgcgtcgtcgctgcctttgcctcgttttgacgcgcactctgctgtggacgcgcagacttttgagccggacgttttccctgtatgcgactgctgtttttagagttttgcggacgaatcacaaatgccagatttttctttttcggagcttcttctccctctgactttccttctgatcttgtgtttttttcttttcggatctcatctgctatattgtcctcgatcgaactcatatgatttgacacctccacatttttcttatgcaacaaatcgatgagctctttattttccattccaagctctttcgcaagttcatgtaccctcatttttgtcatattaaaactacctccttatgcaatatcctctcggtttttcagctctctttgaattccatctgcaaatccttcgtcaagtatcgccagagatgcacggaactcttttcccattgcatgccctaaggtatctttatctccgtagaaacaaaatggaactttataaaacttacacatatccccgaattttttcttcgtgttctccgatgcgtcaccggcgacaatgacaaacttcgcttttcctgatttcgtctcgctttctgtcattgtctcgccgcttacacattttccggccttcatcgccagtccgatcagggaaaggaccttatctctcttactcaagctctcccatctccttttccattctctcatatacttccggcggtattgcctgcttaaacgaccgttccaatccacggtttttcacagctttctgaaagcattctacgctccggcaaagataagcgcctctgccgtttgcttttccaagtgcatccacgacgaattctccggtttctgtcctgagtattcgcagcaattcttttttaggtttcatttctccacaccctacacatttacgcataggaatttttttattaactgccaaataacccactcctttagatattactcattctctgtctcgataaattcaatttcttccgactcttcgttctgatcttctgccgcttcatcataagactcttcactgtattcttcgttatactcttcctcgtaatctcctgtataaccttcttcaccgacaagtcccatctcttccatataattttctggaagttctcctgcctctatcgcctgtgtctcgctcttaatatcaatcttatatcctgtaagtcttgcagcaagacgtgcattctgcccttcttttccgattgcaagtgaaagctgatagtcgggaacgatcacactcgcgattttttcttccggatctgccattacagaaatcacttttgcagggctaagtgaattttctatcagaagcgccggattctcatcccagttgataatatcgattttttcaccgcgaagttcctgaacaactgcgtttactcgtgctccgttcattcccacacaagcgcctacgggatctacattcggatcgtttgaccatacagccatttttgtacgggaacctgcttctcttgcaatgctcttaatttcaactgtaccgtctcttacttctgccacctctgcttcaaaaagacgtttcacaagttcgggatgtgtacgggatacaagtatcttcggtcctttcggagtatttttcacttctactacatacagtttaatacgttctgtaggtttaaaatgttcccctttcacctgctcgttctcagtaagcattgcatctgctcttccaagattaatactgatatttttcccgacatatcgctgaacaacacctgtcacaatatctttttctttttcaaaatactggtcaaatacaacttttctttcttcttctcttattttttgaagaatcaggttctttgcattctgagtcgcaatacgcccaaactcttttgagtgtaccggaatctgtgcgatatcgccgacctgtaatgcagaatccagcttttccgcttcttcgagactgatctccaacgcaggatcttctacctcttctactacatttttctctgcatatacagcataatcgcaagtatcacgatccatgattactttaatgttatccgatgttccgaaatgattcttacatgcgctgatcagcgaattttcaatcgcatccatcataacatctttactgatatttttttctttctcaagaattgtcaacgcttccattaactctatgttcattttgtcatttcctcctaaattttaaaaatccaaagcaagacgaatcaatgcaatttctgctctgtcaaatacttgttctgtttcatcttcatatataatggtcacagtgttttcatcaaaccctttcaaaataccggtaaattctttctgacgatcgattgcccggtaagtacggatctctacttcttctccgatacttctcttaaaatctttttctttttttaacggtctgccaagccccggtgagctcacctcaaatacataagaatccgggatataatctttttcatcgagaatatccgaaaactttctgctgaccgcctcacagtcatctaccgtaatcccgcccggtttatcgatatacgcacgaagataccatgttccggcttccttgacatattctacgtcaaccagttcaaatccaagtgcagacacgatcggttctaaaagttcttctgttttctgttcatattcttctctttttgacacgctatacttcctttcttctcatttggcagaagctatctgccgcttatgtttcttttgttatcgtgaatttacaactgaaaatatctataagatattttttgtcgtatgcatagcaacaaagaagagtgaactttcgttcactcttctgccggatttctatgtaactatttcatagtatagcactgttttttttatattgcaaggcttcttctctattttcttgcttttgttcctgctccatcacgtttcgccgttttcaatcgatttaaggagacctctttttcattatatagaatctttgtttccgttccttcttcaaaaagatataccttttccagttcatcttttttctgaagacggatacctctgacaccgactgcagcttttttctttataggaacttccgtggccgggaatctcaaaaagtacccgttctttgtctgaagaacgacatgcttattttcattaacaacccgaacatcgaccagagaatcttcttcctgaagttttgtagccagaattgttcgttttgccacctgaaattcacttccgctgactttttttaccattccctgcgccgttgaaaacaaaagcatggcaaatctcatctgctcggaatcgtataccgagacaatctgttcatcagaactggagtaattgctgacattgtcgatcggaactcctttatccctgaattttccataaggaagatcaattactttcacctggtgcattttcccgctattggtaaaaatacatattttccccgtgttcatacaatggacaatatacttattctcactatccgccgcttccttatttctttcgtaaacggcaacgtctactattcttgcatatccgaaccgatccatcaaaaatacgacttcctgttcttcgatcttcttctcttcaaaaacggcttcttcagcattttcaatgactgtacggcgcgcttttgcatattcttctttaaacgattcaagttcttccacaataacttgcgccatagaatcataattattgagaatatcttcataacgcgcaatattcttcaccgtctgttcatgttccgcgatcaaagcctgtacttccagaccgatgaggcgatataagcgcatctcgaggatggcagcagcctgacgttctgtaaagcgtaaaagcaccgccatctttttggaaatagaagatttaaacttaatattatctgttacgccatttacaagacatgcttttgcatcttttacagatttactgcctcgaaggatttcaataataagatcgatcacatcacatgctttgatcaacccctcctgcacctcacttttttcctgttcttttgcaagaagtgttttgtattttctcgtcgccagttcaaatcgaaaatctacatgatgctcaatgatcttcttaagtccgagtgtttccggtcttccgtctgcaactgcaagcatattcacgccgaatgtgtcttcaaggcgcgtctttttataaagcatattttttagattttctacatctgcgcctttttttaattccaacacaatccgaattccttctttggaagattggtttgaaatatctgtgatatctgttgttttctttgtctctaccagaccggctacatcatttaaaaacttccctattcccgctccgatcatcgtgtatgggatctcactgatcacaagctgctttttgccgccttttaattcttctgtctctacttttccccggactttgatctttccctgtcccgtttcatatatattgatcagatcatctttattaacaacaattccgcctgtcggaaaatcaggcccttttatgtatttcatcagttgttttgtagtgatcgaatcgtttttaatatatgcctttaccgcatcgatcacttctccgagattatgaggcggtatacttgtcgccatacctaccgcaattccttccgctccgtttacgaggaggtttggcacacgcatcggaagtacaagcggttctttttctgtttcgtcaaaattcggtccgaaatctaccacatctttatctagatctgcaaggcagacttcctgcgtgaatttcgtcagtcttgcctcagtataacgcattgccgcagcgccgtcaccttctatcgaaccgaagtttccgtgaccgtctacaagtaccattccttttttaaactcctgagccataacaacaagagattcgtagatcgaactgtcgccgtgaggatgatatttacccatcgtatctccgacaatacgcgcgcattttctgtacggcttatcatagcggattcccagttcgtacatatcataaagcgtacggcgctgaaccggcttcagtccgtctcttacatccggaagtgccctggaaataattacgctcatcgcataatcaatatatgattttttcataagatccgaatattccgttcttatgatctgtgattcactgttcatttctcgtctccttcatttcattttgctcatatgacacaaagcaaatccattttctgacacaaatcacgtcgactctgtttcgtcatacagattatatatcaagttccgcctctgtcgcattttcatagatgaatgcccgccgcggaggcacttccgttcccataagcatctcagtcacaccggaagccattctcgcatcttcaatctcaacaagctttaaaagacgtcttttaggatcaagtgttgtttcccacaactgttctgcatccatctctccaagccctttatacctctgaagagtaaacggtcctttgtgtgtccttcgatatttttcaagcgccttatcatcgtaaagatattcctcttctccgcttttcggcattgccttataaagcggcggcattgcaatatacacgtgcccctcataaatcagttccggcataaaccgatagaacagcgtcagcaaaagtgttgaaatatgagctccgtctacatctgcatctgccataattatgatcttatcgtatcgaagctttgtaatatcgaagtcattgccgtatccttcggaaaatccacatccgaacgcattgatcatcgtttttatttctgcattcgcaaggactttatcaatacttgctttctccacgtttaatattttcccgcgaataggaagaatcgcctgaaagtttctgtttctggccgtttttgccgaacctcccgccgaatctccctcaacaataaatatctcgcactttttcggatctctgctctcgcagtttgcgagttttccgttactgtcaaacgaatatttttgcttcgtcaaaagattcgttttcgccttttcttctgtcttacggattttcgccgccttttccgcacttgacaataccgtttttaaaacgtccaggttacggtcaaaataaagaacaatttcatctcccgcaactttaccgaccgcttttgccgcgtcgggattgtccagttttgtctttgtctgcccttcaaatctaggatccggatgtttgatcgaaataatcgctgtcatcccgtttcggatatcagctcccgtaaagttcgtatccttctcttttaaaataccgatttctcttgcatactgattcataaccgtcgtaaatgtcgttttaaatccggttaaatgcgttccgccctcggcattgtaaatattgttgcagaaaccgagcacattctcatgaaattcattaacatactgaaatgccgcctccacttcaataccgtctgcttcccctttaaaataaacaggctcatgaagcgcctcttttttcttattcagatctctgataaacccgatgattccctccggttcatgatattcgatatgctcggtctgatctcctcttttatcttcgaatattatcgtcagttccgggttaagatatgctgtttcatgcagcctgctttttacttcctccgcccggaacttcgtcttttcaaaaatcgtatcatcaggcagaaaattaattgttgttcctgtcttttttgtctttccgatcttaggaagaagtccgttttccagttcaatgacaggaactccgcgctcatatctgtcatggtataccgccccatcacggctgatcttaacatccatatatgtagaaagtgcatttacaacagaagaaccgacgccatgaagacctccgcttgtcttatacgccgaatcgtcaaattttccccctgcatgaagtgtggtaaacacaagccttgccgcagaaattcctttttgatgcatatcaaccggaattcccctcccgttatcggttactgttgccgttccgtctttttctaaaacaacacggatttccgtacaaaatcctgccagatgttcatccacggaattgtccacaatttcataaataagatgattcagaccttttgtcgatacacttccgatatacattcccgggcgttttcgtaccgcctctaatccttccaatacagaaatactccctgcatcatatgtattatttccagccatttaccttctcctttaccggatcattccttctatttttctcgacttcttttcttatgccgcactaattttgtttcacgctataacgagattgtaccctcagatgccggatgttgttcctttcatctgagggtattattttctatgataccacccgttttcgatcttgtaaatagaatccttgtcattccagtataacttcacacagcgtatctgccacgacctccatcgcatttttcatttcttctacagtatttgtctgcgcaccggcttcaatcaacagagacttcggcagcagatgcagattatatctatatgcccgcagataaatatgtcttgcaaacccgggatacattcgttctgacgcaagctgcatctgaagagaaaacgccagattatcctgtatgtacggattataaagataatcgatatctccgtttgtgcgagatcggctcaatccattaaaatacatgatctttgcagtcggctttccgtttacttctgtgactaagtgcgttccctcggcaacgccatccctatgaaggtcgattgccacctcgatcgttgggtttgcctccagaatcggtctgacagacgcttctgcgttttcatatgcattactcctgtcgagctgtccgttaataatatcatatacccctgtgtcatggattgttttgattccccgcttatttaaaagctctgtcagatattcccctattccgataatacttgtggcaggatctcccggaattgaatcgacaaattcctcctgtgaatgagtatgaaatatcaatactttcggaccatcttcctttttattgatcttcatactcctcccaagaaggtcatctgcattcaactgttcaggaccaatcatcgtagagctgtctaccgtataaaaattactaagcaaataatcaaaatctcttaacctctcaatagacatatcgacagaagaaagtgacgtttctcccgacggctgcacattttgcgccgtttcaggagactctttactaataagatttccgttttcatcgatacagttctcatcgtttgcctgcgcctctaaaatttgagcaacagtttcttgatcttctgccgtaaatccctctctcctatgctccatcgcataccctgctgtcggaagaaacagataagattgttctataaaaaactcgtgaactgttttttgcgggcttctgttcaaatatgcaagccgcggcatgtacatctcttccgcacccgaaaaaatatgagtttggaaaccatacattcgagccgaccacattccttccgaaatcaaacaaatcattgccagaaagaaaaacagaaaccggatcatccgcttcttccgttctcgttctttttctaatatccgaaatcgatccgccatcagacatcgtcctttctattacttctgacagtgtatgctttgttcttttctcttatgcttccgatctgcctgaaccggccgaaaaaagcatattgatcgcttccgataaagtatgactgatatgatgaaccatttcatcaacatctttaggcgtgacaaacattccgtttaaatgaggagagatcagctcttttacaaattcatatttttctccggcgttataggaacgcagcacttccccgactccttttaaagaatccgaagattcaagagcccttataaagttttccattgtatcatttacaatcgttgctgcgtctacaactgtcggcacaccgattccgataacaggtactcctaatgtttccattgtcatcccgtttctgtgattccccactccacttccgggatgaatcccggtatctgcgatctgaatcgtccggttcaatcgcttactgtttcttgctgccaatgcatcaactgcaataataacatcaggattcgtttccgatacaatcccacgcacgatctccgcactttccattcccgtttgccccatcactcccggcacgacagcgctgatcatcggcgcgtcgtcgactcctattgcatattttccatattcttttacaatatgccgcgtcacggataaatgatctgccacgcaaggtcccagtgaatccggagtaacttctctattccccagccctactacaagaatagatagatctttatcttttacttcaaattttcggatcagttcctttataaaagaacataccttttcggcaatcacggtctgacttttttcatcaggcattgccaaattaggagtttctatcgtcaaataagttcctacaggttttcccattgcctttgctccgttttctgttttgatctccactcttgtaacacgaagttctgatgcttcatcataatcttcttcaagaactacccctgatatttctacatgatctgattcaaacctttctttttcttcaagcgcaagatctgtccgcacactataattttttatcatatctcatcctcgctttttatgttcttattatagtattcctgctgtttttatattcaaaccgtctttttaatgcagatactgtgtttttttattccggttttccaaataatgcagtttttctctatatatgttccataattcccaatatttattaaaatatgtattgacaaccctttagagttggcataaaataaatgagtatgtttcagcagaacgtccgtgtccgagtctgcggaaactcaaattacatttgaaatcatagatatatttggaggtgtacgcattggctaacattaagtctgctaagaaaagaattttagtaaacgagacaaaagctgcaagaaacaaagcaattaagtctaaagtaaaaactgctgtaaagaaagtggaagctgcagttgccgctaaagacgctgaaactgctaagactgctcttcgcgcagcgatcgtcgagatttccaaagctggaacaaaaggtgtttatcacaaaaaaactgtttccagaaagatttctcgtctttccaaagctgtaagcagcattgcttaatcttattaatagaattgataaaaatagaaaagacatttgctcccgtcaggcagatgtctttttttgtacataatcttatcatcataaacaaaaagacattttcatacaaaaagacgcttcgcgtaatgcaaggcgtctttttgtaattatatcctattagttattgatcagtttatcttcatcgctccaactgtaaagttttctgatctcttctcctactttctctgccggatgctctgacgcaagttttctcattgcgcggaaatgtgcctgacctccggcttcggacatatccagaagaaagtcttttgcaaacgtaccatcctgaatatctgtcaaaatctgcttcatcgctttcttcgtatcatctgtaatgatcttcggtcctgttatgtaatcaccatattcggcagtattggaaatcgaatatctcattcctgcaaaaccggactgatagatcaaatcaacaataagcttcatctcatgaatacactcaaaatatgcatttctcggatcgtatcccgcttctacaagtgtctcaaagcctgcctgcataagagcgcacacaccgccgcaaagaaccgcctgttcgccgaaaaggtctgtctctgtctctgtacggaatgtagtctcgaggataccggctcttgctcctccgatcgcaagaccatatgcgagagctttatcaagagcttttcctgtataatcctgctctacagctacaaggcaaggagttccttttccaacctgatactcgcttcttacagtatgtcccggagctttcggagcgatcattgtcacatctacgttcgccggcggaacgatttgtccgaaatgaatgttaaagccgtgtgcaaacatcagcatattaccttcttcaagattcggctcaatatcgtttttatataaagcagcctgtttctcatcattaatcaggatcataataatatctgctttttttgccgcttctgccgctgtatatacttcaaatccctgcgcttctgcttttgcccatgatctgcttccttcataaagtccgatcacgacattgcatcctgattctttcagattcagtgcatgagcatgtccctgacttccataaccgatgatcgcgattgtttttccctcaagaagtgagagattacaatcttcctgataataaatttttgctgccattttgcattcctcctaaatgataattaaaaatatgctacatccttacttcctctggaaagacctgtaatacctgttcttgcaagttccagtatctcatatcctcgaagaagattcagaaaagcttccagtttactctgagttccggtgagttcgatgatcagcgagtcctcttcgacatcaactatcttcgctctgaaaatatctgccactgaaataatctcgcccctttgggatgcgtttgcccgcagttttaccatgatcagttcgcggtatactgactctccgtctttcaaaacttttatatcaacgacatcttccagcttccttacctgtttttctatctgggataaaatcagctcatcccccgatgcaactactgtaatcctcgtaaacctcgtatcggtcgtcgcacctgccgtgatgctgtctatactgtatccgcgtctgctgaataaccctgcaatacggctcaacactcccggattattgtctacaagcaatgaaaatacctgacttctcatgtgttcctctccttcttctctaaaaaaacagagtgcgttctgtttttatattttataatattaccaactcagctattctttgtcaagatgttgtgctaaaatttttacatatttgatgaccgttcagtcagtctaaaatcaagaatgaaatcaaaagttatacgcagccgatcttttctgcaatctcgtttaaataaacccatctttctgttttttcgtcaagctgtgcctgtactttctcctgttcctcaaataactcttttagtttaacagaattggtcgcattcgcattgatctgcattttaattttttctattctttcttcaagcgctgcgatatcgtcatcaatcgtctcaaattctctttgttctttataagaaaatttaaccttctgcggcgcattttgtttccagcttttcggattactttccgcaggatctttcggaagatttccgcgcgaattttcggttttgtctgtaaactgcgttgatgcagattctcttttctttacattcaaataatcggtatatcctccttcaaactgacggatatgccccttcccatctaactcgaaaatgcgatccacaatgttatctaaaaaatagcggtcatgcgatacggtgatcacgattcccgaaaaagagtttaaataatcttccaaaatcgtaagtgtgggaatatcaagattatttcccgcctcgtcaaacaaaagaacatttgcattttcggcaagtacgccaagaagatgcagccttctcttctctccgcccgaaagtttacctatcggagcatactgcatatcaggagtaaacaaaaaacgctccaacaacgctgacgcactgatttttccttctcgtgtcgtaatatattctgcaatatctttcacataatcgatcactctttgagaaggatccatctcttgttcttcctgtgcaaaatatccgatcttgatcgtttctccgatctcaatgtttccactgtccggaatcacctgtcccgcgatcattttcataagagttgattttccgcatccatttggtcctatgattccaagtctttgattttttaacacaatataactgaaatcatccagtatcactttttctccgtattttttactcacatgatgaagttcgatcgtctttttccccattctggtttctaccgaatcaagttctactgtttgatcttttatcggagtatttccgtttttcagttgttcaagacgctccagtctcgctctttgtttcgttgttctggcacgacacccgcgtttcgcccattcaagttccattctcaaaacactctgtctctttcgttcagatgctgattccatctcttctctttgcgccttcagttcaagaaaccctgagtagtcagagtcgtatccatacatttttccatgactgatctccaaaatacgatttgtaactctgtcaagaaaataccggtcgtgagttaccataataacggttcctttataggaccgaagatattcttccagccatcggatcatcgcttcatccaaatggttcgtaggctcatccagcaaaagtacgtcaaaatcatctgacagtatttttgcaagcacaacccgttttttctgtcctcctgataaatgctcgattttctgatcaaaccgggtgatatttaattccgtcagattactttctactttccaattctcttcccctttttttaatgcatatgaccgaatcgtactgtcttctgaaaaaaccggattttgcggcacataggcaagcttcagtccattttgttttataatctgtcctttatccggtgtttcttctcctgctatcattttaagaagcgttgattttccggtaccgttgatccctacgatcccgattttatctcctttttgaattccgaatgacgcatcgtcaaatattattttctcaccgtatattttatagagatgttccacatttataatattcataaaaaactccttgcaaaccattttctctcattcattttgagatgtctgcaaggagttgtcaagtagattttacctatgcttttttattatttttatgattatctattgtttctcttttattcgttttcaatctttacattccggcaaaccgtcgatttataccgaattttatttaccaaaacaataataagactgacaatgagcaaaaagtagaaattaattcctctgcttacaagcatggacggtataagatatgtaccggtaaatacatgggcaaacacagtttgatacatcagctctgtaattccctgcgctcccggaagcggaagcatatctaccgctatatagactgcggcttgaagaaggataactttcatcattccggttccgtgcagcccgaatccaaggtataccatatatgtcaaaagaaatacgctacatctttgtaaaaatgtaacaagcacaataaacaaaagctttcctttatgtgtcctaagccatgaaactgcgttttgataacttccgataaactcgtgaattttttcaggacgcttttcagaaggtttcaaaatgctcattttaacaaacagcttttcaaaaaaaagcgcacatcgcagcataatattcggcatcaacataattcccgctatgaccacaactaaaattacatttaataaaagtccgaaaagatagagagggaaaaatttccctaactccgaatagagaggccggtaccaaaataataaaatcgccgctcctaaaattacaagtacaaatttataaacaacagcaactgtcataagcacaaccgtactgtccgatcctctgttcccgtctttgctcatataatagagctgcacaggctgtcctcctgttgcagacggcgtaatgccagaatagaaaaatccgataaaagagtattggatacaacgaatcaaagaacttccttcttttcttcggtttgctttcattgcctgaagcagataccagatcatatatccttctgcgcatacaaaaaagatagcaagagcagccgccggaaccaagtatcctactgacatttttgaaacggcatttgcaatttcaccaagatttttcccactgaaaagtgtataaaacgtcaaaaacattacaagtaagaaaatcgttacttcaagaattcgtttcttaacgctcataccttctcctccgtccttttctttcttcttcccggacattatgtacatgcgccattgttatataatttcccgcagcagatagatatgccgggcgggatatcggcggaaaagtaagtgttccatactccggatatgtctttttctctctttcggtaagttctctcaaactaccttcaaaaattttctgtttccccttatattcataaaaatcctttggcgtaacaagcgaaaaatgcttgttccatgtacagacgcctgccttttcaagcaactcggcagcataggaagaacatgtgtaatgatttttttgataaaacggttttccgaaaagtaaaaacggaagtccgagaattgtataatgatagcgatatctgttcttcatcgcctcatgaagctcctctttaataaactgcttttgttcttgagtgcatggaattgagcagatcatataatccgctcccggaaatgcccgcaaaatttttcttttctcttctttttcaaatcctgcaatcagaggaatcgacggatgtctccttccgatactgtatgcttcatccagattctcatcaagcccgattgccacatgaatatatttttgtttaattactcttcgaataatcgaagcaaaaattcccggtgtatctacaaatgctatgtatatttctgtcatattagttcatcctttccccctgtaatgtaaatcttccggattaacaatacatttttccttttgtcttttttaccgatcatcgttctttattgaaagcgatatactttttttgcaagacgatatcccccgattgtcaagcttgtgccgatctttccgggtaaatatgtaaaaccgctcaaagtacgaaagcgaagccgatagtaaagagcttcattatactcttttacatgattccacatatcttttcgctttttataggaatcggctgtatcgataaggagcagatggatagatgaaattgtaagcataattgaaatatttcgcaccatgtatgcttctaatttcggatggattttctttacttccgccagatcaacgctgcgggttacaagatctgttaccaagatctgctgatcgatccttttcataagcaccttttcatttacagattgatcatctctgcccaggtaataatgatacagatcgatgtccatataataaatagtctcggcgtacggaagcggcttatatgaaaacagattatctacataaaatgtatgctccggcagtttcacttcagattctctgagcactttcgtctgaaacatgagcgagtgcatgatcaaatattgggacggataaaactttccgatttcatcccatgtgcactgtttttcaatcggaaatacatttttgtaatccattgatttttttattccttcatcaaggtgatcgtatacataattacatacgatcagatccggacgctcgcctgtaaacgcttttagcttgacaagaagtttctgatatgattctttatcaaaccagtcatccgaatctacgactttataataaataccgtttgccaactcgagtcctttattcacaccggaaccatgtcccccgttttccttatgcacaacacgtacaatatccgggtattcaatctcatattcatcggcaatctgtgcagtacgatcagaagaaccgtcatcgatcagaataatttctacatctttccctccgataagaagagaatccacacatcttctcatataattttcagaattataacacggaactgcaaacgtaatgtatttcatataacttttcctcctcagtgtgttccatatgctcctaacgggctgaaacacagcgttttttcatctctcatttcttaatgctattatttacagcctaaataatacttgacccttcttaagataacatcgaggtatttcttaagatttgggaaagatttttaaaacaatatgaaaatatagaagaaatcattccaatcggcataatgatcaaaacaataaataagatcatcagccatccgatcagccgtccgacaattctgctcacagacaatttcatctcattttacctcctaaatatctgtatgtatttattgtagaaaaaagaaaaattttttccacatggattgtcttacatttccaagcatgcatcttacactttcgtaaggcgcataaagaacaatgaaaaatttcttaaattctcttttatcacttgtatctcttttggaaaagttataacataaggaaataattttatatcagcttatccaaaaaaggagttttattttatgagaaaaaatcctgaatttgaagagttatttgatgatgattttgaagtgacatatgaggaatacgttccaaatgaatataggtcaagtaacgacatctataacgactatgatgatgatgacgattattatgatgacgattattatgatgatgactatgaagatgaatactacgaaagtgatgatgaaaacagtgactatgatcacaccgatcccgatgaccgtaccaaaaagaaaaaacgaagaaaaaattctaaaatacctctggctgcacctatcagaaaaggaggacgtatcctttccaacatttccgcttctctgatccgcagcctgacggctcttttaattttagctgtcatgatattcgcctcttggacatttctccgtgcaagtgcgccctacggagatattatggaagctgttaatacaaaaaccgttcctctctcacttgccgcatacttatctgttgcgcttatttttcttttaagcgaatttattgcacttctctggtctatgacgaaagtaagagttcgagatcaatggggagttcacaaagaagataccggcagaggactgaattctttcttacttgtatttctcacctcctatgctgcattctggatcaatcggtttcttcccgaaactccggatatcatctatggactaaagggcggacttgaagtatacggttctatgcataatgttttattcggactttgtgcagcggggatcatctcctgcctgatccgcaaatacctttaaaatattccacagcagaaaatagcaaaaggtttttctatatcggacgctcgattcggatcttcacaagatctgccgagcgttttttcagattctttttatatcccatccctttgtaccgtttgatctgacacacagttcttcccatttgatccgatacctgttcttcagtcgcaccatatgcaaacaaattaaacgcacagcaatttctcactgcttctgcgctgtaagatggaatttttgccttttcacaatacttcttcatcattcggctgatatacatcgtattcagaggatttttgctccgattataaaaaagggatcttccttcttcccattcttccaaataagaaaacaaaatttcttttgcatcttccggtatataacacggctcttgccttccttttaaaaacacatacaatccgtcgccatactgtacaaaatcttccggccctttcaatgctataatttccgtagaggacagtcctgccctatacattaaagttaagatcgtatacaccatatgattttccgccgatgctgtcaacaatcgatctatatgctccaaaggaatcatcctcgccaactctttttcctttaccagttgtttcaaatacggttcaaaatagtctttaaacgaacttgtttttgactcatcttctaatctgtcgctccactcttctaacaaaaattttgaaaaagaatgaagttccctgaatttttttgtcactgtcaatggaccgatctgtccattttttatctttttttgcatatagatataatatttctgtacatccgaaaaatctgtttcctgaaaacacttttccgtaaagcgacaaaattctgacagatcggatttatatgatgctgctgtaacatcacttttaaatttcttgcaaaataattcccatacttctttttttatacaacttttaaaaaaatcaaattttttatttttcgtattgacaaattttgattctgcgttttggctcatcagtttatctcccccgccttgtttgtgtcaagctttttaaatgttattagttttattcatactataacattttatttcttttttaacaagcagcattttaatatgctactcgtcaaattccaatactgcaatatgaaactgcggcgtttcttttaattctttcacaattcctcttctggtttttaaccgctctgcctgtttgaaattagcgctcatcccgagtgcgtgctcgatcgtgtagtaataagacgtcggaaggactccttctgtcactcccacttccatccccggctttaaagcttctgtgtcttcaatcgtaaactccatttcgcgcatacttttctccactcctctcttctatgactgtgcgattcaaatatgacagcttccattcgctgcgctgctgtttttcttttcgtttatcagtatatcataaaacaaaacttttgaaagctcttcttcggcagtcttagactttaacgaccactgttgaaaaaaactgtactgcaaacgaatttcatatctatttgcaatacagtttcttttttatcattcttcttattttatatcaaattcaggatgttcatctaaatgttccgatacatattttccgtttttctttctctgccttacacactcggtcagcaaatattcaatctgcccgttgactgagcgaaaatcatcttctgcccaagctgccacggcatcatacaattttgcagaaagccgaagcggaatctgtttctttttctgatctgccatgatcaatacaaacttcccgaatttacaataggctgcgcatctttgttgccgcacaagacgacaagaagatttgaaaccattgcagcttttctttcttcatccagttctacaactttcttttcgctgagacgatcaagcgccatttctaccattccgaccgctccatctacaatcatttttcttgcgtctataatagccgatgcctgctgtctttgaagcatcactgccgcaatctccggcgcataggcaagatatgtgattcttgcttccagaatttccagacctgcctcacttactcttttttgaatctcatcacgaattcttgcagccactacctcgctggagcctctcagacttccctcgtctgctacaccatcgccggttgtatctacattcggagaaacatcatacggataaacacgtacaatattcctaagagctgtatcacactgaagagaaagatattctttataattatctacgttaaaaaccgcttttgacgtatctacaactcgccacatcaccgcaataccgatttctaccggatttccgagacaatcgttaatcttttgacggctgttgttcaaagtcataatctttaaagaaatcttctttcctgccgattccaaaccggatttttccgaagtgcctgccaataatcctgaaagtgaagattttcttgtactgttgtcaacatcaccactttgatttagatgtgtatccgccgccggatttacacttgtacaaaacggatttaccgcataaaatccttctcctttcaatgtgcctgtatattttccgaacaatgtcaacacaagcgcttcttgaggtttcagcacacgcagtccacaatacggaaaccagcctacacacatccaaaaaatactgatcccgagcagcaacggatttccgatcatagctcccacaacgcagactgcgattgacaatagatacaacaatgttgttagaatcaagacaagcattccgtttttcttattattcagtactttttctttcatcattatccctcctgttcttgtttgatatcattatgatatcattttgtttgtattttgtaaatagtaattcaaatattttattttttgagtattgacaaaacattcttccgtacatatactatactcaaagctagttagttactcaactaacaaactaatgcacaaggtggtgatacgatgcatatcaatcctaatatagaaaaacctatttttattcaaatagctgagcagcttgaagactccatttttacaaaagtgtttcctgaagaaacaaaaatcccttcgacaaatgaactctcctctttattgaatattaatcctcatactgtcttaaaaggaatgaatcttttagtagacgaggaaatcatatacaagaaaagagggttgggcatgtttgtaaaaaagggagcagtcaataaaatcctattaaaacggcaaagtcagttttacgaacaatacgttgctgcattgattcaagaggcatccaaactgcatatgaaaaaagaagaaattatttcattaatagaaaggggttttgaacatgaacaaaattcagattaaaaatatcacaaaaaaatataataatttaacagcccttgacgatgtttcattttcctttgagttcggaaaaatttacggccttttggggcgaaacggagcgggcaaatctacacttatcaatataatcgcaaatcgtatttttgccgacgaaggaatgattcttgtagatgacattccggcaaaagaaaatatgcaggtacacgaaaaagtgttttgtatgagcgaagctgatttatatgataaagatttaaaaataaaagaacacttcaggtggatcaatcggttttatgattgttttgatttaaataaggccttgactattgccaaaatgtttgaccttgacatcaacaaaaaattcagatcgttatctaaaggttaccaatccatttttaaattaacagcggcattgtcattaaatattccttatgtaatctttgacgaaccagtcttaggattagatgcaaatcatagagaactgttttatgaactgcttttacaagattttgaaaataatgaacgaacaatcattatcgctacacacttgattgaagaagtaacaaatattattgaagaagttgttttgatcgatcacggaaagattatattacaagatactgttgagagtcttttagaaacaggatacagtgtctcaggaatctctcacgaagttgatcagtattgctcagataaaaacgtgatcgggcatgacgaattaggcaatatgaaaatcgcctatatattagataacaaaacgtccatccccccggacagcagccttcatttttcatccatgaatttacaaaaattattcgtaaaattgacagagaaaggcggaaaatagtatgaataaattaaaatcaatcatccaatacgaatgcatgacctcttttaaatatatatggatcttctacgcaatccaatatgcaatcgtcggacttatcactctgatcatcggcattgtctccggaagctttgaaaatgtcggaacaaattgtttggaaatcaatactttgtttttcgtaagcattttgggcgccttagggtttaaagaagattttaaaacacttatacaaaacggatttacacgtaaatatattttcattgcggcgctttctttatttagttttatgtccggaatcatggcatttatagatacagtcgtaggaaattttcttcattattttaataaggattatacatccctatacagcggaatctacggctatgacaatatagtgatgaactggctctggctcttccttgtgtatgtaatgttttgttgtcttctatatttaacgatacttataatcaataaaataggcaaaaccatgtctatctattgcggcattcttttcatcggatgcatagtgcttatcactgcattattcagatatgtattttccgctgaactggtaaaaaatattttaaatttctttatgaaagcagccggttttgtgaagggcgatacaattaactacttctatccctctttctctttattactcattatcggcattttaggaactacatcttttgtggtcattagacgaaccgaactcaaataatctgtctgcagcaagaacgctgatacctaaagttacgtactgcctcgcatgtactacacggcagaattaaaggctgtcgcagaacattacgaactgcgatagcccttagttttacagtgataaagaagtatttataataatttattactaacgctgacagacaggtttgtagaacaaacaagttctttctccttaaaccatgtcggtaaaatagtggatatcctagcaatctcaccattacgaaaaatggcaaaacggtgaaagtttttcgtgttatcgtagaacgctgccaaatcacaatattttaaaacatcttttaaatttttgaatgtctctacataacgtctttcaatatcttcttctgaaattccatgtccacccttatttatccttattttcactctttcttttacaatctcatcagtgtttatgcgtggcattccttttaattcatttaatgcttcataaagggttgacttacctgcaccattgacaccggctagtatacagtttccaatggggtcagtcaaatataacgagcctgtctacccttgtattgtctggcattgtaactctgtagagtggagatgtcaaaatctctagtttaaaaaggggcaacccatcataaactcaagtgtggcttacatgtgtcttgccgatacaaaaagagcttcccaagccaaactacgacttgaaaagccccataaaatcaaggttttttgcacctatcttagaatttaccttcttttgctgcttcctcgatggaaactgtcgccctttattttaaagggtt

SEQ ID NO: 7633 - DNA, 24005 bp, Unknown
  gut microbiota DNA sequence
acatgtattgtaatcctacactttaaaattttaaacgatttaagaggcgcttgaaaaaagaaaagttctatgctattatgaaaaagtattatcggcagataatgaaagaataagatgagaatttgcaggaggtattatcatgaaaaaatatgtgtgtgacgtatgtggatacatttatgatgaagaaatcggcgatccggataacggagttgaagcaggaacaaaatgggaagacgttccggaagatttcctctgtccgctttgcggagtaggaaaagatgagttttccgaagtagagtaatcataaacggcagagacataaaaacgaggaaaggcggttctcggaaagtgattcccggagaacggtctttctttttgtgctgtcgcgtatacgtcaagtgatattgaaaaatgtttttgcatattttgacctctgaattttaataaagaaactaaaaaagagaaaaataaaaacaatgagaaaaacaacaaaaaagaaagggaaaagaaaatgagcagatatgatgtgattattatcggcgccggaccgggaggaatctttgcggcatatgaacttgcaaaaaaagcgccggaactaaaagtcgctgtatttgaagcggggaattctcttgagaaaagaaaatgcccgatagacggaaagaagataaaaagctgtattaactgtaaaacttgtgcgatcatgagcggttttggaggcgcaggggcattttcagacggaaaatataacattacaaatgatttcggcggtacactgtatgaatatatcggtaaagatactgcgatcgaccttatgaaatacgtcgatgagatcaatcttgcctacggcggagagggaacaaagatgtattctactgcgggaacggatattaaaaaactttgtattcaaaatgaactgaagttattagatgcttctgtgcggcatttgggaacagatatcaattatattgtattggaaaatctatataaagagctgaaagaaaaagtagaattccggtttaattatcgtgtggatgaactggaggcggttgacggcggctatcgtgtgataagcggggacagtacagacgagtgtgaggagtgtattatttccgtaggaagaagcggaagcaaatggatggagaaagtgtgcgaaagtcttgatatcgagacaaactcaaacagggtggatctaggtgtaagagttgaacttccggcagtgatcttctcccatctgacagatgaactgtatgaaagtaaaattgtgtatcgtacggaaaagtttgaagataaggtaagaacattttgcatgaatccctacggtattgttgtaaatgagaatacaaacggaattgtgacagtaaacggtcatagttatgaagatccgaagaagcagacggaaaatacaaattttgctcttcttgtggcgaaacatttttcggaaccgtttaaagacagcaatggatatggagaaagcatagcacgcttatccaatatgctcggcggaggcgtgatcgtgcagcgcttcggagatctgacaagaggaaggcgaagtacggcaaaacgtattgaagaaggattcgtgcgcccgacactgtcagcggagccgggagatttaagtcttgttcttccgaaacgtattttagacggaatcattgagatgatctatgctcttgataagattgcgcctggtacggcgaatgacgatacgcttctctatggtgtggaagtgaagttttataatatggaagtgaagttagatgagcatcttgagacaaatcacaaaggattatatgtgatcggggatggaagcggagtgactcactctttgtcccatgcttctgccagcggagtttacgttgcgcgtagtatcgcaaaaaggaagtaagagattatgataaaattacttgcaatcgatatggacggaacatgtttagatcagagaagccgtatgacggacagaacgctggatgtactgcgaaaagctgcgaaagccgggattacggttgttccgtgtacgggacgaaatttagggtgtattccgcacaggctggcggcaggtgtgctaagggagagcaaaaccgaagatgacgaaaaaaacaaagatctgtttcgttatgtgatcacttcaaacggagctatggtgacagatgtaaaagaaaagaagacattgttcagggctctgataaaaaaagaagatgcgctttcgatcctttccgactgccgaaaagaaaaattcggcattgcggcgcatgtaagacaccgctattttgctcagggaaagctttttacttcggcaggccgcattgtttacgggaaagatgcagcggcggtttgctgcgtgagaaacatggaagaaattctttcaaaaagtgattgtgatgtagaagaacttcagttttattttcctacgtcaaaagaaaaggaaaaattaaaagagatcctttcggtgtatcctcaggtgaaagctgcgtataccgggatttatgccgaaatattttcaaaagatgcgtccaaggggaatggcctgaaagcgctttctgctcatcttggcatagagaaagaggagattgcctgcatcggagacggggaaaatgattcattcatgtttgaagaatccggtttaaaaattgctatgggaaatgcagaggaaatgttgaaacaacgagcagattatgtaacgtcgtcgaatcgccatgacggagctgcggaggcgattgaaaaatatatcttatgaaaagttggttctatagttggatcagggttcaggcggcagttttttatcgcctgaaccctgaactggcttattttacgtttaaaatagatttgacatgttcgatttcctgcatagatgctttttcggcaggaacataataacttttttcccgtgcggcagtgtacattttttcctgtgccatctcacactgattgcggatctgttttaagcattgttttaattctttgttttctgtctgtgggatcatatctccgaacattttcagttcaccgttaattcctacaagagcatctgaaaccattgtcttttcatccattgtgttcacctcgttctgtaatgattttgattgtttgtctcatgaaaattgtggaagattacaggaatttcatcagttcctgtttatttttcatagcggaatcagccgcttcctgaaaaagctttttgatttccggatcttcggcttttgaagcataatctgtcattttacagtgggtagtggaatatccgctgataagatgacgaaggttttgaagatcaaggattgatatttctgtcatgaatataacctcctttataaataatatttcaggaaatagtatgtccggaatctttgctgtttataagtgaatgtgcaataaattcatggaaaagagaacgcatttcaggcgaggtgcgatacatgcactcgggatgccattgaactccgagggcgaaaggatgtccggaaagttcgattgcctcaatgacgccgtccggggaacgggcgctgacacagacgtttctcccgggtgttttgacagattgatggtggaaactgttcacataaatgcacgagcctacaaattgtttgagctttgagcaacgttcgattttgatgcggtggctgacatctcctctggatgcggactgctgtgtgtggttgagcgtcggctgtgggataagggaaagatcctgccagattgttccgccgcaggaaacatttaaaatctgcattcctctgcagattgcaaggacaggttttcgggaagccagaacgcgcttcatgagacggatttgaaaaaggtctaccgtaatgtctgtttttccgtttccgttttgcggttcttctccgaataaaagaggggtgatatcttcgcctccgcaaaagagaaatccgtcgcataaacttacatagtcatcgatcatcctgtcgcttcgtacaagagggatgaggagagggattcctttggcgtaacggacggattgaatataaacatttggtacaaactgccgattctcattgaatccgcatatgatgatgccgattttaggatgcatatagtctccttttgatgtattattttgcagaaggccgccgattgtactgcgcttgtgctatagtcagaatatgtaaaaagagaactgcttatacataagagaagaaaataaaaatttgaaaagaggaaaagctatgagatggatcgatatgcactgcgatacggtgagcgagatttataaaaacagaaaaggaacgctgatgaaaaatacattgtgcgtagatatggaacggcttgaaagagcgggagcgcagatgcagttttttgcgtgttttgtaaatttaaaagattacagaacagatctgcggtatgcagatgaaaagaaaacaaagaatccgggtatctatatacaaaatgcagatggaacaggtgaagataaggaaagtgaagacagagcatataaggcggttcgccggatgatctcatatgccaaggaagaaatagacagatgtaatcaggcggatcggaaaataaaacaacaaaatacatgttttttgaaccctgtgctgacggtagaagaaggcggtgtccttggaggaaaaacagagcggatcgatgaattgtatgaagaaggcgtccgtctgatgacgttgacatggaattatgaaaattgtatcggcagtccaaacagtgctaatagaaaagtgatgagaaaagggctgaaaccatttggaatagaaactgtcaggagaatgaatgagcttggcatgattgtggatgtgtcacatttgtcggacggaggtttttatgactgcgttaagtacagtgaatttccgatcgtggcatctcattcaaacgcaagatctctttgcctgcatccgcggaatctgacagatgaaatgctccgccttcttggaaacaaaggaggagtggcaggagtgaatttttattctgcatttttaagaaaagaaggaagagcggaaatttctgatattgtaaaacatattttgtacatgatcgataaagccggagaagatgcggttgcgcttgggacggatttcgacgggttttcaaaagaagcgcttccgggagagattcgggatgtggaagatatgtggaaattgtgggaaaggctggaacgcgcgggattgacggggagacagattgaaaaatttgcatccggaaacattttgcgggttatgaatgacgtgttgcggaaaaagtaaaattaaagaaaacttaggattttgtttaaagaaaagaaagctgtttgcggatatactttacgctgtgaagaaaaaacagtaagagggcgataaaatgcggaaagaaagctttgacagaaagaatgaaaagtacggtgcagacagaagattccgaacacatcccgcagacagaacaaaacggcggaacgtcgacggaagatatgaagagcaaaagcctaagaaacgaaatgcagatcggggcagagtaaacgaaagcagaagaataaaaaaacttcggaagaggaaaaaagcaagatttctgagaaaagcagtggcagcagtattttgcgtagctgcggtcatagcggcagtactttttctgaaagaacgatttttggatgaaaattacagagcaggaggcttaggtcaggcagtcaatggatttctgaaagaaggaaaagaaatgtataaagcaaaagaggcttatcagtctattgacaaaaccgatgagaatgcggatactctcaaagatctccttgataaaaatcctgaaacttgggaatttgtaaaaaattattctaaaatgaaagatgcttctccggcagatacgatcggggaagtggctgcaggagagattccgctcctgttacagtgggatgaaagatggggatattctgtttatggagataatatgatcgcagtcaacggatgtggaccgacggcggtcgctatggttgtttccggactgctttgtgatccgtccgtcacaccgtataaggtggcaaagtttgcagaggaacaaggatattatgcgggagagtcgggaacaagctggacgcttatgtcggaaggtgttcagtcgttcggaatatggggcgaagagcttggtctaagccggtcggaagtattttcggcattggaaagcggctgtccgatcatatgtagtatgcggcccggagactttacgacgacaggacactttattgtgcttacgaaggtcgaaaacggaaaaataaaagtgaatgatccgaacagcaggatcagaagcgggcagctatgggattatgaaagactggaaccgcagattcagaacttatgggcattctcgaggatgtagagagaatgaatagaaagacagcgttttgctttgaaaatattaaagcaagacgctgtccgattttatgacataaacaaattgtcgtatggataaattttatttctcgagttcctgcattttcattgcacggacttttaacggaagaccgaacaggttgataaatccttctgcatcgtggtgatcgtacaattcgccagttgtaaagcttgcgagggattcgctgtacagagagtacggagatgtttcgcctgctttgatgatgtttcctttatataatttgaattttacttcacctgtcacatattgctgtgtaacatcgataaatgcctgaattgcttcacgaagcggtgtaaaccattttccttcgtatacaatctgtgcaaatttattgccgagatcttttttgacttcgtatgtagcacgatcgagaacaagttcttcgagttgttcgtgagcagccataaggatcgttccgcccggtgtctcgtatacgccgcgtgatttcattccgacaacgcggttctcgacaatatcaacgatgccgacaccgtgttttccgccaagtgcattcagttcggtaatgatttcggaaactttcatttcctttccgttcagagttttcggaacgccggcttcaaatgtcattgtcacgtactcgccttcgtcaggagctttttccggagttacgccaagaacgagcagatcatcgtaattcggttcgtttgcaggatcttctaattccagtccttcgtggctgatgtgccataagtttcggtcgcggctatagctgtgttttgcgtcaaacggaagatcgattccgtgctgtttacagtattcaatctcttcttcacgagactgcattgtccaaacgtcagtcattctccacggagcaatgatcttcagatccggtgcgagcgctttgattccgagctcaaagcggatctggtcgtttccttttcctgttgcaccgtgacaaatagctgtcgcgccctctttacgtgctatttcaacaagtctttttgcaatgaccggacgtgccatcgacgtaccgagaagatatttattctcataaacggcgccggctttcacgcacggcattacataatcgtcgcaaaattcatcgatgatattttcaatatataatttggaagcgcctgaaagtttagctctttcttccagtccgtccagttcttcgccttgtccgcagtcgatgcagcagcaaactacatcatagtcaaaattttctttcagccatggaatgattgctgtcgtatcaagacctcctgaatatgcaagtataactttttctttgctcattttaattgcctcctgaaatatatttttcttatttaaaagtttgtttttgctttaactatccatactatacacctgattttataaatatgcaatagaaaaatgaaaaattaaataaaaatgcataaaatatacaatagatgcataaaaatgcaaaaatggagtggtaaatatacaaaagatcacaagtagtattataaaaatgtaaaaatagggagattcagaggcggaatttgtgtttcttctatattaaatgtgaaaaaatgtaaaacaaaagaggttgattgtaacttttgtgataaaaaaataaaaaaagcataactttttcattaaaattatctaatgcaaaaatgcaaatggataaataaaaagtgcaaactaatcaggcgggaatttggtataataaacttcgtaagcagatttactctttaagtgttttattttcttaaagagagcttgttgaaacggcatgaggaaaggggctttgacctgtccgatgaatgctaatcttaataaggaaggaggacacgaaaaatgccagatattcgattgacaagaattgacaatcgtctgattcatggtcaggtggcaacacagtggtgtggcgttgtaggcgcgaacttgttgcttgttgcgaatgatgcggttgccgcggatgaattccgtcaaggtttgatgaacatggctgctccggcttatgcgcagacacgtttcttcacaatcgagaagacaatcaatatcatccacaaagcttctgcaaatcagcatattgcaattatctgcgaatctccgcaggatgtgcttaagctcgtagagggcggcgtaccgatcaaaaaattaaatatcggtaatatgcacatggctgagggtaaacgtcaggtggcaacttcggttgcagttgatgacgacgatgttgcaacatttagaaagttgcaggatctcggtgtggaactggaaatcaaacgagttcctgatacaccggcagaaagtacagaaaaattattcaaatgataattaagttttatcggttaattggaaaggagtaaacatgggagatatttcaatcatccaagctcttctggtcttcgtagtagcctttatcatgggtattgaccagttcagcttcttagagtccctgtaccagccgatcgttacttgcccgattatcggagcaatccttggtaactttgagcttggtatcgtagtaggtggtgcttaccagcttattcagatcggaagtatgccgatcggtggagcacagccgccaaacgcaattcttggtggtattatggcaactattttcgcagtttcacttgacatggaagctacagcagacggtgtaggcgcagcaatgggtcttgcaattccgttcgcagtattcggacagtatgcagttacactgacatttacatttatgtccggtatgatggctaaagctgacaagtacgctgaggaagctaatgttaaaggtatccgcaacatcaacttccttgagatggcagtacttggatgtctgttcggagttcttgcagtagcaggactttacggcggaacagctcttggtgaaacactgaaagacttctcttaccagttctcatgggtaatggcaggtctggatgcagcaggcggcgctatgaagttcgttggatttgctatcctgatgaaagttatgatgtccggagaaatgtggggattccttcttgcaggtttcgcaatggcacttatttgtgcagcaaacgcatcaacagcaggagcaacacttctcctttgtgcattcgtaggtgcagctattgcaatctatgacttcacaacacagacaaagatcaaacagaatgccggcgcaggagcaggctttgtaggaggtgaccaggatggcatataatattccagagaaatatcaggatttgactccggcaccacagctggataaaaaaactttgaacaaaatggtttggctgtcctgtttcttacaggcatccttcaactatgaaagaatgcaggcttgtggatggctttggggaatgcttccgggtcttcagaaaatacatacaaacaaagaagaccttaaagcttccatggcacacaaccttgactttttgaacactcacccgttcctcgtaacatttgtaatgggtattgttctttcacttgagcagaacaaggctgatacagctacaatccgttccgtacgtatttccgcagcaggaccgctcggtggtatcggtgacgctcttttctggctgacacttgttccgatcacagcaggtttgacagcaaacatggcgatggaaggacagattatcggtgcggttctcttccttatcatcttcaacgctgttcagtttgcagttcgttttggtcttatgtactggtcttacggacttggtacaaaagcagttacactgttgacatcaagcgcaaaagagtttactcgtgcagcaagtatccttggtatcttcgttgtaggtggacttattgctaactatggtggaacatcactgcgtatcgttgttggcgatccggcaatcaacattcagggacttcttgacggagtacttccgaaattgattccgttgttgatcacacttggaatttatgttctgatcaaaaaaggctggacaccggttaaatgtatcatccttatccttgtagtaggtatccttggttgtgcattcggtatctggacaggtgattctaaagctatggacgctgacggaaacacaattccgggaggatatacaccgcttgttgagtggtatcagcttccggaggagccggctgaataagtcgattcattatgaaaatgccgatataaatctatatcgggtataagtaaggggagggattttaatccccccccttacattattttacagagaaattaggtggctgtttgaacacaataacaatttttattatattgattgccgctgtcggatatattatttttcagggcatcaaaaattttcaactgcataatatgaatgtcggacttaaaaacaaggacagtgtccttgtggaaaaaacggcagatatgtggatcacgagaaaacttcttggagagtatgtctgtgacctctataaattaagagtgttatatgtgacgaaagacgaagaaaaattcgagaaaatgctcatacatatgctggatacgacatatccgcgtcctgatgataagcaaagctttttggaaacgtattttcatacattcctgatcaaaggtaacaggaaatatgcggactggatcttaaaggaaattaagaaaacaggggacgaggcatttattcattacaacgagaatgcatatgcggtcatgcttgacggcagaacagatctgatcgaggagatggacgaggatatcaattcaaagcggtactatggatttgcactcggagtgatcttggttatgatttcaaagcaatattctgctctgggggatgacaaaaatgcactgatttacatgcagagtgcaaaagcttgtttacatcccaaagctgtttatatgcccgttgtcgatcgttatcttagagaggctgaggctcaggagcaagatagttaaagcaaaatactgcagaaaatgcagacagtaatatagaacaggagagatattatgataggattaatcgttacaggacatgcaaattttggttcgggtatgacaagctctgtgaatttgatcgcaggagagcaggaagcataccgttatgtagattttcttccgacatatggaacagaagaactgacagaagagattgcgaaagcaatggatgagttgaaagattgtgaaggaattattatctttacagatctgatgggtggatcgccgtttaacgttgctgcttcactcggacacggaaaagaaaatgtacgcattgttgcgggtacaaacctgccgatgctcgtagagatcgtaatgtcgcgtaaattcatggacgatctggacggacttgtggagtctgtacttgagacaggaaaagagcaggtaacaaaatatgaattcaagcaggtagtacaggaagagtctgaagacggaatttaaatcgactttttataatggctgatattcgcggaaaagacgatacagccgtaagtctgaatattaactgcatactataaaacacgctgcaaaaagcagcacgaaaggagataaatcatgagtacaatttttggtattacagaagacaaaatgaaagaaacatcttcaacatttacattaacggagatctatcagcagccggcgacatgggagaagacatgccgtcagatcgaggagaacaaagaagaacttcagaaatttatcgatcaggttatcaaatgtgatgatttcgatgtgatccttacaggagcaggaacaagtgaatttgtaggaaatgcattatttgcacatctttccggtctgctgaatcacaaagcaaaatcttacggtacaacagatattgtcgctacgccggaagcatatttgtctcgcacgaaaccgactcttctgatcagtttcggacgttcgggaaattcaccggagtctgtcggagcggtagatgcggcagaaagcgtatgtgataatgtttatcacctttttgtaacatgtaataaaaacggagctctttccaaacgtgcggcagagacacataactgctacgcaatcaatctgacagatgagacacatgatcagagctttgcaatgacatcaagctattctaacatgtatcttgcaacatatctttgcttccacctgaacgagctggaagagacagttgaaaaagttcgcaagatcgcagcagcaggacagaacttccttgacaatcattacagtgtcgctcagcagatcgttgatgaatacaattttgaacgtatcgtatatcttggaagcaacacattaaaaggaacatctcaggaatctgcccttaaaatgcttgaactgacagccggacgtgttgttacaatgtatgacacaccgatgggattccgtcacggaccgaaatcaatcgttgacgatacaacattaacagttgtatatttgagcgatgaagcttatacaagacagtatgaagtggaccttctcaaagaaatgagcggacagagaaaaggaaacaagatcgtagttgttatgagcagtgcagatgaagctgtttcagcacttgcagactacacagttgtatatgacatgaaagaagagaatgaaaacattcttcttggattggattatatcttgtttgcacagacactggcagttcttaaatcactttcacttgatatcacaccggataatccgtgtccgacaggtgaagtaaaccgagttgtaaaaggtgttacactttatccgtatacaagaaaataagactgaccgaaagaattaccggaaatgccaaaaggtatatttcgggattgtaagcggtcgccaaggttttggaaaagtccggactttggtttgtcaccgttacaaaaagaacatggtttgccgaaaggcagaccatgttccgataaggaggataaaatataattatggctattaacagtgaagttatcatatggacttgtgttacagttgcggtacttgtcggcatctgtgcaatcgttctgatcgcaatgtcttcaagaaacatgaagaaaaaccgcgaagcgatgcgcgatctgcaaggtgcaatcaaagttggagcacgcatcatgttcgcgggtggtatttacggaaagatcgttaagatcaaaaacgatgtgatcgatgtggagatcaacaaaagcactgtgatccaaatttcccgatacagcattcaaaacgtaatcacagactaaaatatcattcagatgtgatcagggtttgttttggcggttttggttttcggctgcttttctggcatagtcgcttggcgttgtgttaaaatattttttaaacaacctcgaaaagtagtggatagagctgaaaccgagtctgtatgcgatctcgctgattgtgtattgattctcgcggatcagctctttacttttttgaagtttaatattgagcagatagttctttggcgaggtgttcaggtgagtcttgaacagcgcttgcagagaagaacgtgagataaaaaattcatgacagatgtcttctatcgtgagtggttcggtaagacgcttgttcatgtaagcaagaatctcagacagaaggtcgttttgagccgatttgctgtcagttaagagtgttttatggttcattgtctcatagaactgcatgatcagcaggagaacttcctgaagatagcagaccattaaagtatgagtatagtaggaatgttcttcgctttcgatcaaaagtttccaaaggatctgctgcatttcgcttgtacagtgaaatgtatgattaaggatatgcagagaacgcctgtgatttacttcaaatacgactgtgagatatgagcagccgttttgtacggataagtcggctttgtcagagcggtatatgatcaagtcatgaggctgaagtgtgttcgttccggaagagagggtgatatccagactgccttcgtacacatagatcagttcatatgatttgtgtgcaggctgtacaatgtggcatgctttggactgctttgtaaaccagcaatcaaggattcgccttaagtggaacggtacagatacaggctgatatgtatacggagttgacagtggttttgtaaaatctgtcagttgctgttctttacagcagtttttcccgataaggatattccacgtaagagaagaggccagtggaatcacattaaatgcggtattcggagcaagttttaaattgtgacgcagaggaaatgtttttaactccgtcatgtcaggatctgtagcgataagcaaaagtcccaatccggcggggcattctatatatacttcgcacggaaaaagaaagagagtatctagtttttttgaagatgcagaaaactcccattgatttaaattatgtttttgagtgtcgagcggttcatcataaaacgccccaaaaggttcaaatttatttgttatctgttgatttgtcatgatgggatacctcggttgtaaaaaacgatttgtactttttaaataatacaacattttttaacgaaaatcaagatgtgggatttgtatgtcccgcgaaagacaggaggaattgtaatgattattcaaagtaaaaaagtttggtttgcagatcagtttgtagaagcacagattgaagtgaaagacggaaaaattgtcgatatctatgagtacggaactcatccggtagattgtgattacggagataaccgtattttgccgggattcattgacgtgcactgtcacggagcttacggctttgatacgaatgatgcgaaagaagacggacttcgttactgggtgcgcaatattgtagatgaaggagtgacggctcttcttgcgacaactatcacgcagagtgaagaagtgttgacaaatgccttgaaaaatgtggcgaaagttgttgaagacggttatgaaggagcagagattttaggagttcactttgaaggtccgtatcttgatatgaagtacaagggagcacagccggaacagtacattgtaaaacctacggtagagcagtttaagaaatatcaggaagcggcaaatggattaataaaatatattacgatggcaacagagacagatgatgatttcgcattgacacgttactgtgcggaaaacggggtagttgtgagtatcggacattcggcggcaacgagcaaagaagcggtacaggcatttgcccatggcgcaagatcgatgacacatgtatataacggaatgacaccgtttaatcaccgtgcgaacggacttgtaggcgctgcatatagaatgaagagcatgtatggcgagattatttgcgacggcaatcattcaacaccgttagcgctccatcagttctttgaagcaaaaggacctcattacggaatcatggtcagtgatgcgcttatggcaaaaggatcaccggcaggatcgaaatttattttcggaggaaacgagattgagatttatgaagacggaagcgcacatctgacgtcttcaaaaggtttggcgggatcgactcttcatatcaatgaaggactgcgtattctgatcgaagaagcgcttgttccggtagatacggcaattaactcatgtacaaagaacccggctgcctgcctgaagatcgatgatcgcaaaggttctattaaagtgggattggatgcggaccttgttgttcttgaccgtgattatcaggtacttcagacatattgcatgggaaaagcaatgttagataaaaactagaaaatgaaagattgtggaatgattaaaaatggctaagaaaaaatcgaaaccggtggagaagatccgcctttcaggaagaaatatttatacagataaaaaaggacgggttattttttacgatatgattaccaaaaaagggtatctcgtagataaaaaacatgaaaactcggctctgttttttaaaaaccgttttgttgtacttttgtttgcggcaattttgtttggggcaacgtttttgacatggcttcaggctgcggttgcctgggcagtgatgatggcgattgcggaatttgcttttcggcggggatttttgaaaaagctggaagtggtaaacgatgtggattttgaacgtcgtgtttcagcgcttcaatacatcgtggaaaacaaagcaaaaggaaaagtgatcgttcttattgttttgtatctccttttagcagtgcttgtaatattaaatgcatatgtagaaaagtattctgttgggttatgcgtactcagcggaggaatcgcacttgtcggtgtgtactttgcgattttgcatatcgttgctctgactaaaatgaaataaatgtagagaagatgaacataaaaatacagaccggagaagtttgaaatctccggtctgtatttttatgtttttgcaaaggagaagcttatgattaagcctgtccttcagatccgcatacgctgattttttcttttacgagagctgtaacattttccatacctgcagctccgtattttttcggatcgaaaccgtccggattttccgcaaggtattttttcacaccgtcgctgtatgcgatacgaagttctgtagcaaagtttactttacagataccaaggcggatggattcgcgtactgcgtcgtccggtacgccggaagctccgtgaagtacaagcggaatagacacaacttcgcggattgccgcaaggcgttcaaaatcaagttttggtgtgccctgatacagaccgtgtgctgttccgattgcaactgcaagtgaagttgcgtttgtacgttctgcaaactcttttgcctgctgaggatctgtatacggagaatcattctctgcttcaaggtcatcttctttaccgccgactttaccgagttcagcttctacgctgatctgagaaggaagacatgcgtctgccactctgcgtgtcagggcaacattctcttcaaaagagccgtgagaaccatcgatcatgatagaagtatatcctgtgcgaagagcctgcattgccaactcaaagctgctgccatggtcaagatggatcgctaccggaacgcttgcgcgctcagccgctgttcttaccattgcaagataataatcaagtcctgcatattttactgtggatggagtcgtctgcatgatgaccggggagttcatctcttcggctgctttaataaccgccatgaccatttccatattttccacgttgaatgcgcctactgcgtaatgtcctgcctgcgcttttttcagcatttcatttgttgtaactaatggcataatatcaacctcgattctttagaatttaatgtaatgattacattattattaattattttcggtataagtatagcacagaacatgtgatttcgcattttcattttgcactttcttaaaaaatgcaaatgattgtttaattaatccaaagtaggcgcaaattgaaagtgctacgataaatataacaaagcaaattgaaaaggagagtttatcatgcgtcaaaatccattaaaaaaaattgttgaattgcagaaacagggtaaaaatgtcggaatctattctgtgtgcagcgctaacggatatgttatcgaggcggcatttaaaagaggactttcagacggatcctgtgttttgattgagagtacggcaaaccagtgtgatcaaaacggcggatatacaggtatgacacctgccgattttaaaaaatttgttcttgaaattgctgatcgtaacggatttgaccgtaacagaatcttccttggaggagatcacttaggaccgcttacattcgcgtataaagatgaagcagaggcgatggctgattcggaagaactgatccgtcactatgttgcagcaggatttacaaagatccatatcgatacaagtatgaaagtaaacagcgatccggaagacgttcgtctgtccgacgagatcattgcaggacgcggcgctcatcttgcaaaagttgcggaagagacatataaagagctgttggagcgtgatccggaagcaattccgccggtatatgtaatcggaagtgaagtgccgattccgggaggagctgtcggagcggaagataacggagttcaggtgacgaaagtagaagattttaagaacacagttgcggcatttgagaaagcttttgcaaaagaaggtcttgacaaagatgtatgggagcgtgtaatcggagttgttgttcagccgggtgtagaagaaaaagacagcggatgtacagaatatgatcgtgagaaagcaaaagatctgatggctgcgatcaaagatttcccgacattggtatttgaaggacattctacagattatcaaacaaagatcaaactgcgcgagcttgtagaagacggagtcggcattttgaaagtaggtccgggacttacatttgctatgcgtgaagcaatgttcgcactggaaaatatcgaaaaagagctgatatacggaactgatacagagccgagcaaatttgcggaagttcttgatgcggagatgcttaaaaacgataaaaactggaagaaacattatcagggaacagagcttgagatccgtctgaagagaaaatattctttctcagaccgctgcagatactatatgccgacaccggctgtagaagctgccgcagatcgtctgcttacaaacttgcgtacactcggaattccgctgaacctgctcagccagttcatgccgatccagtatacgaaagtacgtgaaggatacttgaaaaatgatccggtagaactgatcgaagaccgtatcatcaatacgatcgacgagtacctttacggaacacatcagaacgaacttctctaaaaagaagaacagaaaaataacgaagcgtcttggaacaaaaagttttgttccgagacgcttttttgataagagaaaaactcgacagctttgaccttaaagactcgaaagtaagaaacaggctggctttgtgataatatcactgtctcatatatgaaaaatatgttataaattatttaaaaagaaaagaaaacgtacaaagcgaagcaagtacaaaagaaagacggaaagaaaagataaataataaaaagaatggagagaaacatatgggattttcgatagaaaccgggatttcggcttttacagtttttatgcaggggctattaagcttcttttccccttgcgtattgccgttagtaccactttatcttggctatttgtcaggcggtttgaatactgcggtcagaacgggtgaaaacagtgagaagaacaaagatcggctgaaactgtttttaagagttttgttttttaccgtaggcataggaagcgcattttttatactcggtctgggcgcgtcggcggccggaagtttcttccatgagcagaggatgctgtttgccagagtcgggggaatattagtcgtattatttggtctgtatcagcttggagtatttggaagttccaaagttctcggatcagaacatagatttccgattcggcttgaaaaaatgacgatgtcgccgatcacagcttttattatgggattcgcatttagttttgcatggacgccgtgtgtaggccctgcgttgacaagcgttctccttatggctggaagtgcagagtcgggagcgaaaggttttcttttgatcggagtgtatacgatcggatttattttgccgtttttattggcaggcatttttactgcacggcttttagatcttttcaaaaagcatatgaagatcgtccgttatacagtgaaaatcggcggagtactcatggtgctgatgggactgcttatgtttacagggaaaatgaatgatattacaggatatttgtcttcggcagggcagaaaacagaatcgggaaagcaggaaaacggtaaaaagcaggatgaaaaggatgcttcaggaggggatgaagagcagacatccggaaaagatacgtccggagaaaatgcaagtgggaaatcagataaagaggaaaaagatcaggactcggaaaaagtccgtgcacatatgggtgaattaaaagatcagttcggaaaatctcataagttggaggattacaaaggaaaggttatcttcttgaatttctgggcaacgtggtgcggaccatgccgcagcgaaatgccggaaatacagaaactgtatgaagaatacaccgctatggggaatgattcggaagtggtgatcttaggagtcgcgggacccggaatcggacaggaaggaaccgtttcggatattacgaaatttatggaggaaaacggatatacatatccggtacttatggatgaaacgggagaactgttcgagtggtacggaatttcagcatttccgacgacatatatgatcgatcgtgacggaaatttatatggatatgtgacaggacagcttacggaagatattatgagaagcattataaaacagacgttagaaggaaaagcaccgtaaggaaaagataaggaagagacgatggttataatagaaaaagaaaatttttccgtgtcgcagatttgttcttcgggtcagtgtttcagacttgatccggcagatgaaacgggaaaagtatacgaattgacggcgggagaccgatatttaaaaatcgaggtggcggaagatcagaaaaaagtaagattttactgtacacaagaagaatttgaacaattttggaaaacgtattttgacctcgatacatgttatgcagattatctttcgcttataaaagacgatgaatatttaaaaagggcggcaggatttggaagcggtatccgtattttgcagcaggatttatgggaaatgatcgtaacatttattttatcccagcagagcaatataccgaggatcaaatcgatgatacaaagaatcagtgaatggtatggagataaaaaagaaaccggcgaaggacatgtatattatgcatttccgagagcagagcagcttgtacaggtgtccgaagaagaacttcgggcgcttaagctcggttatagaagcaaatatttatgcaatactgcggaaatggtggcagagggaactgttaatcttgaaaaaataaaagagatgtcttatgatgaagcaaagaaagaattgctgaaactttcaggtatcggaagcaaggttgccgattgtatctgtttgtttgcacttcataagctcgatgcatttccggttgatacacatatacaaaaagtaattgacaccgtatatgccgggaagtttccgtttgagaaatataaaggatgtgcgggtgtgatgcagcagtatattttttattatgatctaaaaggaggaaagaaatgatggaaaattttcaatattatgcgccgacaaaagttgtgtttggaaaaggtacggaaaataaagcaggacagcttgtcaaagagcaaaactgccggaaggtgcttattcattacgggagcggaagtgtaaaaagaagcggccttcttgatcggatcttcgcatcgcttgatgaggaagggatctcttatatttctcttggaggcgtcgttccgaaccccagattgtcgcttgtatatgaaggaatcgatctgtgccggcgagagggcgtagattttattctggcagtcggaggcggaagtgtgatcgactcggcgaaagcgattggatacggcgttgagaacgaaggggatgtatgggatttttacgagagaaaacgtcaggcttgcggatgtctgccaatcggagttgtacttacgattgcggcggcaggttcggagatgagtgattcgtctgtgatcacaaatgaaaacgggtggctgaaacggggatacaacagcagttattgcagacctaaattcgcggttatgaatccggaactgacaatgacgcttccgaaatatcagactgcaagcggatgtgtggatatcatgatgcatacgatggagagatattttaatcattgtgacaatatggaactgacggatggaatcagtgaacatctacttcgtacagtgatgaaaaatgcgaaaatcctcatggatgaaccacagtgctataaagcaagggcagaagtaatgtgggcgggaagcctttcacataatggtttgatggcgtgcggaaatgatggcggagactgggcgtgtcatcagcttgaacatgagctcggaggaatgtttgatgtggcgcacggcgcaggacttgcagcggtatggggaagttgggcgcgttacgtttgtgacgctcttccggatcggtttgaacaatttgcggttaatgttatgggcgtggaaaacggtgatgacaaaaatgcagtaatacaaaagggaatcgaagctatggaaaactttttcagacaaatcgaaatgccgacggatcttggcggattaaacattgaagtaagcgaagatcagatgaaggaacttgctttaaagtgcagccatttcggaaagagaacaatcggatgtgtgaaaaaattaaatcaggaagatatttatcgaatctatcaaaaagccgcggactgaacgattacgtttaaagattgttttacgaagaaagggtggcataaaagtgtgataggtgatacaataagaaaaatttgtagtagctagccataataatgcgtactgcctgatgtcgggcgggaagaaaggagcatatgatggaatcatatatggaaatgcttgcaaaccatgcaaaacatgcggctgtcgcagcggcaaaactgggaacagcggagaaaaataaaggactttgcgcagtggcagacgagttgatcatgcagcaggagctgatccttgccgagaatcagaaagatctgaaggcagcagaggaaaaaggtgtgaaacagtctttgatcgaccgattggcgctttctgaaaaaagaattgcagatatggcggaaggactccggcagattgcctctcttgacgatccggtcggagaaatattatcgatgaaagttcgcccgaacggactgcggatcgggcaaaagagagttccgctcggtgttgtgggaatcatctatgagtcaagaccgaatgtgacagcagatgcttttggcctttgttttaagaccggaaatgcagtgatcctgcgtggcggaagcgatgcgatctattcaaatcaggcaatcgtgcgcgtgatcaaagcaggattgcgcaaagaaaaactttgtcaggatcttgttcttcttgttgaggatacaagccgggaagttgtgaatgaaatgatgaagatgcacggtttgatcgatgtgcttatcccgagaggaggcgcaggtttgatcgcaaatgttgtggcaaacagtacggttcctgttattgaaacaggaacgggaaactgtcatgtgtatgtggatgagacggcagatatcagtatggcggcagatattatcgaaaatgcaaagacacagaggatgggagtctgcaacgcatgtgaatcgcttgtaattcacagcggtatgttggaaaaggcgctgctgcctatcgttaaaaagctgagtgaacacgggatcgagatccgtggagatgaaagagttcgtgaaatatgtcctgagatcaaagcggcttcgcaagatgattggggaacggaatatcttgatgcgattatttcggtcaagacagtggattcgattgatgaagcgatcagtcatattaataaatataatacaggacattctgaatcgatcatcacaaatgattataatcatgcgttgaagtttcaggatgagatcgatgcggccgctgtatatgtgaatgcatctacacgttttacagacggttttgagtttggtttcggggctgagatcggtatcagcacacagaagcttcatgcgagaggacctatgggactcgaggcgctgactacaacaaaatatattatatttggaaacggtcagatcagaaaataattatagctgttaaaacaaaaaagagagttagggcgccttccttgagga

SEQ ID NO: 7634 - DNA, 88800 bp, Unknown
  gut microbiota DNA sequence
taaaaatttttttaaaaaaagtgttgacatttgatgaaaaataatagtataatagcgaagcgggttacggaaaagcttctgaaacccaaaacaatatggggtcttagctcagctgggagagcatctgccttacaagcagagggtcataggttcgagccctataggccccataacttacaaatattcggaacattttgttcaagttatggcggaatagctcagttggctagagcacacggttcatacccgtggtgtcgctggttcaaatccagtttccgctactaataaaaactccaagatattttcttggagtttttattatattcttttctttttcatctgttgttatccccctcacccctctgctttttctcacttttgaacataagtctgccccctcctgctctgacaatattaaatgatcatacaaaagcagagcatacactcgcatatgccctgcttttgcattactgactttttacttaaaatattttactccggattcaaaaatcttaagatcctgctctccataaatattaatcgcaacagaattaccccttctttcagagtgagccatttttccaagcactcgaccgtccggacttgtgattccttcaatcgcgtgataagatccattaacattccattcttcatccatcgtaatatgtccttcaggactacaatattgtgtcgccacctgaccattcgcaaacaacttgtcaatccattcttcactcgcaacaaatcgtccttctccatgagacgcaggatttgtatatacgcctccgagttttgcctctgcaagccatggagatttatttgtaaccacttttgtataaaccatcttcgatatatgacgtcctattgtgttatacgtcaaagtcggagaatcatcggtctgtccgacgatctgtccatatggaacgagtccaagcttgatcaaagcctgaaaaccattgcatacgcctaatgcaagtccgtcgcgttcatttagcaatttatctaccgcttctttaatctttgcgtttctaaacgctgttgcaaagaactttgccgatccatcaggttcatctcccgcactaaatccaccggggaacataataatctgcgctttagaaatcgctttttcaaactcttccaccgaagaacggatgtcttctgcatctaagtttctaaacaccttcgtaatcacatttgcaccggctctctcaaaagccctcgcactgtcatactcacagtttgtacccgggaataccggaataaacaccgtaggctgtccgatcttatggctgcacacatgtacggttgaagcatcgtataacttttcctctaccggtatatccgaactttccgctgattttgttgcaaatactttttcaagcggttttgtccatgcatccagcgcatcatccataccgatcttcacatcgccatatgcgaacgccttttcatttgtcacttcaccgatcaaagtatattctcccacaagctcttcaaacgtgtctgctttaacctctgcgacgatatcgccaaatgcaggagcaaaaatcgcatctttatccaaactgctttcaagacatacacccatttgatttccgaatgccattttgctgactgccgaaacaacaccatgtctgtcaagcgcataagccgaaacaactcttccatttctgatatcttctgtaaacttgctatactgttccataatccggctataaacaggaaggtcatactcatcacgagccgctttcagccacacaagcttatttcctgcctctttcaattccggcgtaataatttctttttctactgccatatctacagcaaacgaaaccaaagtcggcggaacatctatatcctgaaatgttccggacatactgtcttttcctccgatcgacggaagtccgaatccgatctgtgccgcataagctccaagaagcgctgcaaaaggctggctccaacgttttggatcttctgacattcttctgaaatattcctgaaacgtaaatctgatcttactgtaatctccacctgccgcaactatcttggcaaccgattcaacaaccgcgtaagctgcgccatgatacggactccaacttgaaagatacgggtcaaatccataactcatcatagacacactgtcagttgttccgttttgcacgggaacctttgctaccatggcctgtgtctctgtcatctgatattttccaccgtgaggcataaagaccgagcctgcgccgattgaaccgtcaaacatctcaacaagtcctttctgagagcagacattcaaatcgcttaatacatccagccatttttccttcacatcacttactgctgttttaacaaataaactttcttcttgacgaggtatttccacttctaccgccgtttcctgatgcgctccattcgtatccaaaaacgctcgggaaagattgacaatctcttttcctctccatacaagaacaagtcttggctcttctgtaacaaccgctacttccgtcgcttccagattctcttctttcgcataggacataaacttctctacatcttttggatctacaacaacagccattctttcctgggattccgaaattgcaatttctgttccgtcgagacctgcatatttcttcggcactttatcaagttcaacccggagaccatctgccagttcgccgattgccacagacactcctcccgcaccgaaatcgttgcattttttaataaggcagcttacctcttcacggcggaataatctttgaatcttacgctctgtaggcgggtttcctttctgaacttccgcaccgcatgtttcgatcgactcttctgtatgcactttagacgaaccggtcgcaccgccacagccgtcacgtcctgtacgtccgccaagcaaaataataatatctcccggatcagaattctcccggattaccgcccttctcggagccgctcccaataccgctcctatttccattctttttgcaacataatcaggatgataaatctcttttacaagacctgtagccaatcctatctgatttccgtaagaactgtagcctgaagccgctcccctaacaagttttttctgcggaagctttccttttaatgtttcttctacagatactgtcggatctgcagctcctgtcactctcattgcctgatatacatatgtacgacctgacagcggatctcgaatcgcaccgccaagacatgtagccgcgccgccaaacggttcgatttccgtcggatgattatgcgtttcatttttaaagttgatcagccactcttcttctacgccgtccactttgatcggaaccacaatactgcatgcattgatttcatctgatttttcctgatcctgaagttttccttcttttttcaatctgcgcattgccatcaacgccagatccatcaggcagacaaacttgtcctctctaccagcgaaaatctcactatgatctttcagatatgctttatatgtatcctcaatcggtttcttataaaaaccttcattaaaagatacttccttcaactctgtcgaaaatgttgtatgacggcaatgatcggaccagtatgtatcaagaactcggatctccgtcatcgtcggatctctatgctcttcatctttataataattgcgaatatgaagaaaatctttaaaagtcattgccagccccaatgaactataaagcttttctagttcgtcttccttcatttctttgaatccttcaaatacgatcacatcttccggatcatcaaaaaccgtcacgagtgtttccggtttttcttctccggcttctcttgaatcaaccggattgatacaatgattctttatcgccgcaaattcttcttccgaaatcgtaccttcgatcacatacgtcgttgccgtatggatcaccggtgtttcatcctctttaataaatcttacacactgttctgccgaatcagctctttgatcaaactgtcccggaagatactctaccgaaaagctgtgatccgcatcagacatattaaatgtctctttataaagaatatctacaggcggttctgcaaataccccctgacatgccttttcaaaagtttcatctgaaatattttccacatcatatcgaatcagcacacgcactcccgtcacatctgtaataccgagataatggcggatttcatgacccagctccttcgcagcaacagcaaactccggcttcttctctacaaatacacgtttcacattactcatatgttgtctcctccatttttaactgaaaacctctgtttgtatcgtaccacacttcacatcattagtataattaatataactaaactttctaataagcaatactaatcatttttcttttttcctgttttttcttttacttttcgactgttttctctccatctcatataaagacttaacagaaaaagtattacaagaatcccggcaaataggcttccgactctgaatgccatatcataaaaaagaccttcgggaagcattcggatcataaaatcttccgccggatcaaacagccaaagatcattgtcaaaaaagatattatgaaactgtacaaatactgaattaaaatcaatcgccgcggcaattccgatccctgctgtcgggatcaaaacaatccccactgccacctgatatgtctgtggaaggatcttcttaacatccgcgcgacacatatatagaatcaaaagggagactgctgccgccacaagcgccgcagttctcaatcgcagccctccggcaaaaatatctctgacctctctcatatgaaacctatcctgttcattaaaaaaatcttgtcttttcccctccacttctgtgataacagataatgtttccttatctccccgcaaataatccatcatttcacgtgtcacatacattgcatcatccatcgtcatatccaattcatccaacacttcatacttttcatattctttgcggtaaacactcatatccgaatacagaacaatttcaaaagaagaaatcaaaattacaaaaatgattaataatgaaaaaatcacccccgctgtccactgaataattttcttggttttcccattcattctacgtctcccatacatctcacttttttatgaatctcaaacaataatcttcctgtcaccgctctactatcctccaaatttattgtaattttataaaatatatcttataatacctgtagtatttattaggaggtctaatagtgatcgatattaattatgaactttacaaagttttttatcacgttgcttctactttaaacttttcagaagcatccaaacagctctatatttcacaatccgcagtcagccagtctatcaaaacattagagagaaaactagatcagacactttttatcagaagtacaaaaaaagttcaactgactcccgaaggagaaattcttatgcggcatgttgaacccgctatgaatctgattcaaaaaggtgaaacccaacttctcgacgcggcatcaaccggagggcaaatacgcatcggtgccagcgatactatatgccgctatttcctgattccttacttagagcgctttcataaagcatttcccggcgcgcatatcaaagtaatcaaccaaacgtccatgaaatgtgccgagcttctgcgaaacggacttgtagatcttactgttgtaaactttccgaacaatcacctcggaacaacaacttccgttatgcgcatcaaaaaattcagagacgtgtttatcgccggaaatactttccaaaaactaaaaggagaaactctgactttctcccaactgttgaaatatcccatcttaatgctggacaaaaacagtacgaccaacgaatttcttcatcaggtatttcaacaacatcagctcgatcttgttcccgaaatcgaacttacgagcaatgatctgctgatcgatctggcacgcataggattaggcattgcttttgtgccggactattgtattttccctgacagcgaagacgtattcatcctgcacacaaaagaagaacttcccgagcgcgaacttgctatcgcatacaacgaacaccttccgctctcacgtgcctcaatggaatttttgagttacttccgtgataaaacatgctaacattcccaaaattcctgcatgtaactcgtcaaactttccgcagtacagtgtcgggcattactccattctctgggaaataattcccgataccttcctgtggaaaaccgctcatcgagcaaaaggatcagtcctctgtctttttctgtcctgatcacccttcctgcagattgaagcactttattcatccccggatagagatatgcatattcaaaaccatctgaaccgattccgctaaaatactgtttgacaatctcccgttcattacatacttgaggaagtcctgttccaacaatgatcacaccgatcaacttatcttccggcaaatctatcccttcagaaaaaattcctcccatcacgcaaaaaccgacaaagctttcttcccttatctcatcgaactctttaagaaacacctctctgtcttcttcactcataaacggagactgaacagcagaagaaatttttccgcacttttccgaaaaaacactatgcacttcttccattacccgataggacggaaagaacaccatataatttccctttttcgcatctgctgcacctacaatatatgacgcaatccgccggtacatctccggcccacgctgtgtatatcttgtactcacatctcttccgatcaaaagcagccgactgtctttcggaaacggagaatccgcatagatcgcataatcatctgtttcaatcgataaaagctttttataataacggaccggaagaagcgttgccgaaaaaaagaccgttccgataccatattctaaatatgcctgtaaattcactgccggatttacacaaaaaagctttaccataaatctgccgtcttgctgatactcactatatataacataattttcatccagaatatcatgaatatttaaaaactctcttactttaaaatacaattctaaaacttgatcccgtttatccgattcggaagatttctcaaaaaaacgttccatctccgccaaaagattcatcaattttatcgccagatgagaaacactttcaagcactctatattcttcacattctctctttaataaaagaaactgtcggtttacttcgtctgctttttttgaaagaatcggttctttaacacgcatcatttttttcaattcaaggaaatcttctttatacaaccgggcactgtacatttcccttcctcgttcgacaagattatgcgcctcatctacaagaaaaatatattttttccctgcattttcagaaaaaaaacgtttcaaatgtgccgtcggatcaaacgcataattataatcacatataactgcatctacccataacgaaacatccaatgacatttcaaaaggacaaaccatatatttttcagactgattttcaatcacgtctcttgtaatttcattgtaattcattatcagatcatacactgcgtcattcacgcggtcaaaatgaccttttgcatatggacatgaaacaggattgcattctgtctcctcacatttacatatcttttctttcgcagtaagcgtaatcactttcatctgcagaccttgttctcccagtatccgaaacgcctgttccgcaacagttcttgtaattgtttttgccgtcaggtaaaaaatcttttctcccagcccctctcctatcgcttttaccgacggaaacaaagtagatatcgtttttccgactccggtcggagcctgaagaaacagcttctttttccgtaatatagtacggtaaaccgccgctgccacctctctttgcccttccctgtaagaaaacggaaattcaaccaatcgaattgacgaattcctcttttcctcccacttaatctgaaatcgagcccatttttcataactactgatcaattcttcaaaccagcattccaatgcttcatacgtatagtgtgataaaaatcgtcgaatctcttctgtatccaaattgcagtatgtcatctgaataccgatttcacgcaggctatgctgctttgcatatatatacgcataacattttgcctgagcaagatggacattcaccggctgttcgatcaaactcaaatcacgcaaaatacctttaatctcatctataattacttcagatgtatccccttttataataactccgtctgcccgcccctcaactctaagatcgaattctccacatggaatctgaagcttcatcgctgtttccgcatgataatccgatcccatctgccgttgtatttttctgtgaagctttccgcccatagccataacatctttatctgacattcctatttttcgattatcgatatcgccttcccgcaaaacaaattcaactaaatctctcacggaaatacgaacaatcttcacttcttctttcaataatatctctgcccgttctgtcacttcgtatttcatcaaaatttcggatattcatataagcactttcacttcaccgcatcttatctgcattttgaaattttcatgatagttctatcataatcctattttatcttccgcacaactaaattccgtcatttcccctctatatcgaaaaggaaggtgcgcctgctgacatttgggattctccctctctttgatcgaaaccgaatgaaaaaaccgcttccacaaaaactcatatttccgttcctcttccgatatattctctgccgctctctcattaaaaagctctccccacacaagtctccatcttttcctaactccgtgtacaagacatactttatgcgttttatcatatatgatccaattttccaatggaaacctatcctcaaaatgatctgcaacacaagttaaaatctgcgctttcggagtaatctccgaaaacaaaattccgttttcaagttctctgaaacgaataaattcttcatatctatgcgcttcattggacacgctcctgctcatagaaaatacatccgcaactgccggacaccctaaatgttccattatcttttcactctgcctgatttttctggcttcctgcagcacttcaaatactaccgttccttttctgtcatctgtcgaaagaagcgcatggtaaatctcccagtaggcattgtatccgagatgatgctttatcattctttctaatctcagcgctttttcttctgattcttctactattctgtactcacaaaaaagctgccgctgtgtcctccccctcagttcgacacccgcctgcgtatctctgcattctttccaggcatcatgcaaagctgaataaatgccggttatcgtatcttcacatatatagatctgtttcatcgcttcccccaatctgccggatattctcttatttttcaaagtaaccaaaaatcagcagctcttattttacctcctattctatccccatatcgtcaaataacgacaactgacgaaagctcatcccatctgcgccttcgggcagtttttcttttgtattaaggagatttcttgtaatataatcttcatccattcgaatcggatacatcatttttcctttacatgtaataaaatagagcgcccgcttcaaaacaactcccattttctttaaatcttcaaaatcaagcatccccatcctgcgcgctttcacaatgcgcgatgctgatttataccctattccgggaactctaagaagcatatcatatgccgcgtaatttatctcgatcggaaattcttcgagatgccttaacgcccaaaagcatttcggatcaagatatgcattaaaattaggattttcttcatccaaaagttctcctgcttcaaaatgatagtatctgagaagccagtcagcctgataaagcctgtgctctcttaaaagaggaggtcgctgctctttgacagacggaagatttttatcttcgttgaccggaatgaatgcagaataaaatactcgcttaagatcaaattttttatacaacgactctgccacatgcaaaatctgataatcagactccggtgtagcgcctatgatcatctgcgtgctctgtcctgccggaacaaacttaggcacatgacgataagtttgaatttcatattgattttccgctgacatctgctgtacaaaacgcattggtgcaaggatattcttccgcgttttatgcggcgccaaaagacgaaggctttccgcagtaggaagttctatattcacactcatcctatctgcaagataccccgtcatctgaataagacgagaatccgctcccggaatcgctttcacatgaatatatccctgaaaattgtgttcatggcgcagcttgtataacactgtatacaaaagttccattgtataattcggactttttaaaacccctgaacttaaaaataatccttctatataatttcttctataaaactccatcgtcaaagtacatacttcttccggagtaaaagatgtacgtacaacatcatttcctgatcggttcacgcaatatttacaatcataaatacattcatttgtaaagagaatcttcagaagagaaatacaccgcccgtctgccgaaaaactatgacaaattcctgctttcctgcagtttcccattccttctccgtctcccttgcgctctgtgccgccagatgtgcatgaaacatcgtattttgccgcatcagacaatatctctagcttttctcctaaagtcatctccgtctgcatcagtttcaacattttccgaaaaccttcctctttcttgttagaacatgtgttctattaaagagtagcacgtatgttctgttttttcaagagtctattctgcatccgccacaataactcaagcaagaaactttgtaacacactataaaatcccccaattttatctataacaaaaagctgatcctaaacgataagcttcaaacttaccatttaaaaatcagctttttatctgctctttatatgcaatttatatttgctttattcgcactctctgatacgctttctaagcgggagaaccatagccggagatactgacagctcatctaatcccatcttaaggaattcttctgtcaattcaagatctgctccaagttcaccgcaaataccgatccaagcaccttctgcatgggcattatccgccgccatcttgatcatagcaagtactgcggggtgatgcggatcataaaacttatccaattttgcattctgacggtcaatcgccaatgtatactgtgtaagatcgtttgttcccacactgaagaaatccacttctttcgccaattcacgactgatcataacagatgccggtgtctcaatcataacgccgagttccacatcatccttaaacgggattccctcgtttttaagctcttctttcacctctgcaatgatggctttaatttcatgaacttccgcaactgaaataatcatcgggaacataatagagatatttccaaacatcgccgcacgataaagagctctaagctgcgtcttaaagatctcttttctcgtcaaacaaatacggattgctcgatatccgagagccggattctcttctttatcaagtccgaaataatcaacctgcttgtccgcaccgatatccagtgtacgaatgattactttcttgcctgccatattttcagcgacttgtttgtacactgcaaactgctgctcttctgtcgggaaatccgaattttccaaatacaggaactcgcttcggaacaaaccgataccgcccgcatcatttttcaatactgctcctacgtctgaaacattaccgatgtttgcatacacattgatcttctgtccgctcttagttacattttcttttcctttaagctgctcaagaagcgctttctgctcctgatctttcgcgcgcttttcttccatgactttcattgtttcttcatcaggatcaatgtataacattccggtaaatccgtcaatcaccgccattttaccgtcatattttgtcaacagatcttctccgagtccgatcaccgccggaatattcattgtacgggcaagaattgccgtatgtgaattggaagatccatacattgtagcaaaaccgagaactttgctcttatcaagctgtaccgtctcactcggagccagatcatctgccgcgataatacacggctcagtcatctctttcataccgccggatactccgcacaaaatatccaatacccgctcagacacatcttttacatccgccgctcttccctgcatataagcatcgtccattgcagcaaacatctgtgcaaaattatctgctgttgttgcaactgcaaattctgcgttcacttcctgtgtacggatgatattctcaatagactcaagataatcaagatcctcaagcatcatctgatggatctcaaaaatcatcgcatttgcctctccgacatcttctattgctttatcgtacaattctttcaactgggatactgccgtatcctttgcatcgcagaatctcttccactctgcatcgacatcatctacatgcgttcttttgatcactttttcatttcttttataaaacatgatctttccaatagaaacgccgccaaatacactttttccttttattgtaatcataatttataaattctcccttaatccgatttataaattttctttaaaaaatgcctctaattctgcaaatgccttatcttcatcgtcaccttctactgtaatcgtaacttcttcgcctgtttttacgccaagccccatcactccgaagattctctttgcatctgctgttttatcaccttttgtaattttaacggatgatgtatatcctgctgcctgttttacaagaattcctgccggtcttgcgtgtattccctccggatctgttacaacgtatttaaattctttcattctcttagtcctccttaatgatttcatcgtacttttgttgtactttttacagtatataacatattcactaatttttcaatctttctgtcacacttttatcaatcatccgttgacttttgctgttaaccatgctaaacttagccggtattgaaaactcattttttaatacagaaacatatttattttttcttaaatggagggcaacacaatgacaggtacagtgaaatggttcaataaccagaaaggttacggattcatctctgactcagaaggaaacgatattttcgttcactattcaggacttgtaatggatggattcaagactctggaagagggtcaggctgtagagttcgaagtaacagaaggcgctaaaggaccgcaggcaactaacgtagtaaaactttaatcagattttttaatgtaccttttaatatataaacaaactcgatttatttattattaaaaagcaatacagagaaatgagattaaaaaagagaaccggacagtaatcgaactgcccggtttttcttgtttttagttataacacaggaacagttttaaacagactctgttcctgtatgttttataccgttattagctttgctcgtgctattttatattagacacatatgcttctgaagcttcccatacatcgaatccgcttcctctcaaaatatctacaacccttgcaggatcatcacattttaaaaccgcagaggcatcttctccgtttgcaaaagcatacatatattcaatatttacatctccgtctacaatctgatgcatcgcacggctcaaagaccctgtctcatgaggaactcgcagagcaatgacatctgtcagcattgccgtaattccgttttcttttaaaaccgcttttcctttgtttggatccgacacgatcatacgaagcattccgtattctgttgtatcagccaaacttaaggcaacgatattgacatcatttcccgctaatacagaaaggacttcatccagtcttccttctctgttttcaagaaataccgacagttgttgaattgtaattcccattcgttctctcctccttctacagatctctgttgtcaatcacgcgaacagcttttccttcacttctttgaatcgacttcggctctacaagcttcacttttacagatacgccaagcgcagtctttaatgtagctgcaatcttatttctgagagcgtcaagttttctgatttcatctgaaaatacagattcgtctacctctaccataacagtcagtacatcaagattatcttccctgtcaacaatcatcatataatgaggcgctacaactcctccgattgaaagaagcgccgtttcaacctgagtcgggaatacatttacaccgcgaattactttcatatcgtcggttcttcctgtaaatttagaaattctcggcagtgttcttccacaggcacaggtactgtgatcaatacttgtaagatcttttgtccgatatcttaaaagcggcattgcctccttcgcaagagttgtaaacacaagttcgcctgtttctccgtccgcacacggttcatgggttgtcggattcaaaacttcaggatagaaataatcagcctgtacatgaagtcccgctttatggatacaatcctgagccactcccggacctgtaatttcacaaagtccgtaaatatcaaaacaattaatgtgaaggatatcttcaatctttttccgcatttcttccgtccacggttctgcgccgtgaataccgactttcagattcagcctgtcaacaatccctgcttcttgaatggattctgcaagatacaaagcatacgaaggcgtacacgcaaatgcagtggctccaagatcttccatacacatcatctgacgctttgtattgcctgcagacatcggaatcgccattgccccgagcgctcttgctccaaaatccagtccaaggcctccggtaaacagaccataaccataacagacatgtataatatcttcctcggtaagtcctgccatcgtcagttctcttgccacacattccccccatacttctacatctttctgcgaataaggagcaatcgtcagttttcctgttgtaccggatgttccctgcacacggacaacatcctttttcggtattgccaaaagtccaaaaggataattttcccttaaatcttcttttgttgtaaacggaagttttccgatatcttcaatagatttgatgtcaccgggctctattcccatatcctgcattttttttcgataaaattctacattattatatactctgtttactacctcgacaagccgtctgctctgaagagcggccatctcgtccctgctcatgcattcaatcttaggatcacgaatcctctcaacccagttttctcttgatactgcagccattatttcttctcctttagtcaattatatatcttttataaatcctcttcctccacaagctttacatccgcctgcttcagaacgctctccgctttttcaaagtcatcagtatgaaataccatgaccggggctttcccttctcggattacgaaagaatagatataatttacattgatctgtccgtctgccagtattttcaacatctgattcagatttcccttttcgtcttttagttccgcaccgatcacatcactgacgcgatttacaaacccttttgacgttaaactttcttttgcgcggaccggatcatctactaccaaacgcattatgccaaattccggagtatcaaatgttgaaattgcacgaatattgacatgcgcctcagtaagtacgtttgtcacattcatcatacttcccggttgattttccacaaaaactgatatctgcctgatcattaactatcaccgcctttccttttagattctctgtcaatatctgccaatattttttcacacagattgtttgttgttacgatacattcattatcatatgtctttttcttttatatggcttccacctatttcaacgtatatcccacatcaaaagctttcttatttaattcgactgtcttttggggaaccgttttctctatcacttcataccactgctcttttgtaaaatccatatgctgtgccgctacgccgaggacgatcaggttaaacactttcggatttcccagtttctttgattcttctgttgcatctactttatagactttatattctttttccaaatcttctaaaatattttccggataccgggctgctccgatcacgacaggcatcggatcgattcgccagtcatttacgatcaacactccgtctttcttcaagaagtgcgcatagcgaagcgcctcaagccgctcaaatgcaataattacatctgcctgcccttcttccacaatcggttccgccactttttctccgtatcgaacaaatgtaacgacgcttccgcctctctgtgccattccgtgaacttccgataatttcacatcatatccgcccgcgatcgtaagacctccgagaatgcggcttgtgagcaaagttccctgtccgcccacaccgacgatcataatatttttcacagccatcccttactcaccttcctttataagctcgattgcatcaaatttgcacaaatctttacacaaaccgcatcctgtacacattgtatcgtcaatatgaatcgttccgtccgggtttttcgtcattgccggacatcccggcttcatgcacattccacattttttgcacttatcggcatgtgcaatataaagcggctttttcctcttatcaagaagtacacacggagtttttgtaataatgaccgatacttcgtctcttgccacctcttctttgatcgttttttcaagcagcaaaagatcaaaagcattgatctcataaacatttttcacgcccactgcacgacacaaagccggaatatcaatcgcatatgtcggatcgccctgcaaagttttccctgtagccgcatggtcctgatgtcctgtcattcctgttgtcgaattatcaaggatcagtactgttcctgtcgcatgattatataccatattcatcaatgaattgatgcctgtatgcaaaaaggtggaatcgccgattacggcaacccaattttttatgtattcttttccttttgctttctccattccatgaagcgtcgaaatgcttgatcccatacacatcgtcgtatcgattacgctcaaaggcgcaaccgctccaagcgtataacatccgatgtcgccggcagcatgcattttcagcttattcaatacatggaaaacacttctatgcggacatcccggacaaagaatcggcggtcttcccggagcttctgccggttttttcagatccggattttctttcagtatcgctttgcgaagcatattggcactgtactcgccctgcactgtaaaaatttcttttcctacagccggaattccccatgaacgaacttgttcttcaattaccgggtcaagttcttctacgatatacagcgtctcgacttttgatgcaaactcttcgatcaattttttcggaagaggattcacaagtccaagtttaagaacagatgcatctggaagcgcttcttttacatattgataagggataccgcttgtaataactcctatctttgtatcattcatctccatcttattcagcgaaagtgtattcgctgcttctgccagttcaagattgcgtttttcaatttcgacatgacgaagtttcgcatttcccggcatcatgacatttttcggaatatttttctcatacggtttatcttcgacctgcgcacgatcacacaactctacaattccctgcgaatgtgcaagtcttgttgttgtcctgaaaataaagggtctgtcaaactgttcactcaattcaaacgccgtcttaaaaaaatcttttgcctccgcactgtccgacggttcaatcaccggaatctgagcggctcttgcaaccatcctcgtatcctgttcgttctgagaactgtaaagtcccggatcatctgcaacaacaagaacaagtcctccgtttactcccatataagaaaccgaatacagcggatctgccgccacattcaaaccgacatgcttcatgcatgccatagaacgtactccggcaagacttgctccgaccgccacttctgtcgccactttttcattcggcgcccactcttcatacacatcatctttatattgtacaaggtattcacttatctcggtactcggagttcccggataagcagacgatacctttacccctgcttcgtatgctcctctcgcaatcgcctcattgccgagcatgatcactttctctgccatatcaaagtccatcctttcgtaaatctgttactctctttgccttaccctcaaaccgtcttaaagagttcggcgccacaagcctgatacaggttgcaagtccaagctgcgatttcaatgctgacttaatcctcgtctcaagttcacttaattttgcatagctgtcaagaagtctgtcatcgatcagctctaccgtaatcgtcattacatccagacggttctttctctctacaagtatctcataatgcggtccgatctcatcaatctttaagagcacttcttcaatctgtgtcgggaatacattaactcctcggataacaagcatatcatctgcacgaccggaaagattttccattctgcaggttgttcttccgcatttacacggctcatacatcagtcttgtcatatctccggttcggtatcttacgatcggaagcgcctcttttccaagacaggtaacaacaagttctcctctttctcccggcggaagaacttcctctgtttcaggatcaataatttcaggaataaaccagtcttcattaatatgcattccacaaagctgtgtacattctcccgaaacacccggtccgcaaagttcactcataccataattttgtgtacagacaaactgttctccccaaacacggtgcatctcttcccgcatcggctctgtcatgccttctcctccgaacagtccgattcttatctttaaatcttttgatggatcgatccctcttctgcgaagttcctctccaagatggagcgcataagacggggtagccacaagaagtgtcacacccatatcctgtaaaaacataatctgtttgtttgtatttcctgaagacatcggaatcacagatgctccgatcttctcaagacctccgtgaagtccgagcgctcccgtaaatgttccgtatccaaacgcgatctgtgccacatcttcttccgtcgcgcctcccatgcatgcaattctcgcaacattattcagccagatatccagatcgtttcttgtatatccgacaacggtcggctttcccgtcgtacccgaacttgcatgataacgaacgatttcctttttatcaaccgcaaacaacccatccggataatgatcccgaaaatcagctttatatgtaaacggcagtttttttaaatcttccaacgtctgtatatcttccggacgtacacctgccatatccattttctcgcggtaaggtttcactctgtcataaatatatcgaaccgtatccttcagctttgtaagctgtatccgttcgatctcttctcttggcagagtctcttcctttgcccatatcatcgcgcatatcctcctttataatatgttgtgccatcgcttatcggcaatctgcttttcagctttcttttttactgatgtctattagtatagcacaatacttttgcgaattaaagctttaaatcaagaaaaattcctctttacccggaggacctgatcctgtcgggcaaagaggaactctattgtttctattctttttatcattaaatcaaatttaacaaagaggatatttctctgtaagttctgctgccagttttcttgcagtctctacattttcttcactctcgatcaccattgcaatgatctcggcgatcttatccatatcgtcctctttcattccccgagttgtaactgccggagttccgagtcttactccgcttgtcacgaacggagaacgaggatcgttcggtattgtatttttattacatgtaatatgtgcatcgtcaagccgtttttccagctcttttccgcttacgtcatttccggtaagatctacgagcataagatgattgtctgtatctcctgaaacgatcttcacgccgcgttttttcaaaccttcacagagcgcttttgcattttttacaacctgcatctgatattctttaaattccggctcaagagcttctttaaagcagactgcctttgccgcgattacatgcataagcggtcctccctgagttcccgggaaaattgctttattaaaattaaacttctcgttcacttcattacttgaaaggatcattccgcctcttggacctcttaatgttttatgggtcgttgtcgttgtcacatgtgcatacggaatcggacttggatggagacctgctgccacaagtcctgcaatatgagccatatctaccatgagatacgagccgacttcatctgcgatttcacggaaacgtttgaaatcgatcgttcttgcataagcgcttgcgcccgcaatgatcatcttcggtttacattcttttgcaatttccaaaaccttatcataatcgatcactccgtcatcattgactccgtaaggaacgacatgaaaatattttcccgacagattgaccggtgatccatgagtcaaatgtccgccgtgatcaaggttcattcccatgatcgtatcgcccggtgtcagcatcgcaaactgaactgccatattagcctgcgctcctgaatgaggctgtacatttacatactcacagccaaacagtttttttgcgcgttctcttgccagttcttcggcaacatccacacactgacagcctccgtaatatctcttgcccggatatccttctgcatatttatttgtaagcggacttcccatcgctgccatcactgctttgctcacccagttctcagaagcgatcaattcaatatgggagttctgtctcttcatttccgctgtgatcacttccgcaatctccggatctgcatttttgatttcatcgaagtcgtacatcgtcattatcctccatctcatctgaaatttgaaatttgaaatttcataaatttacactttactatgacaaagcgttagagttattatagcatagcggatgtatcccgtctacgtctttctaaagacagaaaataggaaaggaagaaatattaacgatatgggagaacaaattttaattgcagaagatgacgcagatatcaacaatctgcttgcaaaaatattacgcaccgagcattttaagccgatacaggcattttccggaacagaagcaaaactgctctttatgcacaacacgccggacttaatcttactggatcttatgcttccgggattatccggcgaagaacttctatccgaacttcgggaaaatctttcttctgacgtaccagtcatcatattgtctgcaaaaattgccctggcagacaaagtgtcacttttaaaaatgggtgccgatgattatattacaaagccgtttgaacctgaagaagtcatagcaagaatccaggctgctttacggcgtactgcaacatcaaaaaaactgtcttgcctaaatttagagttatatccggattctagaaaagttactgttcacggaatcgaactttctctgaccgcccacgaatatgacttactctatcttttcataaaaaatccagagaaggtctattcccgcgaaatgctgtacgatctcgtctggcacggaggctattatggggaaaacaatactgtcaatgtacatgtaagcaatctccgaaaaaaaataaaagaagccgatcctgaaaacgaatatatccgtactgtatacggaattggattcaaacttgttcttcattcaaataaaacaaaatttgaagcagtgatttagcatttaataactgaactgattcaaaaattatagatttaaactttgataaacctaatcagtacgattttataagttctttaaaagttctttatgacttattaaaacagattcagatataattggcatcgtaacagcttttattcaaaaacctgctgcataaaataaaatccatacggagtgaacagatatgaacagatatgtcatagagacaaaacaaatcacaaaaacatacaatccgcgttctccctttatcgcactggatcatgtggatcttcatgtaagcgaaggctgcatttacggactgatcggagataatggcgcgggaaaaagcacattactcaaattacttgccggacacatctttccaacaaacggagaactatgcctttttggcgaaacagaagaaaaagcactttgcaatatacgcaaaaatatcggctgcctgatcgaatatccatgctttgttccaggcatgactgttgagcaaactctgcattattatgccattcaaaagggagttccagacaacaaaaaaatcggcgaagcaattcaactgaccggtctatccgaaaagcaacatgcaaaatgtaaaacgctttcgctcgggcaaaaacaacggctcggacttgcagttgccctgctgggtgaaccgcagattctcattttggacgaaccgatcaacggacttgatccgagcggtattgtcgaatttcgcagtatccttcaacaattaaatgaacagaaaaacatcacgatccttttatcaagccatattttatcagaattacaacaccttgccacagtttacggcttcctaaataaaggaatcttacttgaagagatcagttctgaagctttacacgcaaaatgcgccaactgtatcgaactgactgtttctgatgctgaaaaatataccgttctgctcgaaaaaatctttcctgaagaaaactataaagtgcttccgggaaatacgattcgcatttataaaccgcatgagacagccgaaagcttcagcagacttgccgcaaaaaatgatgtttacattacaaaaatgcagacactccagacatcattggaagattattatatggaactgaagaaaagaggtgctgtaaaatgttgaattttattaaaagtgagtactaccgtatgatccatacaaccggaatccgtgtcttcttcggaattctctctgttttgaccattttactgatatcaggtatttcgattgttgaaacacagtaccatacaacctctttttcttattccatccttgtatcgagtcctatgtttttcacgttgatgggaatgctgaccgcttcggttctctatgaagacagcaaaagaaacgggattataaaaaattcgatagcaaacggaattcccagaggaaaggtgttcttcagccaatgtatcgtcagtatcaccactgctactgtcattatgacgattgttctcaccctctggattttcatgaccgaactgtttcttgataaaaccggtccggttcatatgaccgatctgctaatggaaattccggctatttatttgattgccgtatccagtattgttttaacaatcgtactttgcctgtgttttcaaaacggcgcattcatattttttacatggctttttgtctttttcatttttccgacaattttacttaaattcggaatagcagtttcagcccattttaaaacagattttatctacaacatcgccatgtggatgccatcgaacttttttcagatcaacaccgcaaacgtcaatatgagttcatgcattaccgcatgggatacaaccggcggtatgctgcgctgcataattgcaggaatttcaggaattattattttcatggcaatcggattcaggcacatccgaaaagcagacttataaacataaatatggagggatcacatatgttgtatatcattctatttcttatcagtatcgcaggaggatatgttgcgtttcgctacatttcccttctccgtgcattaaaacagatacaaaaagagctcgatgtcatacagcaggatctctccaaaaatcagatgatacatcttcccgttccgaacaatcggttaaaggaacttctcatcacaatcaactcttttttagatgagcttcaccatgagcgcgcgcgttatacaaaacaggaaaaagaatttcaaaaacagattgaaaatatcagtcatgacctgcgtactcctttaacatcccttctcggatatgttagactatataaaaaatcccagtcttcctatatctcacaaaacgctgagctttcagatacactagatgtcattgaacgaaaatcagaatcactgaaaaacctgattacgcagttttatgatttttcccgacttacagctcatgactatacagtaaatctcattaaaattgatactgtaaaattactgagagaatcttttgcagacaactgccacatactcgaagagacacatttaaacgtttcgcttgatttgccggatcgcccaatatatgtgcttgctgacaaaacagctttagaacgaatcttttttaatttgtttcaaaatgccggaagatacgcacataccttttttcatataacaataaaaaacgaacaaaattccattaaaatcttgttcgctaatgacacatgttctctttcatccgaagatatttctcatctgttcgaccgcttctatattcaggaatcggcgcgcagtcagggcggaaccggacttggtcttacgattgccagatcacttgcagaagagatcggcggagagctttctgtttcttccaaaaagtcaaacggaaataactctcttctcatctcatttactttggcattaccttcttgttagtttcaaaacttttataccggatttcccttttgtaaatacatatccgcgatcccaccctataatgtacgtttaagagttatcgctttgtataaatcaaatccgtcattccattatacgattgtgttttgagcagccttaacttaatttcatggtcagtcttttcaaaaagtcgaatgcctgaccctaaaatagttggaataacagtaatataataacaatcaattatatcttccctgttggataagggttgcaccaccacatatccaaatatctttcccactttcctctcgtagtttttttaccagatcaacagagctttcattggtaaaattaattttatcagaagatgttttttgattatgtgttactacataggttgtaaaatcattataaacccattcatttggcgaaagttcagtaacaatttgatgataagtattccaccccattatcacagtatcaatatcttttgcaaattcagaatatgtatcaatgttatcagcgtcatcaccctgtccaaccaaccattcaacactgccttcactgtctgcgatatatccgtcaaggctcattgctataaacaaactgacttttttcatagatcctcctttaaattcacaaactgggattttattctttatcgttcaaaagtttatttactctttcaactggaaatctgtcttcaatatcaattatttcaaacaaatttagtggcaattctttttcatcaattagagtaagatattcattaacagctctacggtcaatcataatttttccatgaccagcccaatgtcgattactctccttctttttcaaaccagaaatccagtattcatcaccattttcaatgtctatataatttgcgtaattaccgttatatttctgaaatgcatggttgttaaaataaatggttttcttggtttttgaagttttcacatacccaatccatgctggaccatcatcagaatatcctgttttcagttcaatatacattaaatctttaatcatttatatcatttatatcatttatatcattcctaaatttaaatttttcgtgttaccggaatttacaactctatttctttatgaaaaaatcaatcttacaatcaaaagaaaaacaaaaatcccaatgaaataagaaagcctccataaattctaatatttataccgcttctctcagtcgctatgtcccattagcttgcaaataattcttttaattcttacaacaattcctccaatacctcccagccttgataataaaatgccgagagcaaaaaatattactataacggtagccatatccaaataattttcgcccataatttttctcctttacaacttcaaattttcgtattaccaacaccaaacaaattctcgtttatacttcagatttataagattatatcacataatttaagctttatatttaataagtttcactgagcatagctaaactatccataacttttcaacgggatatttaatttctattgtatcttcaatcatttattttttctccctggtatgattcaactatatttaaaatcattttttcaaaaatgtgtgcataattccattttttgatgaactataccttcttctaaaaaatcatcggatgaaactctaaacccaaattttttatagaaacctactgcgtgcttttgtgcatctatacatatttttttacacttcagcttttctttaatagcaacaatacttttttgcatcaattcttttccaagcccgttaccatgcactaatgtcaaaactctgccaacccgaactatatatttattatcatcttgactaaacgctcttaaataagcaaccactttattatcatccataatatagcagtgtaaagaattataatctatatcatccatatcctgacaatgaatattttgttctatagtaaaaatttgcgaccttgatttcaaaatttcatataattcttttgttgttaattcatcaaatgtttttgcaaaaaattccatttacatatctcgctttcaaattcatatcttccgttactttacaagttacaaatctatctcttactcggaaagcaatctttcaagtaaaatctttcggttattaataaacatttcggtaactttataactctgcgtatcttcatattcacatttgtgtactattccatcgtcaaatgataaaatctgtgcatctggtattcctaacaaaataggggaatgcgtaactataataaattgtgatccttcttttgcacatgaatatatttccataagcaatgttaattgtctttgaggagataatgctgcttccggctcatcaaataaatataacccatttggtcgcaggtgattctgtgtgagcgcaagaaagctctctccgtgtgatttttcatggtatttctctgatggatgagcccaatccgaatactccagttcttttgttgcaacattataaaagctttctgctctaagaaaatatccccattttgctttacgaaatccttttgaaattctgatagcattatacaattcagaatgtgaatcaaaagtcgaaaaagaataatttttagtgccgccttccggattaaaaccgtatgatactgcaagagcttctaaaagcgtcgatttaccactaccattttctccgacaaaaaaggtaattggtttttcaaaaacaacttcttttaatttatttatagcttcaatttctcgtaaataactatcgtcctcaatcttattccaatctatcgacaggctttgtataaattgttgattcatttgatcacctcaaactgatataaaacataaaaatcattctttcgttctctgacaaagaatacgcattcttttcccgataaataattctattacttaataagtaatattacctttttatctgttcagttgcaatggattgttcattgaattattttctatttttttcaaatattgctatctaattacttgtccgttgttttcttttactatataacaaacctgtcatcagtaatgcacttatcaaacaatcatatatcccattacatcatttgtatcagccgtagttggcgctttttctttattattcgtatgattattcggttttgatgtttaatttacatcctttttctccaaaccgttcgctttcgcaatcgctgcatctacagcactataatctgctactctcaacagttctttttccattgccttttccaatttctttcgattaaagaaaaataaatgtttatggggttcattagcttttatgtttatagtcggactggcttttccgctgttaagatataaggatatgaagcagtccggatatatcaataatcttgacaatggattttttgcgcgcgctttgttcataggaattattcttgctgtattttgcagcctttttatcggtacagaacataatgatggaacgatcagaaacaaaattatcgtaggacaaaaagagaaacgatctatttatcaaatatgataacttgttctgttatcgcgattactatgtgcattgtgttttttgttccataccttagtgttggaatacctttgcttgttttttactgctgatgtgaaattgattatgctcataggcgtaaccgtccttgttttatcaattacatttgcttcacttttcacacttataacaatgctctttcaaaataaagctattattgcagtgtcttgtattctgctttcattcggactattacttgcaggggcaatatgtaatagaatgttagatgctccgccaactattccggcttactcaataggagaaaatggcgaaacaacagctcaggaaacagaaaacccaaaatattcggacggaacaaaacgagaaattgtacaattcttttatgatgtcaatccaggtggtcaggcaattcaatgttcaacaatgcagcctgtcaatttaacacgattacctatatattccttagcaataattgtccttacaaccggtgcaggtgtttggattttcaagaaaaaagatttaaaataaaggagcgaacacattatgttatggttatggcttttcataagtggattgatcttaataattatcttgctactcatcaaaatacatttattgcgaaaatctgcacaagaaatagaaagttcattttccgaaaagctcataaccgatagtaatactttaattgatatttcaagcaatgataaatatatgcgccatttagcaaatgaaataaatatccagttacgaaaactccaagctgaacgcagaaaatttcaaaaaggtgatttagaattgaagaatgctgttacaaatatttctcatgatttacgcacaccgctaaccgcaatatacggctacttagatttacttgaacaggaagaaaaaagtgaaacagtcaacagatatatagccgtcataagaaatcgtacaaaaatgctgaaacagcttatgcaatttaaatattccggcaaaagtatcccctcctccggtgttgggatacttttgtcttataaaagctaaaaatacaacatttttacctatattcgcgctcattttttctatacatttcttccgctatagattataataaaaggcaagatgttttgaatttattatttcaatattttatgtaggaggaaaccacgtatgaaacaaaaactatatgacaaatttgcagaacttttcggcgctacggatgatgcacatttttattttgctcccggccgcgtcaaccttatcggagagcacaccgactataacggcggtcatgtattcccctgtgccctgacacttggtacatatggcgttgcaagaaaaagagaagaccggcttatgcacttttattcctgcaaccttgacgagatcggcgtagtagaaacatctctggacgaccttactaacaaggattgttacgactgggcaaactatccgctcggagttgtatggacattctccgaaaaaggctacaaacttgataccggatttgacatggtaatatgggggaatattcctaacggtgcaggtctttcctcttctgcttctctggaagtgctgaccggagtgatcctgactgatttatatggaattaccgatctaagtccaatagatcttgctttattcggacaatactccgaaaataattttaacggctgtaactgtggaattatggatcagtttacagtagctgtcgggaaaaaagacaacgcaatatttcttgacacaaacactttgcaatatgaatatgcacccattcttcttgaggactccaagatcatcattacaaacagtaaagtaaagcacagccttgtcacttctgaatacaatgtccgacgtcaggaatgtgcggatgcgcttagcgatctgcaaaaggaactgtccatttcttctctcggcgagcttactccagaagaatttgaagaggcaaagcacctgatccgggatgaagttcgtgtaaaacgtgccaaacatgctgtttacgagaatcagcgcactatcgccgccgtcaaagctctgaaagaaggcgatattacaaagttcggagaattaatgaatcaatcccatgtttctctgcgcgatgattatgaagtatcatgtaaagaaatcgatctgctcgttgatctttcatggaataccccgggagtcatcggctctcgtatcaccggaggcggattcggcggctgtaccgtcagcattgtaaaaaatgaagccgtagacaattttattaaaaatgtcggagaggcctataaagaaaaattcggatatgaagctgaattttatgtagtagacatcggtgtcggcgcttccagattagatgtataatcttccgtaaaacaaacttttaaaaacacaaaaaacacaccttgtacaagataccaaaactcttttacccggtgtgtttttttctgcctttcaccttgctcagcggatcatccgtcacttcagatattcatggacattttcttttgtgactttggaatagggcagataaatgtaattttcattagtaaattttatttcctccgcttcttttccgattaccaatgcagctgaaagctttgctatcgctctcgcctgtccctctttatcattatataccgttcccgccatacttgaatcttccactgccttcaaccccatatccgtgccgtctattcctataaataccggaagaagggcctctgtataattcaaatttttataagcgtccaacgctcccagagccatgtcatcattatttgccaacacaagttctatcttatttttatactgccccagcatctgctccatccggttctgcgcctgcgcccggttccagttcgcaatctggtaacttaacttttccagttcaatcccatttttgttaagcgtatctaccgcattttctgtacgaatgatcgcatcctgatgtcccgcttccccttccagaactacatactgaatttttccgtccttattgtgatctatctgactgttttgccgtatcatttcaacagccagctctccttgcagcacaccggactgctttgcatctgcgccaacgtaataaagcctgtcccactgcctcatatcttccgcaaccggttctctgttaaaaaatataatcggcacatcatgttcttttgcaacatctataatttccgacggatctgcccgatctaccagattcacacaaaggacgttgcatcctgcatttatcagctctttcacctggtcattctgcgtgcgctgagatccggcagcatttttaactgtcacagtcgtctcaactccattcttgttgagatgattaagttcttctttaaaacagacaagaagttcgcttaaaaaggtatcgttttgatcgtaacaggtaactccgacataaaccttgtctgacatggatattttctgcttaccgcaggcacacaagagttgtatcaccatacataaaacaatcgctgccgctaatagtttcttttttttcattcctccacctctgttataatcctcatgtactctatacgccttactgactcatagtgaacaaaacttcttgattttcttttgaaaacagtgtctctctgcgaacagtcgaatatgaaaccgtgtttcgttccggctttttcatgaagcgccgcaaactgtctgatagttctgccacactctgatatcctctgttaaactcatccggcactacgagacattgtatctctcctgtatctaaataatagaaagcttccatagaatgtccgattccatacagaaccgccccatgcagattatttgtcgaagaacattccccggctgccaccagacttatattatctaatgtcattataaaatccactttttcgctttgttccattgaatttttttccttgtcttccgcaaaagaatccgatatctgccatagaatatccgcctgtttttcttccaaaaccgctcgaaccccctctgcccgttcacttatagcttctgcgttttcttctcccgaaacgagccctatctttttcccttttatatttccgccgcagtcttttaataattcctctgccaacgcttttcccatggcataattatccgctcccgtaaccggcattttcgtttctgttccatcagaagacgcaaggctttccacaagcacaacaggcactttcttttcgacttcttttagcatcttttctgttttctctccattggcaggctctacaataattccggatgcgccgtttgcaatttctctttctattaagttctcttcttcctgtacactcagacttcccgctgtacttaccacaaatacctctgtctttttatctgccgccgccatttttgccccatacttaaatgctgcccactgactatcatctgaattctggatgatcacggaaattttttcttgctttttttcatttttttccaaaaacatgaacatgaccaacacaaaaaccataagccccagaaatgtttctaccaaaataaatatctttttgccattcttcatccttattccctctgcggttcctttttctgttcattctctttttcgtgaaggtttcctccttccaaagccttgcggttctcttctgtatacaaaaccgccgggatgcagatcgagacagttgttccttcatccggctcgctttccacgactataccatattcttttccaaatacaatcttaatgcggttattaacattcacaagtcctactcccgaaccatgcttatgtactcttttctcatctgtcaaaagccggctcacttcctcactgcacataccgatcccgttatctgtcaccgaaagaataataagcccattctccatcttaccgctgatttttatttcaccgcagtcatctgtcccattgattccgtaattgatcgcattttccaagatcggctgtaaaaccagttttacaatacaaaatgcataaagagaatcatctacatcgaaagtaactgaaaaggcatttttatatcgtatcttctgtatattcatataacttcgggcatgctgcagctcatcccggatattaatcacagtatgcccttttgataaacttatacggaacaattttgcaagctgtgaaatcataaacgccgcctcgtcgttgcgtccatcctcgatcatccacgtgatagaatccagcgtgttataaagaaaatgaggattaatctggctttgcaatgcatccaactcgctttttctacgttcgttttgttcgataataatctccttcataagctcatctatctgctcataagatttttggatagaatatccgagataccggatttcttccgctcctccaatatatacctccggcttttcacccgcttcatactccagtactgatgcgtttaatttcaaaatcgggcttgagattctcgctgaaacgacacgattaagcgctacaagtaccattaccgtcagaagcatcaacaaaataataaaatatcgcacgtcgatcatcccgtgtataaatgccgaataaggaattacccccaccagcttccatccggtataactgatagtattgactattactttccgcctctcgcctttaaaatcatcttcgtacacaccgtccttgtgggaggctgccagactgctgttttctccgctaagaccgttactgatctgtatctgcctcggatgatagatgatttccccattactgtcgcacagataataatactctccattgttcaaagtattgatctgattcatcattcttgaaatatccgcataatccatatccacaagcagaaccccccagttagacactccgctgtctgtaatttcgatcatacggcttaaagaagtaacccaataataatgctgcgttccatcatcaaacaaattttgaatatgaggtgtggaaaaatgcatattttccacttcatccaacgcctgtatgtaccagtcctgctgggttacgtccggatcttctttttgagacgctaccggttctgccgccaataaacttccataatgattataaattgcgatacttcgaagattatctttatttgcctcatacaaaagattcatcctgctttgaatctcctgtttttgtttggagaaatcgctctcttttataatattgtagtaaacggtatcagacacctgtctcatactgacaagataatcttccagactctcccccgtctgttccatcagcttttgggtactctgcacagtctcttcccttgataacgtagaaaaccatatatacataacaaacccggaaatcaacatgatagtgatggaaacaagcgaaaacactcccatcagagtcgtttgtatcccttttggttttaaatttgtccatcccccatatttttcccagcttctcacccgttccgtaatgcggcttttttccgtattttggttttctccttgcatatcatacccgcatttacttttcaaatacttgtttttcactttttatatgctccgctctgtattttgacggtgatacgccaaacttccttttaaatacatagctaaaataattaggatctgtgtatcctactttctgcgctatgacataactcttttcatttgtttcaatcagcaggcgcgcagcctgttccatacggtaatctgtcacataactgacaaaagattttcctgtttcctttttaaacactgtagaaaaataggaattagacaccccaagtctttcacaaatctgagccagagacaactgtacatctgcatattgactgcggacatgctccttcgcttttgatacaaaggactgagttgatctgctccttgccgtaaccaaattttcgctgaagcaaaggctgatatccgtaagccattttcgcagcgcatcgggttcaagctcaagcagctttccatagagtattccgatatctccgcctaccccctccgctgcaatatcattatttacagaaaaccgaaacaaggcggttaccaactccatgatcaccacatgatgctgctgcaatgatttcagcggaaatgaaatgctttctatatactgatctaccgcttctacaatctcttcttccgaattcaaacgaatctttttaaataaattcaacaattccatatcatttgtaaaacagggctctcccgactctttaggcgcgatttccttaatgttaatcgccctggaagcgccgtagacggcacgatatgaaaccgcttcacgcgctgcgttatacgattgtgccaaatccaaaatctgactgcagacctggcctattcctaccgtgacaacagttcccatcatgcggtttacatacttacaaaagcggtcgcagtcatctgtcagctccgcaatctcattttcattgtttatctgggcaaacagaacgctgtttccaaggtagggaaaacattttgccttccatcttttccccagacggtcttctgcctgtttttgtacagacgcggctaaaaataaggaattcatattttccggaatctgactggacgacatatgaatgaccagacagcagtataatggacccggaagagaaatctgataatccgacaggtatttctgaagttcatcctcatgaatccttccctctatcagagtagaacaaaaatttgcctgcaaaagaggaagggactccgtataataatgttccagcttttccatgcttcttctttcacttatctcctgatccagctttatttttaactttgtgaatatattgatcaattccacagaattaaccggctttaaaatatattcctccacttccagatgaaccgcttcctttgcatattcaaactcatcaaaacctgtaaaaagtacgatcttcatcgccggatactctcttctgatatgactgcacagctccatgccgtccatatacggcattttaatatctgtcataacaacatccggctgactctcctctatcatttccagcgccttgattccattatcggcatatccgactacagaaaatcccaactcttcccaattaatttttcggataatagcctgtattacttcctcttcatcatcaaccaaaagtattgtatatttatccatcttgtctccatatatattattccgttttatttttcctcattataacaaagacatacatgcctgtaaatacgacctcatattttatccgtcgtctgttctttctgtctttttaaaccggctcagaatcaccgagaacaccaaagagcacattccggaattataagcgatcgccgggatctcaggcagactccggctttggctcatcacctatcctaaagcagaaagagccgacataatgtcggctctttccttgatttatctttattttttctgtacatatttcagacaatccagcgctaccgcaacaagaatgataatacctgagaatacaaactgaaggtttgtgtcaattccgaggatcgtaagggaatatgtaagcgctgtgaaaataaacacaccgactactactcccgagatttttccgatacctccggtaaatgacacgccgcctactacgcaggctgcaatcgcatccatttcccatccttgtccgtatgcggcagaacctgaaccgaccattcttatacattccagccaggagccgaatccgtaaagaatacctgccagaataaatgctcctaccgtaacggcaaatactgaaatacctgacaccgacgccgcttctgcatttccgccgaccgcatacaaattcttaccaaaagttgttttattccaaataaaccacacaataaagactgcggctgctgcccatatgataattgtagggaatccgtttatctttggaataatcatattcggaatcgtcggttcgatagctccgaaagatactccttttgtagcatatgtaacaagtccgaagatcacgagcatgtttgccattgtcgagataaacgggtgcatcttaaacttggcagtaaaaaatccggcgatcattgtaaagaatgtacacaaaagtatacatataaccaatgacaagattacacgcacaatgataggtgttgacgtgaaatcaaatatatgtccaaaaactccacccgtattaattccctgatgcataataatcgttgccgtcgtcattcccatacctaccattcgcccgattgaaaggtctgtgcctgcaagaagaatcaaacctgcaacacctaatgcaaggaacatcttcggagatgcctgctgaagtacgttcagcacgttattataagtgagcaaaggcgctcccttaatcatcggcgtaataatacaaagcacaataaatatcaagagaatagcgatatataatccgttctgaaggaagaaatttcttttactgaacgtatatttataattctcccatttctgcgcccgcgtttcaagaaaagtaaattttgacatacgcagcaaatcaatcagatgatacttataagaatacgccgcatgccgtctgtcctttatagtctgataatctttttgcagttccattttcgcatcgaacagcctgttcttataaacatatttttcatcctttatttcctgatgttctgaaagtttggaaagaatctgctgatgctctttcttcagttcttctactcttttttgatatttctctttcgcaaggactttttcctgtgcgcagctttctttaacaggcacataatattccttgtcgaaatgttctttcaaatatgcttccgcatctgcaatcagttttgaaatcctgtctttattcttagactctaccgcttttgcctgctgcagttccctgcgcattctcgtaagtctatcctctttttcaccttttgtaagagtgcgatctctctttactccgtccattgtgttttgcagcgacaacactttatccgtgccgtccacccggagaccgtcaatctgtttttgaattgcaccgacgtattcttctatcggacggcgaatctgcatttcctgttccgccgtcagaaccttactgtttccattagccatattcatcattctccctcattttataggtattttgcgctaagtcttaatagttcttcctgatttgtctcttttgtattaacaattccagaaagatatccatttgacataacgccaatgcgatttgtaattcccagaatttcaggcatttcagacgagacaacaatgatcgtcctgccctgctttgccatgttgataatcagttcatatatctcatattttgcgccgacatcaattcctcttgtcggttcatccatcataaatacctgcggttctctttccagccattttccaaaaataactttttgctggtttcctccggaaagatttgaaatcatatcatttggtcccatacattttgtccgcatagtcttgatttcttccgcagtcgctttttccattttcgaatcagaaagagcgatccctgatttatactgtttcaagtttgctatcgttgtattaaacgtaagatctcccttcaaaaataatccgtttgccttacgttcctccgtgatcatagcaaagccatgttccatcgcatctttcgcactttcaaagttcataagatgattattaaagtatactcgtcctgccgccctggtgcgcactccgaaaatcgtctccataagctctgttcgtccggctcctaccagaccatacaatccgaagatttctccttttctcacatcaaaagacacatctttaagataaggctcgaattttgtagataaatgctgcacggacaaaaccacatctcccggcgtattatccacttccggaaaacggttttcaagagaacgtcctaccattgccgtaatcagttcattcatatctgtatcttccgtgctctttgtcataaccagatttccgtctcgaagcaccgatatttcatcacaaatttcaaaaatttcatccattttatgagaaatataaatcaaagcaattccctgctctttcagcattctcatcatttcaaaaagtttttctacttcctgcaccgtcaatgaagaggtaggctcatccaaaacgatcaccttggaattataagagattgcttttgcaatctcgcacatctgccgctgagaaaccgacatattacgcatcggctgagacaagttgactgtcattcccaattttctgaaaagttcagacgcctcttttttcatccggccttcatctattacaccgaccgcattcaccggataccgtccaagaaacaaattgtcaactacatttctctccagacactgattcaattcctggtgaaccatagcgataccgttttccaacgcctccctcggtccggaaaaacttacctctttcccatccaggaagatatttccttcgtctttttgataggtaccgaaaagacacttcatcatcgttgattttccagcgccgttttcccccataagccccataactgttcccgctttcacatccagattgatgcgagtgagaactctgtttcttccaaaggacttactcatatcccgtatcgataagacgatattatctttcttatctgccatgctttttactcctattatactttagaatttttctatctttacccaaacggttgcagtccttttcccacagacaactttctctgactgcctgatctcaattaccgaaatcaccaaaaggtactctccgagatcgcaggcagccgccatagtctcaggcaaacccggactttagcttatcgccgccgcaaaaatattagggagaattccttctccctaatagacctgcttatcctcattattactgaagtaatgatgtataggaagccgcattatctgtttttaccatgttaatcgcaaacgcatcatactggctaggatttccaagacggtttgtaatattggactctgtctgtccgtcaccgccgatatactcaacgtctaaattaagaagatcatcatagttcttaagaagcggctggtatgtagaacttaagaagttatcggaagcattgtaaatgttcagccatactttctttttcgcatgttctttctcatccagctgtttggataccggctcatatacttttgtagaatctgtaaattcctgatagttatcagctgtaaccgctacattcaacgcatagtaagaacgctgctcttcattgtatgtatatacatcttcagacaaaacattgcctgcttcatcttctgtaccgatacctgtatcaatatctacgccatcaagtgcattacggataacacgcaatgtcaaatatgcctgtacgtctgcatgttggctgatcgttccgccgtaaccttctgcaatagcagctaccgcgtcattatttgcatcgtatccgaaagtaggtactttattatcttttgaccatgcattaaacattgacattcccattccgtcattgttggaaactacaacgtctatgttttccccaaatgaagaggaccatgtgccgattgaatttcctgctgtagccgcatcccatgttgctcctgcagagttcttcatctcctgagaagcaagttctcttactacatatttctttccgccggcttcaatcgttccgtcctttacagcagttgcagttccgtctgcatttgttccgatcggagcgctgtcgatatctccgtctttctctacgcctgtaccaagagctttacggacacctcttgtacgtgcgatagaatcgttatgtccgatatctccgatagccagaacatatccgatcactccgtcaccgttacggtcaattttatctatatttttttcgatatagtcttttaccatagttccctgaagttcagcaccctgatttgcatcaaatcctacataatatgtatctttattgaagttcaatgctgtcatgtccaattctcccgtggaactgtttgacggctgtctgttgaaccataccaacggtttgtccttatttgccacttccgatccggaagaattatttgacgctgactttccgctgtcagatcctcctccacacgcagtaactgacagtgccattaccgccgccattgtgattaaagctatttttctcttcatacattttctcccttctgctctttttcgcacagatattttttgttgatagtgacagtttatatgaattcttttaaatataacatagaatatttttctgtttatattgaattttttaagattttattagtcatgtcttataatatttgtcattttagctcttattttcccgtcattttgtacccatcctttttcagtcagacacaatcatcgaaatttttaaaaggcacattcccggattacattctccactaatgcaaaaaacagaaagccgctgatataccccttggcagctttctgtttcatatctgtcttttcaatctgtttttacttctttatcaaaaaacgaaatgcagtatgtgcggtatatttttcacctgcacggtatacaggacttgggaaattctcatggtgaaccgcatcaggataacactgtgtttctaaacaaactgcgcttcttttcccatatacgacgccctctttacctacttcattttctacaaagttcgccgtataaatctgcattcccggacgatccgtgtaagtttccatcacgattccgctttcctcagccataagttccgccactttctcaaagtttcctttgtttttcaaaacccagttgtgatcatatccgtttccgaatcgaagcggttcgtactcttcctcgatcctctctcctatttttcttccttcccgaaaatccataggtgtattctccaccggaagaatctctcctgtcggtattgactgtgcatcccccggagtaaaataatccgcctccagagtaagcgtatgctgcagtacacttccgctgttatgtccatctaaattaaaataactatgatttgtcatattcagaatcgtatctttgtccgacaaagcttcataaaagatatcaagcttatcatctttatcaaggctgtatgtcacgtatatatctgccgttcccggatatccctgatctccatccggactatgaagtttaaaacgaacagacgtctccgtcacctcttccgtctcccatatccttatattgtagaaatccataccgctgtgcagattatttccgttatcattccccgtcaaatgatatgtttttccgtttaattcaaattgcgcgccgccaatccggtttgcatttcttcctacaatcgttccgaaaaagcacgtacctgcctcataaccggccgcgttttcatatcccagaacaacgtccgccatgcttccctctttatttttcaccttcaaactgaccagtgtcgctcctaagtcagtcactgctgcctccatcccgttttcatttcttatcacatagagactcgcctgatttccttccttcgtacacccaaaatttctcgtcatttccatttccttcctttctgctgcgttttcgttactttcatccgcttcactttatatggatgtttatagtattctgccccgcattcttctgttttcattatatagtcagcatgttccgatagcaagaggatatcaagaaagaaaaaacaaagtctctctcatccgttttaacttcatattaacggaaaactgatatgaatactaaaccagtcacccttcatctgcgcgctgatttctccattcattttcagtacaaacccttttgtaatagaaaggccgagtcctgtcgaatttttgcttcttgcttcatctgctttatagaaacgttcaaagactctttgaagatcgatccgatccggatattccactctatttttaaacactagcttcgctctgttttccttctttttcagttgaatcttcaattctttatttccatgatccaacccgtttttcacaatgttttgtataatccttctaagcgcctgtccattccccatgatccaaacaggcgtatctgtcaagtcaaattccggaacaattcccctttctgcccattcatcataatatgaaaacactgtttctttcagaatctgagttaagttttgtcgttcttttttcaattcatacgtttcattttttaactttgtataagtaaacagctcttccagcatctctttaaggctttcgattcgttcctctatgatttcgatataacgcttcctgtccgcttcagacgaacaggtttccagcagttgaaaatatccgtccattgatgtcaggggcgtccttatatcatgcgataaattcgtatatgtatcagcaatcatccgttctttttttacatattgtgcagcttcttcttttcgttctttaatcatctcgttcagaagatctgtcaactctttaatatttcccagcttaatttcttttgtgatgagcatattgctctcatgctctctcagaaaacgcaattggcggcagatatcttttacctgccgcatataactacccaatatacaaatcaatgtaataataactccgaccaaaatcccaactataacatacatgttaaatatctcgtttcttaaacacaaaacttcccaaacagactgcggctgccacaaatgcaaatccaaccagcaaagaagtaaccgccatttccgatgtaatctctgttccaagaagcgtaatcttcccgctcacagtataattgatcatatgaaaattttccagtccgacttttgcaagcatacgatcaataaaactataaaaaataataagtgcattcatacacagacaaatacctatcacaatgctgactacattatttctgatcacaagcgcaatacacattacgatcatcaaaagagcaaaatgcagtatcgtctgaagaagaaaataaagcgcaaatgctcttttatctcccagtataacttcatggaaaaacaatttgtttgccactgcctgtacaatgaagaacaacatcatcgtcaatactgtataaaggaacaaacatacggctttggcacatacgatcaaacctctgtttttcacttgacctgctatatttttcacaaatccgctcgttacatctgccgtagaatacaggattgtaaagatgatcataaacaccgcaacggcctttccttttatatttgcaaaaaacatatcgaaaacagaaacctgttcccccggttttgtcggaggcgtcacatccattccaagattcacctgaccgctttcttgttcttccattgcatattcataattctgctgccgatcctcaagcgaatatgcatccatttcacccgctgtaagcgctgttgtcacaatcataagaacagcaaaaattgtccagattacatagaggctttttgttttaaacatacggaacaattccattcgtatcatattaagcattgcaggcacctcctgtcagattcagaaaataattttcaagttcttcgcttgtaattccaatccctctcacactgacacctgcttttgcaagttccatattcacagctgcgctttcatccagcctttcgtatatgtggatcgtattcttgtctgtcacctgatagttcttaaatcccatctgatccagcaccggcagcgcctgttttgggtcatcgagaaaaatctccatcctttctccacagcgctgcatcaactcttctttcgtaatttcctgtacgagagttccgttatgaataattccataatgggttgcgattttagacaactcttctaaaatatgactggaaataatgatcgtcatattctgctcatctcgaagtttgaagatcatatcccggatttccgcgattccctgtgggtctaatccgttaatcggttcatcgagcagcagcagatccggctctccgacaagagccataccgatcccgagtctttgcttcattccgagcgaaaaatgttttgtctttttctttcccacattagacaggccaactgtttttaatatattttcaatgtatcttttgtcattgatcccaaacaatcggcattttaccgccagattatcataagcagacatatttccgtatagtcccggcgactcaatcagacagctgatccttgaacgtacgtttttcaactgagcattcttatatccgaacatttcaatctcacccgaagtcggttgtgataaaccgcttatcattttcaaaaatgtcgttttcccagctccgtttcttccgataaagccgtaaatcgaaccttttttcacatgaagatcaacatgatctaccgccttatgatgaccgaattgttttgtcaatccgtgtgtagccaataaatattcactcatcttttttctccttttcttttctttatctgctctcattctataaacaaattgctaatcaatcgcaaataaaaagtaaaaaaagagtaaagattacggatgaagcctgtacccgatcccccatacagtttcaatatattctttatctgtcacagccttgatcttcttgcggatattacttatatgtacgtctagcgtctttgtctctcccatatattgctcttcccacgcatattcaaacatttcttctttgctgaatacttttttcggatgttttaacaacagctccaatattgaaaattcctgttttgtaatatgaggcaattctgtatttcccacttttacagtaaaatcacccttattaagttccagctcctgataagtaaatcggtgttcctcctcttttctccctgttgtttctgcccttctgatctgcacttccactctggcagttacttctttaatatcaaacggctttgtcacataatcatccgctccgccgcgcaaaaattccactttatcatcaatcgtatcttttgctgttagaatgatcaccggggtatttcctttctttcgaatatctctaagtacttcttcccccggaattcccggaagcattaaatcaagaagtataaccgaatatctttccccctgtaaaatcattcttgcttccgtacctgagaacgcctgcgtacatatatacccttctttttctaatgcttcttttaaaagtccgttaatatttacatcatcttctacgattaatactgaatttctatgttccatctccatcctcatttatgtaacagatgtttttattcctctgttttcatacgccttgtttatattttctccggattcatataaaagtcatttattttatccatagcatacaatattctttttctccggtttccgcatcttttccttctctttgaatacaaaatccttccctttcataaaattgtactgcccttttattttttacatatacgtttaattctaatctttttctcttttgttttacaaaatcaagaagctgctttccgatactttgggagcgaacgtctcctctgacaaaaatcccctccacataatctttatctaatccgataaagccgagaattccgcctgtttcatcaaatatctcttccatcatgtcttctgtctcgaaaacatagatttccgcctgcaaaaacatctctttaaccgcatctttgtaaccttcccaataacacggatcaataaaatcatgcgcttctttattcgcggcaagccagattttcactgccgcttccagatcctgtctttgaaattttctgatcacgtctttctctcctgcatcttatctttttattctccgcattccgcggcgtttaaaaagtttctgccatcatgtaaaatcaaacagcgataactgattactctgcggaagatctccaaacaatccaagctccgccatcagatcaatcacagtcttgctgacttttgttctttgcctgaagtcgtcaagcgacagatacgccccgtctttcgccgcctcttccactgcctcggcagctttatcccccattccttcaatgcttgcaagcgacggcatcagctttccgtctacgatctgaaacatctttgccttcgccctataaatatcaatcggaacaaactcaaatccacgggcatacatttcctgaacgatcttcatgtcttttagcacgtcctgctctttcttgcttagctgatcccctttacttttatactgttttatatgataattcaacgtttcttttccctgacacataagcgcatacgaaaacgcatccgccctgatgccgaaatacgccgcataatatgcaagaggatagttgatcttacagtatgcgatccgatatgccatcataacataagcggcggcatgtgctttcgggaacatgtagctaatttttttacatgaccaaatataccaatccggcacatcctgtgctttcatcgcctcttcccattccggtttcagtccttttccttttcgcacactttccataatcgtaaacgcaagagcactttctactcctttgttgataagatagatcataatatcgtctctcgtacaaatcgccgtcgaaatcgtcgcctttcccgacttcacaagctcctgtgcatttccaagccacacattcgttccgtgcgataatccggaaatacggatcagatccgaaagtgtctgcggtttcgtatcctgaaccatttgaataacaaagtccgttccgaattccggtattccgagacttccgatcttacatccgtcaatatcttccggcttaatccccaacacttctgttccatgaaacagttcgatcacatccttatcatcaagaggaatttcggtcgcaataaacggatgatctgcattgtattcattttccatagcatccgatgtaatatagtcctccagtgtacggatcatcgtcggatcgtcatgtcccagaatatctaacttcaacaagttatgatcgatggaatgataatcaaaatgtgtcgttgtaattccacattccatatcatttgccggatgttgaaccggagtaaattcattgatatcatgcccgtgaggaagaacgacgatacctcccggatgctgacctgtgcttcttcggattcccgtacacccttcggtcactctttctatctcacattttcgttttctttgctcatgttcctcatagtagttccggacaaatccatacgctgtcttatctgccagagtaccgatcgttccagccttaaatgtatgtccttcaccgaaaagaacttctgtatatttatgagcctttgcctgataatctccggaaaagttcaagtcgatatccggttctttgtctcctttgaatcctaggaatgtctcaaacggaatatcaaatcccgctttcacaagctgttctccgcataccggacacttcttatccggcatatcatacccgcatccgccggcaaatgaacgcacttcatccgactcaaaatcactataatggcattttgaacaataataatgcggacttaacggatttacctctgtaattcccgccattgtcgcaacaaaggaagatccgaccgatcctcgcgaacctacaagatatccgtccgcatttgacttccaaacaagcttttgcgcaatgatatacataaccgcatacccatttgaaataatggaattcagttctttttccagacgtgcggaaacttgcttcggaagatcttctccatacatctcatgagctttcctgtaacagatatcccttagttcctgatctgaattttcgataaccggaggacatttgttcggattgaccggagagatcttttcaatcatacccgcgatcttcaccggattatctataacaatctctctcgctttcgccgcgccgaggtaggaaaactcttccagcatctcatctgtcgtgcgaagaaacaacggaggctgacgatccgcgtcgtcaaatccttttcccgccataataatccttcggtacacttcatcgtcaggatttaaaaaatgtacgtcgcatgttgccactaccggctttccgaatttttctccgagctccacgatctccctgttgatattttgcagatcttctattgaatttacatccgctatacgttcactctcgatcataaactgattgtttccgacaggctgtatctcataataatcatagaattccgccagcctcgcaatctgttgggcagagcgcttttcatgcactgcctgatataattctcccgcctcgcaggcgcttccgatcagcagcccttccctgtgctcgttcaaaagacttttcggtattctcggtcttcttgcgtagtaagtcatatgagattgagagatcaactggtacagattatatcggccgatatcatttttcgccaaaataataatatgatgtgtcggcattttccgaatcgcattgacattccggtccccgtaacgattcacttcttttaaagttccgacctgatcctttttcagcatttctgtaaatttaacaaatatttccgcagttgcctctgcatcatccactgcacggtgatgattctcaagggaaatattcaacgctttcgccacgatatttaatttatattttgacaacgtcggcaaaagtacacgtgccagcgctactgtatccagatatacaaactcatccgaaagtccaagcgaccggcaattctgttcgataaatccaacatcaaacccggcattgtgcgcgacaagcacaccgtctcctgcaaactcaaggaactgaggtaaaacaacgtctattgtcggtgaatccatcaccatttcgtctgtgatgcttgtcaggtttgtgatctcaaacggaatcggccgtttcggattcacaaacgtactaaaacgatccgtgatctttccgtccgtcacttttacggctccgacctctatgatcgcatctttgattgaactaaaccctgtagtctcgatgtcaaagacaatataagtatcgtcaagcgtctgattgcctgcgtttactgcaatctccgtcagatcgtccacaacatatccttccacaccgtaaagaactttaaacgggtcgtctttatcaagtgtttcaatataatgattggcgtccggaaacgcctgagccacaccgtgatctgtgatcgcgattgcaggatgtccccagtcatgcgcacgttttacgatatcttttacttccgacacaccgtccatatcgctcattttcgtatgacaatgaagttctacccgcttgattggacttaaatcttccctttgaaccgtaaaatcaccgatctttttaattcctgttacagaagctatcgtaagttctccgtcaaatttatcaatcgtcgtaactcctttgacttttacgaacgctcctttttttaattcccctaagatttcaggaagttgttcgtttttcgcaaacattttcactgtgatcgtgtctgtaaagtctgtcacagaaaatataatgatcgtcttttcattccggatttctcttgtatcaaaactgataatcttaccgtgtactgtgatctctcccatttctgtgatcacctgctctaaagaaataggctcatcttcaaaattacgcccgtaaatcagattcggatcgtcaccgatcttaacaggacggtaaaaatctttctttcggaattcaccttttttaaattctccctttttcactcctcctgatattgccgccgatgttcctttcccgtctcgggatgataccgatgctttatccgccgcattttcagatgaagttctttttatctgatctttcttctcttctccttctgcctgaggcgtttccccgcgctgtcttgcccgtctctcaaagatcgcattgatctcctgttggattctctgttcatcatattccctgcttcctgttctgtcaggctctttgtaatctacacggatctctgccggaatatgaaatctttctgaatacacttcctttaacagatccactatctcttcttttcgccctgccgaaacaatcgtatcgagcagttccaggcagactacattttccgcttcatagcggatatctgcctgtgcaaacatattagatgcaagcatacttttttctttcaattcgaggatgatactctccctgtattcattcataagcgcttctgcagtatactgtcccgagagcatatattcctccacaatatgcaccgcaacagccgttttggcaaataactgatctttgatacattgttccatctgaaaaatctgcttcttctgaatgagatgtctgctgaaaatatatatgttaagaaaatcacgtcgcgagttcgtcgtgatcttcttaacttccacatctgaaaacagcaaacggacatcatcgtctgctctcaacgtcggaaatacatgaaaaaattttttatcgtcttttacctgttccaaatcaacagctcctatatattcttttacactgataacagtaatacgtattctttttagctctcttcatccggcatgatccgaatctgtcactttttccagtttaaaagttcctgccgcaatgtttccaaaagtttttcttcttttactttttttatgatctcgccttttttgatcagaagaccttctccgatccctccggcgattccgatatcagcttctcttgcctctcccggaccgttcactacacatcccataacggcaactttgatatcaagaggaatatcctgaaccatcttctccacttcgtttgccagaccgatcagatcgatcttcgtcctgccgcaagtaggacaggatacaacttcgatcccgccttttcgcaaaccaagtgtttttaatataagctttgcgcttcgaatctcttctgccggatctccggtcaaagaaacccggatcgtatttcctatcccctcgttgaggatgatcccaagacctatcgaagattttatatttcccgaataaaccgttcccgattctgtaataccgacatgaagcggataaggacatgcctttgcgatcaattcgtgagctttcacgcacatcagcacatcggaagatttaatactcacaacaagattgtcatatcccattttttcgatcatatgcactttgtcaagagcactctccacgatcccttctgccgttacaccgttgtatttttccaaaatatgcttttccaaagaaccgctgttcacaccgacacggattggtacattgtactcttttgccttatctacaacagcctgaaccttttcttccgagccgatatttcccggattgatcctaatcttatccgctccgttttcgatcgcggcgatcgccagcctgtaatcgaaatgaatatctgccacaagaggaatatgaatttgtttttttatttctttcaacgcctctgccgcttccattgtcggaaccgcacaacgaatgatttcacatcctgccgcctccaaacgcagtatctgatctactgtttctttcacattttctgtctttgtatttgtcatcgactggatcgttaccggatgagttcctccgatcttcacattgccgatcgcaatttcttttgtgttttccctgtacattctgtttctcctttttccgaactgtcttatcgttttattataacagaagagttccgtaaacggaactcttcttcatctgatttgctgttacttcttttctcttttgacaaatacaagctgatcgccatattcacgctctgttaatgtaagcgtatctttctctatactgtaatcatatgttcctgagagaagtccttccgcctgtgtatcctcagtgtgaatcgtaaaaaccttcgtttttgtatccacttctgattgcaccgtctcaaaagactttttatcctcgtctgtcagcgtaacttttccgttactttctatcttgatcacttctccgctgtcttcactgacccaagttcccacaagtggatttccgacaaagagtctcgtcacaaaaaagaccgctacgataactataagtattgatgatattgcaacaatcgttctccaaagcgtacttcttttctcttcattattttctaaaatcatagattatttcgtttcccttctttttctgtctcgcttcgggttttgcaccaaagcactctgttctgcataatttattttcttttttcatttctgtctgacaatcttagcgtcggcaaaaaattccggtacatggaaactcggcacactcgataagataggggaataagatgcataatgttcggcttcttttgactctgaaattttataaaaattgcatgtaaaatagcttccttctcctaaattcagcggtccgtaaatcttttccaaaattttaacgggaactttcaattctgccgtccagtcattttcatgcacttctgcatgacattcaaatcccacccgttccgcctctgtaaaataagaacggtacatccgtctggaaccatattccgcatgcaggactccgtttgcatttactgcaaaattcaaataattttcttcattcgctctcgaagaaaccggctcgaacataagataagcttccatcacgctgtctctgtaaatcgggtcattgatctccgtataaacacgaagaggattcttttcttcacagatcagcttcaaatagaatgcatcttgaggaataaatccgatatatccatacataggaggaaatttctcagttccccataatgcattttccacacgaaacggaatcagatcatccaactgctcttttctttctattattgcaacctctaatttcatacgatgcacctcctcggctttactacagagcacaactgttacagattaattatatgtttatatataatttatcagaaaatttgttgtttttcaatccttcgtattgccaattcaacgcacatctgctataaaatcattctccgcctaattttgatgccgcaaaccatcctgccgcaaatgtcaccactccgatcagcaatgtcacaacagagaacgcactccagtctgtctttaacaaaattgcgatcggcgatgcgatgatcagaccgatgatcgcataatatgcatggatctccgcttttgaaaaaataaattcgatcagctttgcaatcaggaagatcccgatcacgatcccgattccgaacggtatcaaaactttacactgcgtcaaaataccatttatatcaaaagctacaacagcgtcaataaattgattgattgttttcagaatcgtatcataatatccgagaagcataagcatcatagatccgcttactccgggaacgaccatcgttgcagccgcaatgataccaacgctgaacaacttgatcatatttataattccgaaacttacatctgccgcttttccgtttgtatccccaagcaaagccatcagtatcactattccgaaaaagatcaaaaatgcggcgatcttccctgttgaaaccgagtgacctttcactttattaaaaataaacggaagactgcccgcgatcaatccgcagaaagcaaaatttgtcggaatcggataattttccaaaagaaactcaaacaaccttgaaagaataacgattgccgctcccgctcctatgaaaatcggaataagcagtttcatgctgttcttaaattctgatttcagatgcgtgatcgcatgaatcagtttatcgtaaagtcccattgcgaccatcattgttcccccgctcactccgggaataatattcgcaattccgacaaccataccttgtaacaatttttttatcattttctatgctcctattttctttttcaggaaatcaagaaatatcttcatctcctcatctgtgcctattgtgattctaagataatcttttatcttaggatcattccaatgccgcacataaattcccgcttcttttaattcttcaaacaatttaagcgcatcatatctcggatgagtcacaaacaaaaaatttgcctttgaatctgtacattcaaatccgagatctctgagttgctcttttacattttcccgcgtttgtactattttacttatatttgttttaaaatattccgtattttccaaagctgccgctccacatgagattgccgcacagctcattgtataagaattaaacgaatattttacatcatttaaacaacggatcaattccggattggaaactgcatatcctattcgcattcccgccatacttctagactttgaaaacgtctgcgtaacgatcagattatcgtaacggtcaatcaagctgatcgctgactttcctgcaaaatcaacatacgcttcatctatgatcacaatattgtctctgttatgacgcaaaatgtcttcgatgaaatccacttcctcataaatcgccgtcggggcatttggattcggaaaaatgattcctccgtttactttgtaataatcttcttttacaattctaaactttccatctaatttcgggcagacatacggaatcctgtacaaatttgcccatacctgataaaaagaatatgtaatatcaggaaataatatcggtttttccgaattaaaaaacgtaaggaagcaaagcgaaagcacatcgtctgatccgactcccacaaaaatctgatcttctcctacttttaattgatccgcgagcgcttttataagcttccctgaggtcggatccggataaagacgaaattcatcctctttcagttcatcaaaaaccgctttcacttcgggcgccggggggtatgggttctcatttgtattcagtttcactaccttttgccgcggctgttctcccggaacatacggatccactatacgtatattatttaaaagttcttttctgaccgtcattgtctcttctcccgcacatggctttttacattcttactatttatattctccggcaagttctttaaatttcggcaatgaatttacgattgtctcgtaagccacacaatatgcgatacgcacatatcccggacatccgaacgaacttcccggaacgatcaatatgttatatttctttgccgctgcgcaaaacgccttttcatcttcaaccggagatttgacaaagagataaaatgcgccttccggtctgacacattcaaatccgagctcttttaacccgttataaagcgcctctctgtttctgtcataataagaaatatctgttttcgcattcaaacatgcctttactactttctgctgaagtgtcggggcattgacaaatccaagaatacgcgtcgctacacttgctgccgaaatcaaatcttcgctgtctgaagcttcacttgggatcacaagataaccgattcgttctcccggaagagaaagcgatttactgtaagaatatccaacgatcgtattcgcataatacttcgtcagataaggaacttccactccgtcatatgccagctctctatacggctcgtccgaaataagataaatatccgttccgaattctttctgtttcttctctaaaatttccgccattttttcaatcgtctcttccgaatatacaactcctgtcggattattcggcgtattgacgatcaccgctttcgtctttgccgtgatcttttcttcaaactctgcaagtttcggctgaaatgtctctgtatcaggtgacacttcgacaagcacaccgtcataattgctgacataacttctgtattctccgaaatacggtgcaaatacgatcacttcatctgccggattcagcaaagattttaaaataacatttaatcctcctgccgctccgacagtcatgacgatattttttccttcaaattctgtgccgaaccgttcgttcaaagactgcgccaccgcttcgcgcacatccgcataacctgcgttactgtttgtataaccgtgaagcgcgatcggatcttcctcattcagaagttcgatgatcgcatttttcacctcttccggcgccggaacgttcggattgccgagactgaaatcaaatacgttttccgcaccgtaaatctttgcgagacggtttccctcctcgaacatcgctcggatcgcagaactgtttgccaccatattttccattttttttgatatcatagctgtcactccatttcttttacaattcctttttcctcaagaaaagccggtctataagaaagtttcgccttgcgaagtccctcggctccggtgtcctcctcacgattcacatattcatactccatacattcatgctgtacaaactgctgattgatcatcggatacgccccgtctacttccgcaaacgctttttcaatatgcacgacaaatgtgtcgtcgctgaccggttctccgactgtaaaggctacgatctttccgtctgcttttaaaacgccgccttttaatcccaactctttatataagcgcaaagaattcagcgtcacgcacatctctgcatttttttccggatcatcttcacatccgtttttatttctccattttagagccatctggaagcagtcttccacattatcgtcatttaacggctcatagctccaatccggataaagagccttgaatttattgatatgattccgcttcccatgaagcttttttcctgccagagaagcaagtttctccgtctcatacacataatctgccagatctcggttatactcgataaaaaactttttcggataccacttgtcaagctgtgcaaacatatgcggcgttacattatacaatataaaaggaacgtctttctctttgcaatattccataagaaattcaagcgctttcttaacattctccggttctcccgccggataagtaaacgaaagatttttcccgctgtctctaaaaacaagtgtatcttcgatgattgcatactgtactttgtaatgtcttgaccatagatatacattcacaaatgttctttcacagcttctgctttgagctttttcaaaataagaggaaataatttctttatcttccagttccggccgtttaaacgtaggttctgtcataaatcttatccctccatttttgcaagcttcgctgtttgatctgctgctatcagactgtcgataatttcatccaaatctccgttcagtattgtatctaacttatgaagagtcagcttgatcctgtgatctgtaacacgtccctgcgggaaattatatgttctgatcttttcggaacggtctcccgtaccgatctgacttcttctagcctccgcttctgaagcctgttgtttttccaattccagatcgtagagttttgaacgaagcagacggaatgctttttctttattttgaagctgagacttctccgtctggctgtaaattacaattcccgtgggataatgagtaagacggactgcggaatcggttgtattgacacactgtcctccgtttcccgacgcacgcataacgtcgatacgaatatctttctcatcgatcactacgtcaacttcttctgcctccggcatgattgcaacggtaatcgtagatgtatggatacgcccgccgctctctgtttccggaacgcgctgaaccctgtgaactccgctttcatatttcaatctggaataagctccctgacctgttatcatgaatacgcactctttgaatcctccgattccgttttcgttcaaagagatcatctctgtcttccatcttcggctgtccgcataatgaacatacatacggtagatctcagccgcaaaaagcgccgcttcatcaccgcctgcgcctgcccggatctcaacgataacgttcttatcatcattcggatctttcgggagcagaaggatcttcagctcctgttccaattcttctacacgttttctcgaatcgctcaactcttctttcgcaagttctctcatctcttcgtcagactcttcctcaagcatcgccagactgtcttcgatgttctgcctgcactgcttgtactcattgtaagcctctacgatcggcgcaagatcactttgctctttcatcagttttctaaaccttacaggatcgtccgccacacccggctcctgtaactctcccataacttcttcatatcgaattaacaaatcttctaatctgtcaaacatttctcttatcctttcctgtacaccttatctgtatactgtcctgtatattttctatacactttgtaaaactacccactgtctaaagctaatgggcttgcggcaaacttattttcaactatacatgccatatacgacgcggtcaagtcctgcaagatcttttttcacttcaatattttcatacccagcctcttgaagcagcgtttttaccgcttccgcctgatcgcttccgatctcaaatataagccatccgccgcgctttaaatactgtctgctttctttcacgatgatccgataaaaataaagaccgtcctcttttccgtccaatgccttgataggatcgtgaaatctgacttcctcttggagccgctctatttcagatgtccgtatgtaaggcgggtttgaaagaatcatatcaaaacttccttctacgttttcaaacagatctccttgcacaaacttcgcttctataccgagctttttcgcattttcaaccgcaacagccagcgcttcttttgaaatatccgagccgacgccgtaaatatctatttttcgtttccttcttacataatgcagcatactcaaaagaatgcagcctgatccggtacaaagatcaagaatccggactatttccttatgtttcttttctttttcaagcagacacaaagcctgttctacaagaacttctgtatcctgacggggaataagtacatgttcgtttaccagaaacggaagtcccataaattcctgtaccccggtaatatgttggagcggaatcctctctgcccgccttttgatacactcttcatactgtattttttcttcttcagtcaattctttttccgggtatgcataaaatactgccctgctgatctttgtcacatattctaataaataccatgcatcgatctttgactcttcgacgcatgccttttctaacaattcgacgccccatgcatacgcttctttataattcattgttcttctcctgccactcccgccagtcaaacactttctctaccgcacagatcgccacttcgatcatactgtcatccggttctttcgtcgtcatattttgaacccacattcccggcttactcaaaagattcacaaccggattgtcactgttgcctgccaatttgatgatttcataagaaacacctgcaataaggggaagaagcgccaacctgataacaatgcgcatcacctgtgactgcgccgtaataaaaaagcaaaatatcacacttacgatcatcacaaaaaagagaaaacttgttccgcatcgtttgtgctgttttgaacttttcctcacattttccacattcagttctaatccgtgttcgatacagttaatacacttatgttctgccccgtgatacataaaggttctttttatatcttttgtccttgaaataagaaaaatataaatcaaaaagatcgcaacacggatcacaccttcaaaaacagtcaccgcaacacgggatgacgtcacccgtttcaaaagtccgctcagcacatagggcagtatcataaacaatgccgcagccgccagcaacgaaatgactaccgtaatgttcataatgatcttctctttcttttctctcttttgcgcctcttctttcgtcaaaagttcgccttcctcttcttcctcaaaaaacgaagcagaatacatcaacgtcttcattccaagaacaagagaatccacaaaattaaatattcctcttataaaaggaattttcagaagaactttccacggaatcacactatgataatcccacacttctgattctatctctccatccggctttcgtactgccacagaatactttccgccgtttctcatcataatgccttccagcactgcctgtccgccaatattcgatgatcgcataatttccctgctttctcctttactgtctgccggaatcttaactaagagaattgctttctcagtctgacctgtacagatttttaattactgaaaaactaacgtattctcagtaaagaaaagaggctgagatgatcccacctcagcctgcttcattcgcttcttatttaataccgtattttttattaaacttatcaacacggccgcgtgcctgtgctgctttctgctgtcctgtatagaacggatggcatttggagcagatttcaacgtggatgttctcttttgtagaacctgttacaaatgtgtttccacagttgcaagtcacagttgcctgatgatattctggatggattccttcgcgcatgattttcacctctctatttcaaaatagttattataatctctaaacagcttcctcattgtatcacaagttatttccttttgcaactattttttagataaacttctgacgaataacctgctgcactaattctgcatttgattttgtcctcgaaaacatattgatcagattgtctgcggcttcttccgctttcattccgtttaacgccttccggataatgtaacttgcttcttgttcctctttattaagaagaagatcttctcttctcgttccggaacgcggaatatcgattgccggaaacactcttttctcctgaagttttcgatcaagcataagttccatatttcctgttcctttgaactcttcgtatacgacatcgtccatcttacttcccgtttctacgagagcagtggccagaatagtaagacttccgccttcccgcatttttcgggctgctccgaaaaagcgcttcggactgtaaagagctgccggatcaagacctcccgacaatgttcgtcccgatggcggaacggtcaggttatatgcccgtgataatcttgtaatactatctaaaaggatcattacatcccggccatgttctacgagacgctttgcccttgcgatcaacatctccgatacccttttatgatgttccggaagttcgtcaaacgtagaatatattacctctacattcggcccttcgatcgcttctttaatatcagttacttcctccggccgttcatcgatcagtaatataagaaggtgcatgtccggttctgttttctgtaccgaaagcgcaacttcttttaaaagagttgtttttcccgctttcggcggagaaacgatcatccctctctgaccttttccgatcggcgaaatcaaatccataatccgcatcgccgtactgcttcccggctgttccagacggattctgtcttttggaaatatcggcgtcaactcttcaaagttcggtcttttcgcagcttccgccgggtgatatccgttgactgtagttacataaagaagggcgctgaatttttcactctgcgttttaatccttgtatttccagacaatatatctcctgttttaagtccgaaccggcggatctgtgcaggtgagacatatacgtcattttctcccggaagatagttgtcacttctgataaatccaaaaccgtcgggcatgacctctaatattccgcttaccgagcatccgctgtcaagctgttccatatctgtctccggcttcttatccttcgcctctctatgttccttattttctttcaattcagaagctgctttttcctctctattttgattttgcatttctttcaaatgctcctgcgaactttctttttgttccgaaagcttctcctgatcttcctgctcgtcaagagagatcatcgcttcgatcaaatctgctttttttaatgtagaaacgcctttcatttttctcgcttttgccaactcttttaatgttgccagcgggagagattcatatttttctcttgtcataatccaaccctttcatgaaatataagaaatataaacaaatcggtttcttcaattttttctaaatgctccgggaatcactgtctgaattgacataaaattgatgaattcactaaacatgtgtacttattatacatttcgttcatgcccttgtcaagacggggggagaagtgctatgataatagcatatgtgcaaaacgataattacaagcgaggtaatcaaaatgtcaaatagcgaaaaagcacttcagatgcatgaacaatggaacgggaaactggaaacaacagcaaaagcccacgtcaattcccgcgaggatcttgcgatcgcttacactccgggagtagcggaaccgtgtaaagttatcgcaaaagatccggaagccgcatacaaatatacaatcaaatccaacactgtagcagtcgtttccgacggaagcgccgtacttggcctcggaaacatcggcgctcttgccgcaatgcctgttatggaaggaaaggccgtacttttcaaagaattcggcggtgtcaatgcagtaccgatctgtcttgatacccaagatacagaggagatcatccgtactgtcgtaaatattgctccggcattcggaggaatcaatctggaagacatctcggctccccgctgttttgaaatcgaaacacgtttaaaagaactgcttgatattcctgttttccatgacgatcagcacggaaccgctatcgtcgtacttgccggaatcatcaacgccctgaaagtaaccaaaaaagagaaggagacatgccgcgttgtcgtaaacggagccggcagcgccggagttgcgattacgaaacttcttttaaattacggtttcaaagacattacaatgtgcgatattaacggaatcatctcaaaagattcagagaacttaaactggatgcaaaaggaaatggcaaaagtgactaatttaaaaaatgcttcgggaactttggccgacgctttaaaaggcgcagatatttttgtcggtgtttccgctcccggcatcgtcacaaaagacatggttgcttctatgaataaagatgccattttgttcgctatggcgaatcctgttcccgagatcatgcctgatcttgccaaagccgcaggtgcgaaagtcgtcggaacgggacgttcggattttccgaatcaggtaaataacgtagtagcttttccgggtatctttaaaggcgctttagaaggccgtgcttctcagatcacagaagaaatgaaactcgccgctgcaaaagcgatcgccggacttgtcccggatgaagaactttccgaagataatattttacctcaggcatttgacccatgtgttgcggaaacagtcagccgcgcaataaaggaattgatttaatggcgcctgttttttcacagtttcagccagatggggaacgttatcgttccctgaatctctatcttaagaaactgttcggagaaaaagtatataaggtcactttaaacggagggatgacatgtccgaacagagacggacatatcggaaccggcggatgtattttctgcagtgcgatgggatccggtgactttgcgggaaacgcttcgctttctattaccgaacaactaagggaaggcaaagacgcaatcagaaaaaagcgccccgtacgcaaatttatcgcttattttcaagcgtttacaaacacttacgctcctgtagatcatcttgaaaaaatatttaccgaagcaataaacgatcccgatgtctgcgctctctcaatcgccaccagacccgattgtctgcctcctgccgtacttgagctgcttggcagattaaaccggatcaaacctgtctgggtagagttgggacttcagacggtcaattccgaaacggcacgtttcatccggcgcggatatccgacggatgtatttgatcatgcggcgcaccggcttcgtatgcttggaatcactgtcatcgttcacgtcatcctctttcttccgtacgaaacgaaagaaatgatgttccatacgatcgatcatttgaacaaacttgatattcaggggattaaactgcagcttcttcatatattgaaaggaacagatctcgcagccgtttacgaaaaaacacattttcacgtacctgatatggaagaatatatcgaactgctcgggtcatgtatcgcaaaactgcgccctgatatcattgttcacagactgacaggagacggacctaaagaacttcttatcgcgccgttatggacaagcgcaaaacgaaccgtcttaaatcggtttcatcaatatttaaagcaacaagacatttggcagggaaaggattatcatgtctgaaacatttacactgtataaactaatcatactctatatgctgaacaaagttgattttccgctcaccacttcccagatatcggaattcgtactggataaagggtacacaacttattttaaattgcaggaggcaatctccgaactgacgcagtccgagctgatccgcaccgagacaacccacaatcggactctctatcatctcacagagagcggtgcggaaacgatccattatttcagcaataaaatttcatccgccatacgcaaggatatcgacgattttctgaccgaaaaacaatatgacttaaaagaagaagtatctgtaaaagccgactactatctaaacacaaatcaggaatacgaaacaagatgtcagattgtagaaaacggtttcagcctgatcgacttaaaattaactgttccgactgaaaaagaggctaaagccatcacaaatcactggaatttaaaaagtcaggaaatctacacattactccttacgaatcttctgtaagtattccgttatcgttttttcgtatccgagtatgcccggttcatagaatcgggcattttttatttcatcaggaaggtactgctgtttcacataatgatccggataatcatgagcgtacttataatctgtgccatgaccgagtttttttgcccctttataatgcgcgtctctaagatgtgccggcacgcttgtctgatagttcctcaccgcttcatttgccgcaaaaatcgcattgaccgcagagttacttttaggcgcacatgctacatacgtcactgcctgagataaaataatctgagactccggcatgccgatccgctctaccgcctgtgccgccgaaacggcaaccgtcagagccatcggatctgcatttcccacatcttccgctgcgcatatcataatgcggcgggcaataaacttgacatcttctcccgcatacagcatttttgccaaataaaacactgccgcatccggatctgatccacgcatacttttgataaacgccgaaataatatcgtaatgattatccccttttttatcatagtttaccactcttttctgtatacattccgaagctgtttcaagagtaatatgaataatcccgtcttctgaccgttctgtcgttaaaacgcccagttcaatcgcattcaacgcgcttctggcatctcctcccgacatatccgctaaaaattcaagcgcttcttcttctatcttggcgccaaaacttccgagacctttttcttcatcttccaccgcacgtctaagcaatattttaatatcttctttctcaagcggtttcaattcaaacacggcagaacgggaaagcaaagctccgtttacctcaaaatatggattttctgttgtagccccgatcaatatcactgttccgtcctccacaaacggaaggagataatcttgctggcctttattaaacctatgaatctcatcgataaaaagaatcgtccgtttcccgtacattccctgcatatctttcgcttcttttacgacttcctccatatcctttttccccgcaacagtcgcattgatctgcttaaattctgcacttgtcgtatttgcgatcacttttgcaagagttgttttacctgttcccggaggaccgtaaaaaataacggaactaagcttatccgccttgatcgcccgatataacaatttatcctttcctataatatgctgttggccgaccacttcatccaaagtcttagggcgcattctggatgccagcggcgattctttttccttctttgtctccctcatataatcaaataaatccatctggttcttcctttcgtcactcttcttgttttctctgtaaatctactctgcctgtatcaaactgcggattacttctcctgcgatcagcaagcccgcaacaggcggaacaaacgaaacacttcccggaatggttcttcgcattcccttctcttcttctgtcgtacgcccctctgcgctgatcggcttttcctttgaatacaacactttcaaatgtgtgatgcctcggtttctaagttcctttctcatcactttacaaagaggacatacacttgtttttgacagatctgtaatctcaaacatttctgcatgaagcttatttcctgtacccatgctgcttataatcggaatattccgttccccggcaagttccgcaaggacaattttcacactgaccgtatcgatcgcatctattatataatgaatagttccgatctgttccagaagttcttttgcattgtccggcagaacaaaagtctcgtatgtttccactttgatattcggatcgatgtctttgattctctctctcatcacatccgttttcattcttccgatcgtactatgataagcaatcgactgccggttaatatttgtaagcgatacatcgtcattgtcgatcaatatcaatctcccgataccgcaccttgccaatgcttcgatacagtgagatccgacgcctcctacaccaaacacggcaacagatgctttttttaatttttccatattttcactgccaattaaaagttctgttcttgaatattcgtttatcatccgttctcctatcctgttctttcaaactatcaattaataatcaattcgtctgctgtcacaaactcatatccttgtttctccataatatcaacaatctgtaatgcggcctccaccgactctccgtaacagtcatgcataaggattacatctccttcttttgtatccgccgttactttctcgacaattttttccgtgtcttttgtaacccaatcaagagagtcaaccgtccatttcacatatattttatcgggatcttcttctccttccggcattgccccaaacggcggacggataaattccgtctcatgtcctgtgatctttttaatcgcctcatctgtagttttaatctctttttcagcctctctgccgctgattttcgacagatcgacatgacgatatgtatgatttccgatcaaatgaccttcttcatacattctttttacgatttttttgctttcttcttgttctgtgtttgctccgatcagaaaaaatgttgctttgatcccccgttcttttaaaccgtccaaaagcatcggagtatactttatattcggcccgtcatcaaacgtaagcgcaatcttcggtttctgctcttctccccctgcacattccgccgcaacatcttctgacgccgttgaaacagccgtttgaaaatcaaatggaaaaaagcgcagcactgctgccaacaccaagatctgcatccatatttttctgtttcgctccattgcatctctgcctttgatttctttcactttccagtatatgttcttcttctcttatagatgcaaagcgttccgttttgcaagatataccgtcatatttttcttacacggctctttctgtactctgacggactttcccctttctgcttacgaaaagcttttgaaaaataaagattattttcaaaaccgaccgaataagcaatcgccgagaccgaaagatctgtctctcgcagaagtcgacacgcctgcttgatcctgtattccgtcaaatattctttcggcgatctgttcatataattttgaaaagaacgaaacaaatggcttctgcttatcccgacataggaagcaatctcttctaccgtaataggatatgaataatttgtttctatataactctccgccttctctgcgtaagtcagctgtatcgccttttctttctcttcatgctctgcgtaatgcataaacactgccagcagactgtacatctcccctgtcatagcgacagcggcctcatatgtatttcctttcgcattataaatccgttccagtccgtcacgtatcttttctgtcggaatcctcccttttaaaatatacggagtctccctgctaaattctgtatttctgataagagacgccgcatccgcgcccataaaccctgcccatgcatattcccacggcttatccgcatctgcctgatacctaagctctactcccggatagagaataaacgtatctccttcttccaaatgctttgacacagttcccgtacaataacatccgctccccgacaaaatgtgatgaatacaatagtgatctctcactccgggcccccactgatattcgggatcacatttctgatatccgacattatatacggacaaagaattcagcagattttcccctgttttatacgaatgtttatatgatgcttccatagaatcccctttcttgatccttcgtttcatatcccgatcatcaaactatatccattataaactttcccttattataaatgcaacatttttacatggattcgcacggattttttatagaccttttcactgctttcatcctatactatagacagaaaatttcgagaaaataaaaaactttccacaaattaattaacaaaaaacagaaaaaaggagtccgatcatgctttatgaatcaatcaaaaaattagtgcaatatgggatagataccggtcttactcccgaatgcgaacgtgtttacacaacaaatcttcttcttgaactctttcatgaagacaactacgaagacatcgaatgtacttccgacaaccgtgatcttgaggaaattctcaaagatcttcttgacgaggccgtaaaacggggaattatagaagacagcattacataccgtgatctttttgacacaaaaatcatgaactgtctgatgccgcgtccttcacagatccaaaaagaatttcaggaaaaatataacatttctcctgaggaagccacctcttactattataaattaagtcaggacagtgactatatccgccgctaccgcatcaaaaaagatcgaaaatggacagtcgaaaccaaatacggcacacttgacattacgatcaatctttccaaaccggaaaaagatccgaaagcgattgccgctgcaggaaaagcgaaatccgcttcctatccaaaatgtcagctctgcatggaaaacgaaggctatgccggacgttccaaccatcctgcaagagagaaccaccgcatcatcccgatcacgatccagggacgcagctggggattccagtattctccttacgtttattacaacgaacactgcatcgtatttaacggcgaacatgttccgatgaagatagacagaaatacatttgccaaactgtttgattttattaaactatttccacactacttccttggatcgaacgcagaccttccgatcgtcggcggctctatcttaagccatgatcatttccagggcggaaattatactttcgccatggccaaagctccgatcatcgaaaactttactgtgccgggatatgaagacgtggaagcgggaatcgtcaaatggcccctttctgttatccgtctgagaggagaaaatacggaacagattatcgaccttgcagatcatattctttcaaaatggcgtacttatacagacgaggaagcatttatatttgcagaaacagacggggttttacacaacacgatcaccccgatcgccagaaaaaaagacggtatgtatgaacttgatctgacgcttcgcaacaacattacaacagaagaacatcctctcggagtatatcatccgcacgaagaacttcaccatatcaaaaaagaaaacatcggtctgatagaagtaatgggtctcgccgttcttcctgcaagactcaaaggagagatggaacttctaaaagaatatatcatagagaaaaaagacatccgaagcaatgatcaaattgcaaaacacgcagactggacagatgcctttctatcagagtacgacaatgttacagaagaaaatatcgaacagattttggaacaggaagtcggaaaagtattttgcaaagtactcgaagacgcaggtgtatataaatgcacagatgaaggaattaaagcctttaaacgtttcatttccacactctgatggatatacctctgataaacttctcctttggcaatatatccccttcggaaagggagtaaaaaagaggacctttcgttcattttgaacgaaaggtcctctttttccatagagactgttatttcacagcctcttttcataacacgcctttcacttataaaaaacaagacattttaatatttctgatatcgggctgatccgaaagcgatcatcataacaaaaatcggctcaaggaaaatcagtccgatcgtaaacccaagtccttttccgaagcttttcgccagattcacacaataaaacacagacaaaacgatcgttaccagtccgcacagacctcccagaaatcccgaaaacgaccagaaatctccgcctgaaatactggaaaatatactttccaacactgtaaatatgaaataaatccaaaacatattcggagtccacgcgatcttataagccgtatatgtattatataccggaattatagacttccaaccggcctctcccgctttcataaacatcagccagtttgcgagaatcgtcaacgcaaaccagattaatgccgcagcgccatagaccactcctccgatcgcgagaaatagcatagaaaatattgcccaagccatatcgaaacctcctgttttcctgtccggatcgcttccatgagatactttcaggaagcgttatccataaatttattcccattatacttctttacaatcaaaactacaagagaacattttttctattttaaagcgctttacgaaaaatctttcaagccatccagtttttttctcacttcttccatttttacagaaaactcttcataaaatccgttttcatcatcagcccgatatggcgcctcaaaaaagctcctcagcacatatagagtcaatatatttctgtttttatcatccagcccgaagatcgcattttcacaatctttcagaaatccatgccacttccatatatagtcctcatacgctttcaagtttgcaattccgagccatttttttatttttatcttaccacgttcctttctcgcacattcatggatctggataaaatattttattccgttttcttcataatatctgccaagaggaaacagacggcagatacccggtctatatgcatgtatgctgcatctgccatacacatctaaaaacggacagacatctccttccggcgtcatccgcacgttcggcaatatcataccgtctacaatccccagctcaatttcctgttccatcaaagccgtaaattcttttccgaccccttttttaagccgccatatatccataggatctaatttgatcgagtcacccattcctctgcagcatgcggaacaccccgcacagtcatgacaatccgcttttaccatatctccggacgaatagagacgcccgtctgatatttcattcaaatcaatatttcgtttcattacttctcatcctctgataactctgtatttctatgcatcaaatcttccagtgtgataccatcaaaataatcattgatcattttgtgaaaatcagtccacattccaattgtgtgacactgatcttttctttcacagacaggtgcattgcattccaggcatgagaccggagcaaggtttccctccgtaagacgaaggatttctccgaccttatattcttttggttcacggcagagacgatacccgccgccttttccgtgaacgccttctattaatccgttttttgtcagcaccggcaagatcctttctaaatacttcaaagaaataccttgccgggcagccacgattttcatcgcgacatgcccggactctttattctgtgcaagatcgatcatcactcttaaagcatatcttccttttgtggagatcaacattcagcacttctcctttctcatgctttttgaaagtcaatccgcgaacatcggtgtcgacaaatagcgatcccccgtatcaggcagaagcactacgatcgtctttccttcattctcgctgcgttttgcaagctctattgccgcccaaaccgctgctccggatgaaatgccgacaagaataccttctctttgtccgatcatttttcctgtggcaaatgcatcttcgtccgaaactgcgataatctcgtcataaacatttgtatttaaaatttccggaacaaatcctgccccgattccctgaattttatgcgctcccggaattccttctgaaagaactgccgacgacttcggctcaacagccacgatctccacgtctttctttttcgatttcagatattctccgactccggtcagggtacctcctgttcctactcccgccacaaagatatcgaccttcgcatctgtatcttcgtagatctccgggcccgtcgtgtcccgatgagcctgtggattcgccgggtttacaaactgacccgggataaagctgttcggaagttcttttgccaattcttccgccttctcaatcgcacctttcattcctctcgctccgtcacttaacacgagttccgcgccatatgctttcatgatctgcctgcgttctaccgacatcgtttccggcatcactataataatgcggtatcctcttgccgctgcaacagccgcaagaccgattcctgtattcccgctcgtcggttcgataataacagaatctttctttaattttccgcttttttcagcctcatctatcatcgctttcgctactcgatcctttacagagcctgccggattaaaatattccaattttgccaggatttttgctttcagcccatgttctttttcaatatgggtcagttccataagtggtgtttttccgatcaactgatcggctgatgtataaatcttagacatattattatctcctttttcatgtttcaattttattttctcacagtttttcaacagatgcaaatcccttttccaaatctgcgataatatcgtcgatatgttccgttccgattgaaagacggatcgtattctgccggattccctgctcctgcagttcctgtgcgttaagctgagaatgggttgttgttgccggatggatcacaagacttttgacatccgcaacatttgccaaaagagaaaatatttccaaatgatcgataaactcgtgcgcttcttttattcctcccttaatctcaaatgtaaaaatagaacctccgccatttttgaaaaacttcttgtataaatcatgatccggatgatccgccagaagcggatgattcactttttcaacaaggggatggtgattcaagtattcgatcacttttttcgtattttcggcatgacgttccaaacgaagggagagcgtttctgttccctgaagcaaaagaaatgcagcaaaaggagagattgccgcgcccatatcacgcaggatcaccgcccggatatatgtcacaaacgccgcgcccggagccgcctgcgaaaacacaactccatgatagctgtcatttgggtctgtaatagccggatactttcccgaagctttccagtcaaatcttcccgaatcaacgataacgcctccaagtgttgttccgtgcccgccgataaactttgtggcagaatgtacgacaatatccgctccatgttcgatcggccgaatccaatacggcgttccaaacgtattatccaccacaagagggatctgatatttgtgagctaattctgccagtgcatccatatccggaatatcacagttgggattgccgagcgtctcgatatagagcgcttttgtctgctctgtaattgcacgttctaccgcttccagatcatggatatctacaaaacttgccgtaattccgagattcggcaacgtatgcgccagcagattataacttccgccataaattgttttctgcgaaacgatgtgaccgccgttctgcgccaatgcctgaagcgtatatgtgatcgctgcagctcccgaagcaaccgccagagccgctgaaccgccttccagcgccgcgatccttttttcaaatacctcctgcgtcgagtttgtcagcctgccgtaaatatttccttctgcctgaagaccaaaccttgccgcggcatcggcacagtcgtgaaaaacatatgatgtcgttgcatagatcggaactgctctcgcatctgtcgccgggtccggacgttcctgtcctgcatgtaactgaattgtgtcgaatttataatctgccatatcttatcttcctttctgttttttacctactaaaaaggttggtattaagatatcacttaacaccaacctcgtcaagagttttttcatttttttcattataaggaaaaattatttccttatttctctgcttccagcaaatatacgcatgccccatatggctctaacgacaaatctctttcaaacgtctccgccgcgttataatttgaaatcaaaagtctgcttttcttagcctgcaccttttcttctatatgataattgatcgtcttatccgtaaagtttccgactacgagaagcgtctccttttctccctttctaagatatgcatatacgctttcattttccttatccaaaagctcatataccccatctgtaataatcggcatttcatggcgaagctgaatcagtttttgataatagtaaaaaatcgaatcctgatctgcaagacactgttccacattgatctccttacagtttttattcactccgatccacggagttccttctgtaaacccggcattgaccgtattatcccactgcatcggagttctcgcattgtcccttgatttcaagccgagaagttccaatgtatctttctcggaaaaaccttttctttccgtaaaatcccgaaaaatatcaagcgcttccacatctttgtactcatctatagactcaaaatgagcatttgtcatccccagttcttctccctcataaatatacggagttccctgcatcatatgaaggatcgttcccagcattttcgccgatttaacacgatacggttctgattcatttccgaaacgagataccgcccttgcctgatcatggttgctccagtaaagactgttccaaccgtcacattcatgcattgtatcctgccatttcgtcatcacttcttttaaatctgtcaatttcacgcggtttttagcatattttccattttcatcataatcaagatgcatatgatcaaaatgaaagaccatattcagttcatgccgatccgaagctgtataaggcgccgcctcgtctgcacttgtatgaggagcttctcctacagtcataatatcgtatttgctcaacacttcccgattcatttcctgtagatattcatggacgcgcggaccgcttgcacagcctgcataataacttccgtatgctttgttttgaatcaccggaccatcgggataagccggatcttttgaaatcaaagtgattacatccatccgaaatccgtcaatccctttttccagccaaaagcgaagaatctcctgtacttctttccggactttagggttctcccagtttagatcaggctgctcttttgcaaacagatgaagataatactgcgctgtctcttctacatactcccatgcaggtccgccaaagcttgatccccagttattcgggatcgtatctttccatatgtaataatcatgatatggattttctttccctttttttgcttctgtaaaccacggatgtttgtccgatgtatgattgacaacaagatccaaaatgatgcggattcccttttcatgagcctcttttagcagcatgtcaaaatcttccatcgtcccaagctgcggctctatttttttatagttcgatatatcatacccattatcaacttgcggtgattcataaatcggattcagccagatcacatctactcccagcttttcaagatacgacagtttttctctgattccgttcaagtccccaaatccatcaccgtccgaatcatagaagcttttcggatatatttgatataccacgctttttttccaccatgctgtctgattattcatcttcctcatcctcgtcatttgaaacctcatttacgtatttcagttcttcttttgccgtctcaattatttctttcattctctcttccgtaatatacttcccttgcggttccatagcaatttgaaatgcaagaggcagattcataccgcttacgatatgtgtatgcggtctcgtacggtatttaaaaaacttttgatttacacttccgaccattaaatccgtcaatacaacaacttcatcttccccctcgaatccgtccatcacttcgtcaaccgcttcttctaccggacgattgtccacataagctgacaatgcgatcgtttcctgtatccctccggaaataaaattcaatgtatctttcatcccatccgccatcttctcatgagatgctattatcaaaattcgtttcatatgattctccttcctttccagtcatcatactttttatacagttaaaatcccaaaaaacgcacatacaagtgaaattacaataataagaaggatcaattttgtagctgtccattttttattcccaagtaatttatatacaaggagagtcaacaggaccggaagaagagacggcatgatcttgtccaaaatatccgtctgtaagttcaatgccacttcgcctactttaaaattcaaagctgtcgttatttttacagaagtagcaatcagcgctccgactacgcttaagcccatgatagatgccgcctctgtaaatactgtcagacgttttcctaaatttgtgatcaactttgttcctgacgtatatccgatctggaacatctttgattttacaaaccaaaatgcgatattgcacaaaagccaaataatcgcgccaagaggattcccctgctgtgccatatatcctgatatcgatccgatgatcgtcggccacaacacccatacaagagtatcgcccactcctgcaaacggtcccatcaaactcgttttcaaagattgaaccgtatcttttgccgcaattccatctttttcttccaccgcaagcgttgccccgagaatcatactggacataactgtcgtagagttgaagtaattaaaatgattatttaatgccattttatattcgtcgtcttttttataaatctttctaagcacaggcgccattgcccacacgattgccggacccatctgtgattcataattaaaaatattgcatgccataaagttatatcttgcagctgtttttctcagatcacgctttgtcacctgataacgttcttctgtctgtacatccgttccctgactcatttctttgttcatttcattactcatcaaaatcatctcccatctcatcggcatgttctgctgctgccatcgtcactgcatccgctttattaatctctgttgtaaaataccaaaatgctgccgcaaatcctataatcgcaattccaagaaccggtactcccaaatatgcggacagaacaaatccgaccaaaataaacggaaggaatttcttaaccggcatatatctcatcaacattccgataccgactacaggaagcatacctgccgcaatcgaaagaccgtttgtcacccactccggaataacttccaagatcagttccacgacattagctccgaagcatactacgatcactgtcgggattattgtctgcaaagaacaaagaatcggtccaatccacgcttccatgttcattgttttccattttccttcattattatctgtctgcatcttatgagcgacaaagtttaaaataattcttacaactacttccaactggattgccagaagccctaccggaagtccgactgcaatcgctgcatcgactcctgttccggttctcaaggcaataaacgttcctataatcgtcgccaaaccataattcggagcagatgctcctcccaaagctgcaacgccaagcgacatcaactggaatgttcctccgatcataagacctgtattcatatcgcccatgatcaaacctgatatcattcctacaattaccgaaaaccatgacaaaacaaccggtccgttctggtcaaccgtcatatatcctgccaaaatcacgatcaaaatattttgtattacttccatatctttcacctcaatctctctttaacaatccgattccgaaaaatctcatcacattaaacatatctcttttatccgaatctcttgtttcttaatatgcctcttctgcatctgtcggaacatattgaatcacaaccggtattccttttcccttgatcgtttcaagatcctctttttctttttcatttaatgcaataaatttagaaataggagttcttccgtcttcattaaacataatcccaagatcaactttcggtatctctacgccgccttcaatcagacggattaaagtttccggttcttttacaaggacaaaaactctttgaccgtcatatttccctgctttaaaattagcaatcgccgtctctgccgaaatcaccgatactcccgttcctgccggcttcgccattctcatactcgcttttacctcttcattgctgcaaagaatgtcgtctacaaccataaatctcttcacctgaagcgccggcgcccattgatttacgataatcccatgaatcaaacgctgatcaattcttgctaatactaccatttttgttcctcctcttttttaatcatttttagtttctttatttgtgtttttcgtttacaaatacgtctctgtttttcgtttggtatcgttaccaattttttgtttttaaaaaccggttctattttcataccggtttctgtccgatttatgccgactgtctgactatcagcttcaaatccaactcttttcttcttattccttctgattcaccttttaattgacgaaccatttcttttgccgcacatcggccttcatcctgtacaggctgccatatcgttgttaacggaatctggagataggatgccaatggctgatcatctactcccataatcgcaatatcctgtggtatttttacaccattcttcagcgcttccatcaccatgcctgccgcgacctcatcacttccggcaattaccgcatccggtttttcggaaagttccaaaatcttccgcataatctttcgcccgtcttccatttccctcactcccgaaaacagccatgccgtatttgccgcaattccgctttgagcaagcgcgtccatatatcctctatagcgatcgctgtcgatattaattcctttatcctgaagggtcactgctcttgttcctgtacaatatgcaatctttcgatatcctttttccaaaagatatttcgaagctttataaaacccttcatactgtctgccgcataccatcgaaatttccttgtcctgattatattcattgcagacgacaagttttccatattcgccatatgatttcaacttatcccagtcattctctatcgcacataaaatcactccgtcagcatgctgcatcttcagaagattcattgcgctttcttcactttctttttctccgtaagtctgcacgatcaatgttcggtaatgatactgtctgcaagttttctcaattgaatcgaccagttgtgcgaaaaagttatttgtgatagtaggaacaactaccgctatattcccggagcccgaacctcttaactgtcttgccgcctgaagcggactatacccaagagcgtccatagcctccagtatcttctgtctcttttcctccgaaacatgaggtttgttattgataactcttgagacagttgaaactgacattcctgacagccgagcaacatctgatatcgttgccaaaactttttccacctcacttttctctttgttttcttgtttatgtctttacaatatactcactttcgtcatttgtcaatcgcatttttggtatcgttttcatatttgtcaaaacatccaaaatccacaaatgaaatttggtagttttaacgaataggtttttgattttttatctttcataaaacttatcttttattctttcgtatcttttgaaggaccagaccgatcatcaatccaaccaaagccggacacacccatccaaaaccatacttcgacatcggaagcatctttgataccgcaccgagcatctcctgaagtttcacgattacatccgaattttttggcaaagctttcacaaaatctaaaatcgccgctgcagccgtaaacgctgtcacccaactgtatattcttctgtcattcccaaacagctttccgcataaagtaagcaaaataagtgtcactgccagcggatacaagaacatcaaaacaggaagagaatatgcaatgatcgcatcaagtcctacatttgcgatcaagaaagaaagaagagaaaaaatcactgcccacacacgataagaaggtccgttcggaaatatcttttcaaacgtctccccacagcttgtaacaaggccgatcgctgttttcaaacatgccaccgcaaaaatcagcgctaatataatctgacccggctttccgaaatagtattcggaaacgatcgcaaatgtctctcctccatttgccgccacaggaaacaccccgcggctctgcgcaccgacaaccgcaaccaaaacatagataagcgccattaataatgagctgaaaacgcctgcttttatcgtattttttgccactgctcccgactcctttatatcaaggcttctgattacattaacaacaataattccgaaagcaagcccggccagagcatccatcgtattatacccttccagcagaccggttgaaaaggcgccggacacatatgcgccggatgcctcgatcttactcatatttccggccggtgaaaaaagcgcccgaataacaaaaatactcaacaaaattaaaaacagaggattcagtattttcccgatccacgttaagatctgtcccggcttcaatgaaaaaaacaatacaacggcaaaaaatacaaaagagaatattcccaatcctgccatcttcccgccgtctgaaataaacggctctattccaactgtaaacgaaaccgtagcgcatcttgggattgcaaaaaaaggcccgatcgtcaaatacaaaagacacgtaaagaaaactccgtattttctgccgatctgactgcttaattccaaaagtccgtctttctggctgacgccaagcgccgccacaccaagaagcggaagcccgacacctgtgatcagaaaacctgccgatgccgcccacacatgatggcctgcaagctgtcccataaatatcggaaagatcaaatttcccgcgccaaaaaacatcccaaacaacatacttgcaacaaatatcaactctttaaatgtaagattctttttcatgttccacctgccttatacgtctgaatactataaatatttctcccattacatctatttcgttccgatgcggcaaacgcctttactgtacattttttatcaagaatacatccagtgtatcatatacacttccgattcgccagttttatttaagctttccttaatattccttaatattcccgcaattcccacaatcttcttattttcgatgatatacttattttatacttttaacgaaacacaaacacttaggcgaacttgctttttcacaactcccaacagccttttaaaacatatataaaggagaaactctatggaaactttaattttttatacctatgaatttgcggcttcgatccttcctttttcggctgcctttatttttctttcgcacaaacagaaaaagggcggagaaaaaacacatcttctgcccggcctgcttttatttctttttgccgtctacatcgtatgtgtatatcacgtcacaggaaccggcactttatgggatgcatttttgtatcgcttccaaacagaaatttcccacattaatcctatccccttttctgcgggaatcgatatggtcggatatattttgaatatcatcctgttcattccgtttgggtttttgatccctttaatctggaaaaaaatgagatcgctgcacctaaccgcccttgcaggattttctttttccatactgatcgaaataagccagttattaaataaccgacgaaccgatatcgacgaccttattatgaatactttaggagcgattatcggattcttaatatataaatcattcaagaaactgatgccaaccagacttcataataagttaaatgatttttcttatcctgtcttggaacttccgctctacattttcatcctctttgccggacgtttctttttcttccatgaaatgggatttgcaaaattgttgtacggattttaaatgcattttatcagatcagaagaaaacgtatttttaatgcttttctttgcctacatgcaagtatgtccgcagaaaagaaaaatttcccgcggacatacttgttatttctaacttgttatttctattttctgttgattatcatgcttattttcactctgcatatccattcggattctggctctgccatctccacgaatcttcacacatttcttctaatccacgctctgcttcccagtgaagttccttttttgctttggacgcatcgcagtagcatgttgcaatatcgcctgcacggcgcggtttaattacatatggaatctcttttccgcacgcttttccgaatgcttttaccatatctaatacggattgtccgtttcctgtaccgagattatataccgaaacaccgtctttttccttcagcttctctactgcgcgcacatgacctatcgcaagatcgactacatggatataatcgcgcacccctgttccgtcatgtgtgtcataatcgtctccaaatacgctaagacactccagttttccgatcgccacctgtgtaatatatggcatcaggttattcggaattcctttcggatcttctccgatcataccgcttttatgcgctccgatcggattgaaatagcgaagaagcactacgttccactccggatctgccgtatgaagatctgtcaaaatctgctctaacatccattttgtccatccatatggatttgtacacacaccctttggacactcttccgtgatcggaataaatgccggatccccgtatactgttgccgaagaactgaaaataatgttttttactccatgacttctcatcacatcacaaagagtgatcgttcctccgatattgttttcataatattcgagaggcttctgcacagactcccctaccgctttaagtccggcaaaatgaattaccgactctacatcttctttgtcgaacacttcattaagcccttctctgtcgcggatatctacttgataaaatttcagatcttttcctgtgatctctttcacgcgatctaccgctttttccgatgcgttatataaattatctacgatgaccacatcataccctgcatttaacaattccacacatgtatggctgccgataaatccggcgccgcctgttactaagattgacatatctgtttcctcctcgtaaatatttcagataccgttcaaggttctgtctattgcagttttcctttttactgccgttttattttacatgcacatcttaccactcatcctacaaaatagctttatatttttatatcatcttatagtaaaaatgttgcattaagactaatcccacaaatgctgcggatataagcccgaatctttcagagactgtatcgcttctacgacgaccggcttatcttctttataagtaactccgtgccacttatcttcggactcaagtactttcactgcagcgcggtcttctgctaaaagatcacttacaaccgccgggagaaaatattcacattttaaaggattttctttcaatcctttctctaaaaatgccggaaatcccgttttgatctcttctagaatacttctcgtaaatccccacatattcattgatacaagtgtatccggatcgatttcgttccatgtctgtccgtcatcttccgaatattcaatgccgttatttctcttttcaatacgggttctttccgtaacgcttacaagttcattcgatgcgtttaacccgcagatacctcttgccacatgtccgttatctgtcacagtatttttcaaacggtatgcaaccatcgtataccgatacttgtcgtcgtcttcatgggtcgtcaaataatcgtaaattgtctgaaacgcatgccgtccgtaataatcatctgcattgatcacagcaaacggtccgtcgatctcatcgatcgcacttaacaccgcatgagctgttccccacggttttacacggtctttcggaatctcaaatccgtccggaatgtttgtcagttcctggtacacataagctacatccattactttctcaatccgttttccgactgcttctttaaagtccgtctcgttttcctttttaataataaaaacgactttctcgaatccggcgcgctttgcatcataaatagaaaaatccataataatatgaccttctttatcgatcggatcgatctgtttcaatccgccgtatctgcttcccattcccgctgccataatcaccaataccggtttcttcatcttaaatcacctcatacttaaatcttaatcttatcattttctgtcatctgaaataaggataccacattcatcaaagaacgtccacctgacgttatttcattccggattttttctttgtctgctttttcttttttctcacactatatccgaattgaccaagcttctctcccagagataaatattccccgtgagaataggcaatcaatcccgtattattcagcataaattttccgttatcatccatatatgaatcatccacctgaactgcagtcacttctgcaaggaacatatgatgacttccaagctcctccattttttttactttacattcaatatttaccgggctttcttctataataggagcaaattcaagagatgatgcttttccttgcgtaagacgacattctttccacttatctacattctctcccgaacgaactccacagtaatctgtcgcttttgtcaatttttctgtcgtcagattgatcacaaactccccgctttcttttatcatataataagaatagcgctccggacgaacagaaatatataccatcgccggattcgtacatacggttcccgtccatgcaatcgtaattatgttactgtttccttctttatctgcggtactgaccatcaccgccggaagcggataaagcatgtttcccggtttccatatttgtctggacattttatccttcctctctttttccgttttattattgctgcaggacgctgacaagcgtcggaacaagctgctttttccttgatactactccttttagcatgatcgtatccgtgtcttccggcaaatcatatgcatttaatattttttcctttgcctccggaccgccgcaaagaagttccgatgattctgtcaaaatatttgtcaacataaaaaagatcatatttaccccgctgtctgcgcacgctttctccaaatacggctttactttctttttgattccttccagttcgtcggaactcattgaattcacctgtcctactccgaacacagtctcgttgaccgtaaattttttaaaatcaagaaagcatatatcctgagcgcttttccctttcaaattacttcctgcacgaaacatttcctgcgccagaatttcaatctcgacgcccgcagtctgagccagtttcctcgctgtgttttcatccaaaggcgtacaggtcggagagcggaacatcaacgtatcggaaataatagcggaacaaaggagcgcggcgtttgtcggatctatttcaactccgttttcttcatacatctgactgacgatcgtcgcagtgcatcccaccggctgattacggaaaaatacaggtcccattgtctgaatactgcccagtctgtggtgatcgatgatctccattacttctgcctcttccactccgtccacagcctggcttttctcattatgatcgacaagaatcacttgtttttttcttacgttcaataaccgtcgtcttgagatcagtcctaataatttcccgtttccgtcaacaatcgggaaatctctgaaccgttttcgcgccatcacttcttttacgtcatcaacataatccttcattttgaatgtaaccagattcgtttttgtcataaaatatttgaccggaatgctctgattgatatgctgcgccgcagtaaaagtatcatgaggcgtccttatgatcacaatctgctttttttccgcctgtttaataatctcttctgaaatcgaagcgttttgacagacgaccatacagcttgcttccatatctaccgcacactgctgtgcatcctttctgtctcccatgatcacaaggtcatctctgcttataaaatccgacatgagaatcctgcttgaagctgcgatcactacttttccgtttaacagatagctatgctcatttccggtgatcacttccccatctactgcacgggcaatatttctatactgagtccttgcctttgataaaatcatactatcataaacatccatatatgtcttggcaatatcaccgatcgtaataaccccttccaaactgccgtctcttacaaccggaagtgtatgaatgttcagctcccgcatcgtttcccacgctgtgcggattgaagagttacttgtcaatccttctacttctttcaactcaacatctttgatctgttcttttaaatcagacaaaagcttcggaggtttcactgcgaatttttcaagaacatactgtgtttcttcatttaattgtccggctctgcgcggctcataagcgtgacctgtcaattttgtttttaatgcggcgtatgcaatcgcggaacatatggaatctgtatccggatttttatggccgacaacatatattttatctttctgtctactcatatatttttactctcgctttcttcatccaacatcaataatctgaaaagattctatgcttatcgataaaaacatttttcatccataactgcattattatatacataaatctcattcttctgcaagagcacaataaacaatatagtcaagaaaaattaagaataaaaataccattcttctctactttcaaaatattgttttttctcctccatctgtggtatactctttctatataaaaaagaaacagaggtgctgcacaatgagcgaagaaatgaaagaaccaatgcagacagataatgactgcaaaacagaggaagctgctgcttccacaacagaaacgatggctgactacgaagatcatttcgacgatgccaatccgtggaatctcgtcacaaaatatatggaagaaaaaacagttcttcctgtaaaagtagaaggcgttgtaaatggcggagtaatcgtgatgatcgaaggactgcgtggatttgttcctgcttctaaactttccctttcctatatcgaagatctggaaacttatcttctgaaagaaatagaagtacaggtaattgacgctgaccaggcaaataaccgtctcgtcctttccgcaagagaacttttaaaagaaaaagaaaagaaagcgcgggaagatcagattgccaacctgaaaatcggagaagttttagaaggaacagtcgagactttacaaaattacggcgcgttcatcaaacttgacaacggtctgtccggtcttgtacacgtttcacagatttcacaaaagcgtgtaaaattgccttccgatgttttaaatgccggagacaaagtcactgtaaaagtaatcggaatcaaagacggaaaaataagccttagtatgaaagcgcttgaagaagtaaaagaagaaccgacagaaaaagttgttatcccgaaaagtgaaaatatcggaacaaatctcggtgatcttttcaaaaatattcaattataaatcatatctcttatttacaacggtacaggcggcaaagaatttgtttgaaaaattctttgccgcctgtaccgttgtattgccataaccttgttttctt

SEQ ID NO: 7635 - DNA, 69613 bp, Unknown
  gut microbiota DNA sequence
gcctttctttctgaaatatctccacggacatctaaaaagctcacccctgcacacatatattccccagtatctcttccaatgcgtttttactgcttgtatggcatctgacaacctccgcattgcatcgtccggcttcttctaccgcacagcgtaccattttgtgtgataccgtgttcgtaaaaagaacgatcagatccgggcttcctatctgcttactcatcgccgccgacatctgagtaaacactttcgccttacacttaaactgtttacatatctgtttgtactgacataccattcggtcatgtccgcctatgatcacaacactcatcgccaacctcctgaaatatttttctgaatccttcacgtatgatctccattcacagaaaatactatgacacaacattgcttctgttttttggttagttgcggctaactactttcatatatcatacatgatttttctctgtatttcaagtgtttttgataatatttctcatttttcttttatcaatttcaaaatcctactttatatctgcttttgtatttttgtctctgtagtcttccatttccgcatcgtataaaaataatatggcacaagtggaatcagcgcagcgatccatgccgccggatcggcgagacacactccctgaaaagttgtccttccggcagccgccataacaatcgcacttcttgctgcaagttcaaaaacacctcccagcatgggaacaagtccatatcccattccctgaagcgtattccggtataaaaaaatacttcccaaaaacggataacaccaaaacaccgtacgaaaatataatacagacacattgacaacttctgtctcagacggatcgataaacagccatgtcatatattttccgccaaaacaaacggctgccattgcgatcacactccagactaatatcatgacctgtgtgcatctcacccccgactttacccggtccattctccctgctccgcggttctgtcctacataagtagcgactgtagctccaaatgcaacgaacaccgtcataatcatattttgcagtttccctgcagccgaaaaacctgccatgtacgtttcaccatatacattaaccgctccctgaacgataatcgttccgatcgccgtaattgaaaactgaagccccatcggaatgccaagtgaaagaagacgcccgaaactttgaaaagaaatctttcgatctgattttgtcaaatgcaaaataggaaactttttcacaatataaataaaacataacaacgcagaaattgcctgtgcaatgaccgtcgcataggcacatccttccacacccattccgaatacgacgataaacactacatcaagagctacattaattaccgcagatataataagaaaatacagcggagattttgaatcgcctatcgcacgcaaaaaagccgccagtgaattatatgcggcagtcacgatcaaacctgcataaataatccccatatactgctttacttcaggcatgatttccgcagaataattcatcatccgtaaaataggctcattcgcgatcaaaagtcccgccgtcataagaacggcacatccgcctgccagataaaccgacatcgccacgtaatgccgcattttatcatattgttttgcaccgaaccactgtgaaacaagaattgcaaatccgctgcttagtccgttaagccagcccgtcacaaaaaacatcagcgatccggtacttccgatagccgccagagctttcactccgataaattgtcctgctacaatcgaatctgcaatattgtaaaactgttgaaatatattccccagaaaaacaggaatcataaactggataatcaattttgccggggttcccactgtcatatcattgactgcatcttttgttttcaccatttttcttttcccccttctctcttctgtttgcatgtacttatcaaacgatcgcgcctgatattgcataaaatgcatccctaattcattctgccgataaaatttatccaaccttttattatacacttaattttgtcattgtaaagcattaacttgataatattcatgtacaaaatacatcttaaaaattggtacatatgccggatatcttcttatgtctccatatgatataatacgctcatggtaattttaccgaatacaccttaggagggaaaaactatgaaaaatttaatccgtaagatctcgcttattatgtgcgtgatcatgctcacatttgcagtaagtgcatgtggcaaatctgacaatgattcaaaaaagaatgagccgaaaactgaggacacagcaaaagatgatgcaaaagacgacgcaaaagacgatgcagaagataatgacgatgctgctgttacaggaaagtttaaaacactggaagatttcgtaaattccgacattatgcagcagcagctcgaaacacagcttgcatctcttgaaggaagcggaatcgcacttaaccttacagcagaagataacaaactgatctacaacttcacgattgaagacgctgatctttcagcggctctcgcagcggatccgtccactttggagtcctctcttcaatctcaggcttctacatttgaatcagttgcttcttctctgaaagccgcagtagaagtagaaaatccggttgttgttgttcgttaccttgacaatacgggagctgagatcgtagctcaggaatttgccggttaatctttaaccaaaaaccaacattatatactaattaaatacaaaagctgcagaacgacagcctgataaagaacctttgaaacatcatttttcaaaggttcttttttcgtgccggcatgttccgctctgaaaacaattcttttgtctaaaacgctattttaaaaatctgtatatatcagatattgacagaaagcacatttatatgtatactgtacctgtcagataagtacagtatatgcaaaggagtgaattaattgaaacaacaatatatctcgatccgacatctttcaaaaaaattcaataaagacttcgtcttaaaagacataaacgctgttttaaacagcaacgaaatcctcggttttctcggacctagcggcgccggaaagacaacaacgatcaaaatcctcaccggacagcttaaacctacatccggaaacgcagagatcctcggcattgaatgcgataaaatcaacgaacggatttatgagcagattggtattgtcaccgattccagcggcgtttacgagcgaatgaacctttatgacaatctaaaatattttgcacgaattttaaatgttccttccgaaaatatcgatctcttattaaaacggatcggattgtacgaacaccgaaaaaaaatggcgggaaaactttccaaaggacaaagacagcgtctcattttggcaagagcgatccttcaccgtccgaaagtactctttctggatgaacctacaaacggacttgatccatctgcctctaatgaaatacataaacttctgatggaattaaaaaatgagggaatggctatttttctcacaacccacaatatggaagaagcggcgaaactttgtgacaatgttgctcttttaaatgacggcgttattgtcgaatatggctcaccgcaggcaatctgcttaaaacataatcagatcaaaaaataccgcgtccgccttactgacggcacaactcaccttctcttacaaaacgagaaaacaaccgggcaaatcgcacaatggatgaacagcggacagcttgaaacgatccattcatgtgaacctactcttgaaactgtatttttagacacaacagggaggaatcttcaatgaaaataacagcaatccatttcagaaaactatctgccgtcacagaaatgaaaatgagaactctcatgagcaaaaactttatcatcatgccgatcttttccctcggatttacttttcttatgaaaatactgtaccgatccatcgctgacggaaagatcaacatggacggctacgcgctttcgctcggcgttctgatgaatatttccatgagcgtatactgtactgcagccgctcttgcggaagaaaaagaaaaaaatacgcttcggacactgatgacttcttcagtaaacggacttgaattttttctcggaagcattataccggttataattttatccacagccgtaaatgttttatgtgttttcatcgtacagcttacactttccggatcccaatggggcgcatatcttatcattacgacagtctgcactttcattgcatctgtcgtcggcatgatcttcggtatttatgccaaaacccaagtatccgcaagtacgatcactacgcctgcgctcattatatttatgatggttccgatgttgtccggattcagcagcattttagaaaagatctcaaatcttctcttcaccggaattgcccttaatgctatatctgcaatcagcgccgggaaagctccgatccatttgtccggcatcatcgtcctgtctgtcgaagcctttttgtcagcagcgctttttctgatcttatatcgaaaaaacggatttgaaaagtagatgcaaaatacagagcatagaaattcaagtgcaaaaccaaaattaaaacagcaaaaaagccgaatacgacagggagatcaacagatatggaaattattttaagcagcacaagcggacgtcctatctacgagcagattacgctgcagatcaaagaaatgatcatgaaaggggatcttgcccccgggcaggctcttccttctatgcggaaacttgcaaaagatctgcatgtcagcgttatcacaacgcagcgtgcatatgacgatctgcaaaaagaaggatttatcgttactgttcctgcaaaaggaacttttgtttcaactgagaatcaggattttatcagagaggaaaacctaaggcgtattgaacaattactgactgacgcagcttttcttgcaaaagaaaacgggctttcaataaacgaaataaaacaaactttagaaatcgtttatacggaggtatagcaagcatgaaacaggcattacacataaaaaatctcacaaaaaaatataaagatttcactttagatcatatttctcttgatcttccttacggtatgatactcggattgatcggagaaaacggatccgggaaatcaactttgatcaattctatcctaaacattgtaaaagctgactatgacgaggtccatattctcggtcaggatttaaaatcacaggagaaagaaatcaaaaaagagattgccgtcatctttaacgactctcattacggtgagaatttaactcctctttttataggaaaaatgctttccggcatctatactgactgggatcagaaaaaatttaccgattacctgaaacaatttcatcttcctgaaaagaagcggttgaaaacattttccacggggatgaaagtgaaactggaatttgccgcggcgttgagccataacccgaaacttttgatccttgatgaagctacaaacggactcgatccggttttcagggaggaaatcctcgaaatattacgagaatttacagagcaggaagaccattccgtccttatttcttcccatatcacaagcgatctggataaaattgccgactatatcgcatacatacatgaaggaagactgctcttccttaaatctattgacgaactgaataatgactgtggaatcatccgctgcggacgagagtttttcgacgccctttctccggaggacattatcgcatacagagaagagccttacagttattgtgtattcataaaaaacagacagtcgctgcgaaaagcattctgcgacatttctatcgagaatgcttccattgaagatatgatgttattttacagcaaaggagaaaaaatcatatgaaaggaattatattaaaagatctttatgaaaatttccgcatttttaaaaacggggtttcttacctcgcagcagttcttttcctcttcctgcttatcgaggctatgcaaacgggagacttattttccttaaaatatttctttatgctgattactgcttttgtgtttccgcttttaggctgctcctctattgaatcctctcttgagcaagatgaaaaagtgaattttgacaaaatccagcttacgttccccattacaaaaacggagatcgtactgtcaaaatatatacttggaatctgctttcttacaatatgcaacgtattctccctgatttttgttttctcgttcaccagcagccacaacaaaatcactttgcaggaagggctgtctgcatgggggttcggagttcttttctcccttgtcttttttgcagtcgttaattttgcattctttctgctcggaaggaaacttggtcttatcgtttatatctttatcgccatgcttttcggaggaatatacggagccgtttcctctttaaagggaatggaatttcttatggcaggtgacaaaacgatgatctttataatcggtattccgattgggattttattcgttgtaatcagcttcttcctgtcgcttgcatgttataaaaaacgttattcataaaggaggcttctttcccggcatacgtcacttgtcaatatcttccagttttgtctttccgatcatgagatttaaaatctccacatcggtctgtttcatacctgcgcggcctacatatccgactgccttgattgtatcttcagggcagtccattacaagaccttctcctcttgcaaacgtaagtccccgcatcgccatcttatgacttagtatcgcggcctgaagcgccgtggatatttttgccgcacagcttggttttgcaccatcacagacaatacctcccgcatccgctatcgtattgacaactgtgttttcaatctgttccaatgttccgccgcataaatatgtaatccctgcccctgctcctgccgcagcacatactgctccgcagtacgctgagagagaaccgatatattttttctgattcagagccacaaggttagatacgcataacgccctgtaaatctcttctttgcttttctttagttcttttccgaactcgatcacaggaagagaacaagtcataccctgattccccgaaccggaattaatgatcaccggaagggcacagccgctcattcttgcatccgaaccggcagatgctttcgccacagcgcgccactttacatcttctccgaactcttctagcacaactcgtccgacctgtgctccccaaggatttctcaaaccttcttctgcgattctcgtattgtattttatctgacgtccaagaactttttccacatcagtaatctgtacctcatttgcaaatgtaataatatcttccaaattcaaaagactcttatccggtgttttttctctctcctgacaatattcttttttctctttgtgaaaaagcacctgtccgtctttttcaatatgggtgatattcgtatgctcgtcttctatcacaacaagagcttcactcttctctgtctttttgcatactgcatatgcttcaatatataaattagctacatcgtcttttaaaacacaatcacaaaatcctgcctttaaaagtttctccgcctcgtcgatttcccgatctgtaacatgctccagcacttcaagcgcctgtgaaggatctccgcctgtaattccgagtaccgccgctgcttctacgcctttcattcctccggaattcggtacttttactccttttacatttttgataatattaccgctgcaccgcatcgtaatatgatccggcatctttcctaatacttcttttgcttttgccgcagcataagcaagcgcgatcggttctgtgcatccaagcgccggaacaagttcgctttccaaaattgttacatattcattatatattttacggttcattgcaaaaaacctcctgatttctcgattttctgatgtatcttataacagcagtctgtctgatcctgccgctttctttacagctttacaccatctttatcgattatactatcaggaggtttttatatcaatctctttcttttacgtgtctttccggcacggatgtacaccgtttattccgtcctacatctttttattttctgtctttcccgcactcgtcgcgcagcctgaacacgaaccacagtttccgccgcatccggcacacccgggcgcttttccctcttttgcgttttttcttgctttataaataagaaaaatacaataactcgcgatcaatgatatgatcaaaatatctgctgccataacacgccttctttctaaactaattttctctacgccgcctgtaccgaccgtttggaatatatttttttatttttatacggatccggcctaaacagtaagatcaacaggatcaccgcaatcgctatacctacagccgttcctacggtgaacgctcctccaagcacaaacgtaccgatctgatatacgctcaaagatacgacatacgcaaatacattctggaacacaaccgcaaaccaaaaccactttctggactgcatctgctgcgccattgttgcgattgccgccagacacggggagtccaaaagattaaacagcaaaaacgaaaatgctgccatagccgacggaaaccacgctgctactttgcccgctacatttacggtatcttctacatctcccgacacatttgcaagaactcccattgtagttacaatggcttcttttgccgtaaatcccgaaagcgctgccgcaacaggctgccattctccgaaaccgagcggtttaaacagcactgcaagcgctccgccgatcatcgccaacaaactattggcactgtcttgaacaatcccgaattttccgtctgaaaatccaaatcctccaaggaaccacataacaatacatgcaaggaacaaaatcgttcccgccttgatcatgaatcctttcagtctctcccatacatgaagaagaactgtctttgcctgcggcatatgatactgcggaagttccattacaaacggagccggttttcctgaaaacatcttcgtctttttcaatattatagcagaaataagcactgccgcaatccctataaaatacataagcggtgcgatgaaggaactttctgcatatcctgccgcctctcctgcgatcactccgcccataagcgcgataaccggaagctttgccccacatggaataaacgtagctgtcatgatcgtaagccttctgtcattatcctgctcgatcgtccttgaagccataatccccggaattccacaccctgaggaaataagaagagggatgaagcttttccccgacaatccgaaatgtcggaacacgcggtccattacaaaggcgatgcgaaccatatatccgcagtcttcaaggaatgataaaaggagaaacaataccgccatctgtggaacaaagccaagcacagctcccaatccgcctatgattccgtcaactacaagccctgtgataagactgcctgcccctatatttcccaagaaaccgctgactgcatcctgtatactgactacaaacacatcgtttgtccagtctgtcatccctgttccgaccgttgtgacggacacataatacacaacccacataacgaaaacaaaaatcggaaggcctaaaaaacgatttgttacgatacggtctatcttatctgagacagtcagtttttctctccctttttgaacggtatcggaaacaactttttgtatgtactgatacctctcgtctgtaacaatactttccatatcgtcatcatgcttttcttccatcgctttacgcatcttctcgatcgctttcaaagactcgcctgacatttttaaattttctaatactttcctgtcattttcaagaagttttactgcataccaacgcttcttacgctcgtcaatccatgttggaagcagctcttctaccgctcgtatcgccgcttctaactcttttgagaatatcgctttcggtatgcttttttctccgcttttgacagtgcagaccgtttcttcgatcaattcttttagtcctgtctttttcaaagccgacgtttcgatcaccggacagttgagaagttcagacaatcgcttcttgtcgattttcattcctcgcttccggatcaaatcagccatatttagcgcaatcacaaccggaactcccgtctcggtcaactgggtcgtcaaatacagatttcgctcaatattggtcgcgtctacaagattgatgatcacgtccggatcctcgttcaaaatataatccctgctcacaacttcttcaagcgtatacggggaaagagaatagactcccggaagatccgtcactttgatcttctcctcttttgattcttttgttcttactttcccttcttttttctctaccgtaactcccggccagtttccgacatattgatttgctcccgtaagcgcattaaacattgtcgtctttccacagttcggatttccggcaagtgcagccctgatctccattttgttctacctcctactatacagtttctacaaggacacattttgcatcctcttttcttactgacaactcatatcctcgaaccgtaacttctacaggatcgccaagcggcgcaaccttccttatataaatcctgcttcccttcgtgattcccatgtccatgatccgacgcttataagccccgtccccttcaattttaatcacagttactgtacttcccacttttgcgctgcctaatgtcctctccatgccattctcctccgcttcctatttcactcaaaatttttatagccttttcagctctagatcataatatgcctcgccatttcggcatttaccgcgatcctggaatttttaatactcacgatcacgtttccgcccatctcggataatacagtaacttccgttcctgccacaaaaccaagatttccgagaaaacgccttgtctcctcgtttccatttacgcggtttatcacacttaccttgcctatttcagccatcgtaagcggcataaaaacaccttccttctattttaaaacttttttgaaattgataatctttttcatttatctttagttagtttaacctaacctttgtaaattgtcaagtattttcacaaaataaagcacaaagcgttttttctacagtgacgctctgtgccttttctatagcggatattctttctcttgcgagctttcgcacacatatgttatacttaattttaatgaatattgatctttcattcataaataaaatttatttgaggtaacattatgattataaatgaatctgctgagaactatttagaaacaattcttgtattaagcggacaacttcctgttgtccgttctgtagacattgccgcagaacttgactttaaaaagccaagtgtcagcgtcgcaatgaagaagctgcgtgaaagcggacatattacagtttcaccggaaggctatattacactcaccccctcgggaaaagaaatagcggagcgtatatacgaacgacataccctccttacttcctggctggaatatctcggcgtcgattcaaaaaccgccgctgatgacgcctgccgtattgaacatgtcatcagcgcggaaagctttgacgcaataaaaaaacatattaagcgatagcttttatttttaatttcggtaatatacttttatttctcaatattgacctgatcaagaactgcgcctaattcctctgcggatttacgcagttttttcatttcttcctcgctgaaatcaatctccagcacctgttccgccccgcctcttccgacaatcgtcggaatgcttaagcacagtccttctaatccgtattttccatcaagcgataccgaaatcggagcgaccgtatgactgtttcttacgattgcttctacgattttttccgctgccattccgattccgtaataagtcgctccctttcgctcgataatctcataggcgctgtcacggactcctttgtaaacctcttccatatcctgtgcgaagtgttcatatccccgcatctttgcaaaatcctgtaatttaattccgtaaatatttgcacagctccatgctgccagttcgctgtcaccgtgttcacctacgataaacgcatgtacatttctgctatctacatccaacttttcactgattatatatttcaatcttgccgtatcaagcactgtaccggaaccgatcactctttcctttggaaaaccggattctctaagcgctacttccgttaagatatctaccggattcgacacgatgagcaaaattccttcacagtttacgcgtttgatctcttttatgattgaccgcataatcgctgcatttttctgcacaagatccagtctcgtctctcccggtttctggtttgcccctgccgtaataataacgaccgacgcatctgcaatatcctcatattcacccgcataaatatccattgcatgtgtaaacggcagtccgtggctgatatccatcgcctctccttctgccttcgccttgtttgcatcaaggagtaccatttccgaaaataatcctttctgcatcaatgtataggcaatcgtagagccgacaaacccacatccgattactgctgctttttgtatatttaccatatctcaatacctcctgttttccatgaactttaatgaactcataccgccactttatattcaggatctcataataagcgtttttttctaatattacttgatcatatttcatccttttttaattcctagtattttagtggggtttaactttatcttcattatatagtagttccctgaaaaatcaatcccttatcaggtatttttttccatacaatcaaatatttttcagtaattcttttttatcagtcttctaaagaatgcttttttgtaatcgttactttttcatcataacagataaaaacgtcttctatctcgctttttttcagcttcggtgtgatcaaactgataaaaggcacaatcaaaagtcctgcgatcattgccattgcgcctgcattgatcggagattttataaatccaaaaaacatattcgcaacagtcagtccgactcctgttataaaccctgcccatacacccgcacgggtaacgcctttccaatacaaaccatacaaaaacggagctaaaaacgccccggctaacgcgccccatgaaatgcccataagctgtgcgataaaggtcggcggatcaagcgcgatcacaactgagacaacaataaaaaacacgattaaaacctgcattgtcacaatctgctttttctcgctcatttttttcataatattatctttcaaaagatcgagcgtcagtgtagaactggatgtcagcacaagggaggaaagagttgacattgacgcagaaagcacaagcacaacaacaacccctataagcagatccggaagcatggaaagcatatgcggtataatactgtcataaacgaccgctccgcccgctttatcgtaaatctcgggactgtcgaacagtcttccgaatcctccgagaaaataacatccacctgagataataattgcaaatatagttgaaataatagttcccgtactgatcgatttttcatctttgatcgcataaaatttcccgatcatctgcggaagtccccatgttccaagcgaagtaagaagaacaacgcccagaagattgacaggatccggaccaaaaaaagatgtaaacgctcccggctgtccttgtgtcaggggaacatcacttggtatcttcgccatttctgctattgcattcatgaatccgccctgtccattcagaaccgccgcgatcacagccacaattccgatcagcataatgattccttgtatgaaatcattgattgccgtagccatatatccgcccaggataacatagagcgccgtaaacgctgccattgtcacgacacaccacgtatacggaatattaaaagccatcgcaaacaaacgtgacaaaccgttatacaccgaagccgtgtacgggatcagaaaaacgaacacgatcacagatgccgtaatcttaagtgatttgctcttgtaccgttctccgaaaaaatccggcatcgtccttgatccaagatgctgtgtcatcacttttgtacgccttccgagaactacccatgccagaaggcttccgattaatgcatttccgatgccgatccatgtactggcaattccgtatttccatccaaactgtccggcatatccgacaaatacaactgccgaaaaatacgatgttccatatgcaaatgccgtcagccacggtcctaccgatcttcctcccagaacaaaaccgtctacacttgtaacatgtcttctcgaataaattcccactgccgccatcactgcgaaaaaaataataagcagtataattttaattcccatcttttttccctctctctgccgttttatcctttagaccactttaaagcgtaacactttaaagcattaaagtatctttttatagaataacacgggtctaagacccgtgtcaactgttacttttttctattatgcccgtttatcttcccgttttatcttgtcagtacatctcctgtcacttcatctcctcgacccggttttgcaccttcttatcaaagttttctatttgtctgctgtatgactcgttcatatattttgaatgaagcataaagtccgcagtcgcaagattatttgcaatcggaatatcgtatacgacagcaatacgcagcagcgcttttacatccggatcgtggggttgtgcttccaatggatcccacaaaaagatcataaaatcaatctgcccttctacgatcttcgctccaatctgctgatctccgccaagcggaccgctacagtatccttttaccggaagccctgttcgctcagcgataagacgcgccgttgttcctgttccgcataaaaaatgccctttcagtatctctttgtttttttcacaccagtctacaagttctcttttcttaccgtcatgcgccacaagggcgatatgttttactttttcaatttccatcgttacatatttatcatctaacatccgatctcctccttttatcttaaaaatagtttttcataaaatttttcttaccgtctgtttttatacaaactgttccatcgtatcaaatctaagtaatgcgatcgcgcccatcgcaaccgtgatcatcaatccatagatcaatacgatcggaaagatcaacgtttgactgatcaacactgccgccaacactccgacaccggctccgactcctaaaagcgccatctggataaacattctaagcagactttgccctgtttttccgaatacttccccgagaaggctctgaacgatcaccattgtatacaggcggtctgcctgcaaaacggtgtagatcaaaatacagtaaatgatctctattaccggaacatgccaaaaaatcccaataggaatgcagatgatacatccgtccgcaaatgcctttacatgttccataagagtcgcataccacatttttttcagcggactgtcaggaataagaaaaatatacggatttttcaactcgctttcccattttcctgtgtaaccgctcataataagcgccacatacgcgacaactcccaacaaaataaagcccgccatactgctgtctgacaccgatttttggagagaatacgcgaaaataaacgcaacgactgccgaaagaactgtcattttcgtgaaaataaaatatttttctttcttatattccagaaattgcctgtaaaaaatcgctcttgctccttttgctgtaatcttactctctacacggcgaaaccttcgctttttcgtcccggtatttgtcacaaattctccgcttttctgcctctttttcagttctgcataatcgtctgcgaatttcgccgcctcttcataatatccgccgtcacatttcattctgaacgccgccgcaacaatgaacaccgtaaacaccgaatagatcacagtacaaattacattcagagttgtcggaccgagtaaaaccaacctgtataccgcaatctgccatccgactaccggaatcatctgaaggaccggccagttgataaacgaaagagcgctttctactgacagacctttttctttaaaataaagtacgatcatcaacgtaaatgcaatcaaaaacactttcattccgaagcagatcccttttatcaatttttgcggaagcttatcattcgtatataaaatgatcataacagattgttctaccgcacactctacgccgcatcctatcagaaagaagaaaagcatcttccaccattccacatgaaaaaccgtcaagcctccgatcgccaacacgatccatatgaaaaatgacatcagataattcatccacgctccctgtatcaaaacaagtttggggctgatcggagcgggaaatacgaactgagaatgagccggccgaaacaagattccttttcgagaagcataggacataaagtttcctactgtaatgtagatcgtccacaccgtcacaagaatgacaagtccttgaacagaatcgatccgaactgtaaccgcaagtgttccaagcatcacgataagaaagattccataggcggccccaaagatcaacgcaagaagcgtcgtcggttttctgactgcctttttcaggttatttgccgctgttctctttatcaaatatattaacgctttcatgctttctcaccgcctgtcatctcaaagaacagttcatccagctcttttccctgcgcgtctgcttttgtgtaagaaccggcaatatgcccttgttccatgacgatcatcacatcccacaagttctctaccatctcaagcatatgcgtactgataagaactgtcgctccgttatcacgcagttttaacacgacatctttcagcatcttgatcgccgccggatcaagtccgaccatcggttcgtcaagaaggatgacttccggctttaccgcaagggcacagcatatgctcactttctgcatcattccttttgataattcattgccaagcttatcctgcttgtcatccatctcaaacgctttaagtatcttttcgatctcctcgtctgtaatttcactgtcatatgccattctcacatattcgatatgctcccttaccgtcagcgcatcgaacatattcggaatctccggaacataagcaaacttccttttcgcaggaatctgccgggcaggaatccctttaatacgaatttcaccctgataccgcaataaaccggcaatgcttttgatgatcgttgattttcccgatccgttcggccctaaaagaacccctacctgaccgttagggacggtaaacgtcacttgatctaccgccagattctttccataatattttgtcaattctttgatctccagcatagtcctctctaccctttctgtccgcgtcctgtatagtttgcttttactcgtaatacttgataagtgcctgtgttccgagatctccgttgccgtctgcttcaagctcttcataaatggcaagaacctggcttaaaacttcgagatttaaaccgcttctgtttgcttcgatgagcgccagcttcatatctttaataaaatgcttcataaaaaatcccggcgcataatctttttctatgatctttggtccgaacagatcaaactgtctgcttccggctgcccctgtcgctacggatttcgagaacacattcaggtcaagtcccttttcttttgcatatgtcagcgcttcgcatacaccggaaagagctcccgcgatcatgatctggtttgcaagtttgcaatgctgtccgcatcctgccgaaccttcgtaattaatattcgttcccattgcttcaaacagttcatgacagttcgtataatcgctcttatcgcctccgacaagaatagaaagagttccttctcttgcccccgtatctccgcctgtgaccggcgcatcaagcacatgaaatccccgttttgttccttcttcatacagcttttcggcaatctgcggactcgtggtcgtcatatcgatcaaatatgcaccttttttcgcactgtccaaaatatttccgctgtcgaaatatacttcttctacatcctgcggaaatcctacgatcgtaatcactgcctcgcagtcttttacgcactcggaaatcgtttcatgaaagatcgctccttccccgatcacgtcctcgacttttgcttttgtccgggcataaatatgaagttcataccctgctttcataagattacgcaccatggattttcccatgatccccacaccgataaatccgatcttcttcatctcttttttcctttcccccttatatgccactatttttacgacacttctgtttttatccacatcggtttgtctgtcttgcctgtattaatatttttctacgacttcgcttttgtttttataaatactgtttgccggaacaaatcctcttacagaagacagtgggtaaatattgctgtgacttcctacaaccgttccggggttcaggacgcttccgcatcctacttctacttcatctccgagcattgctccgaacttcttcatgccggtttctatatttccttccgatgtttttacaacaacaagctttttatccgacttcacattcgatgtgatagaacctgctcccatatgagatttatatccgagaacagaatcgccgacataattataatgcggtacctgtactttattgaaaagcacgacatttttaagctctgtcgaatttcctacgactgctccttctcccacgatcgcgtttcctcttataaacgcacaatgacgcacttccgcttctttcccgatgatcgccggaccattaatacatgcggtaggcgcaactttagctgactttgcgatccagacatcttctcctcttttttcatattcatcactgcttaacgtattcccgagttctttgataaatgaaccgatattcggaaggacttcccacggatatgtcactttgtcaaaaagatcttttgcgattgtctcctctaatgtataaagttcctttactgtcaatgcattcatatatttatctccttttccgccgtttaccggctctttttataataacctgccgctttatcataacaggctcttaactgatactgattattgagtccttttactcccaccgtcctgttcgttataaaacgatccagcttcatcatatattcatcgggagtaatgcttccctccgccacatacgtaagacctttttcccagcttgccgtaagttccggatttaaaagtgatttgatcgaatgatccactacgtcaaataccatctctccttgcaaagtcggtgttatgatctgtgtttttttattcagggcaaggtatttaatatgaatcagtttctttaatatttccgccctggtcgcgctcgttccgataccgcttccttttatctgagcgcgaagatcttcatcctcgatcaactgccccgcattttccatagcaaggatgatcgatcctgaattataccgtttcggaggcgacgtctccccttcttttatatctaatgctccaaccggaagaacgcttccttttttcagcgttttaatcacttcaaacagcgccgtatcaaggtcctgatctgccgtctgttctgcatcttcctctttttcatttgcatcggttctgcttttgcctttgtttacacttcgttttccctgcggaacgcctgccactttcaaatatccttcctcagctagcactttaaaattggaaaagaaactctcttcctttatcttcgatatgatcgccactttttgatacactgccggcggataaaaaatacttaaaaaccttctcacaatcagatcatatactttatgagacgttgccgaaagcgaattcagcgctcctaaaccttgtcctgtcggaatgatagcgtaatgatctgtaatctgcttatcgtttacatatcttgtcttcgccagatttttatgacttccaaaagaaaggatatcctgcaaatacggctgtgccggaggatattttgacagcccgttcaagtttctgctgatctcttttgcaactgccgtcgacaaaaccctggcgtctgtcctcgggtatgtaacaagttttttttcatataattcctgcacgacccgaagcgcttcatccggactgatcttaaaccgcttcgaacagtcgttttgaagttcggccagattataaagaaggggaggatttttcttctcctttttcttctccacagactcaacgatacactgtatcggcttttcttccgacaaataggcgatcagctcttttgctttttcttctgtcttaaatccattttctttatacagatcaaacgattcaaaataccgcgagcctttcactgcccgccattctccttcaaaactgtgacctgacgcatcgatcgtgctgatcacacggtaaaaaggagtttttacaaactcccgtatctccctttcacgcctgacaaccattccgagaacgcatgtcattacacgtcctaccgaaatcaccgagtatttcgtattcagataattagaaatactgtttccgtatttcagcgtaagcaaacgtgaaaagttgattcccatcagatagtcttctttcgcgcgaagataggcggaagcgcttagattgtcatactctgacagatcttttgcttcccgtatgcctcttaagatttcctcttctgtctgtgagtcgatccacacgcgaagtctttttttccccgacacctgcgccttttgttctacaagccggtaaatgtactctccctcccgtccggagtcggtgcacacataaattgtgtcaacgtcttctctgtttaaaagagaactgacaatctgaaactgcttcgccactgacgggatcacttcatatttaaactccgaaggaataaacggaagtgtctgaagactccattttttcaatgccgggtcatactcttccggatagctcatcgtaaccagatgtccgacgcaccatgtgatcactgcttcgtcggattctaaatatccgtccgctcttcttgtctttaattttaatgcctttgcgaactcctgcgctacgctgggtttctcggcgatatagagttgttttttcatataatgtatttagtttcctttcctgctccgaaagtatttctcaccttttttcaacacgatctattcctttttccaaatgcgctgaatactttctgaaagattgattttttttccttttttgctttcggaagcgtcttcggagggcgtgcattcaacgcagccttcataaatgcagcctgcgcgttgaccgcttctccttttctttcttttttcttatatgtaccgtcacttgtcataatacgcgcttttacattgtctgcaagcatcactttcagatcatggatcaggcgtctcttaattgcatcgtcataaatcggacatgcaacctccacacgtttctctgtatttctcgtcatcatatctgccgatccgatataaactttcgccgtttctcctgttccgaacacaaacactctcggatgttccagataccttcctacaatgctcgtaacccgcagattttccgtattttctttcactcccggcaatatacagcagattccgcgtacgatcagatccacttttacccctgctgcagacgcttcctgtacttttcggataaaatccatatccgttacagaattcattttcataataatacgtccatccgcgcctttttgaatttcctcatccatatgtcttaaaactttccgtttcagactaaacggtgaaacgatcagatgatgatactctccgtccagattgccgattgacatatttttaaagaatacggccgcatcctcgccgattccctgatgtgatgtcataagcgaataatctgtatacatttttgccgtcttttcattatagtttcccgttcctacctgggtaatataacggatctcatttcgattcctgtatgtgataagacacagttttgaatgaaccttgtaaccgtcgaatccatacagcacacgacatcccgcttcctccagacgctctgaccagtcaatattattctgctcgtcaaaacgcgccctaagttcgatcaatacagttacttcttttccgttctcggctgccgcacaaaggtattctacaaggcgggcctttttcgccagacggtagatcgtgatcttgatcgtcataacatcgggatgaaacgcagcttctttaataagctgcaaaaacggatccatactctcatatggataagacaacaaaacatctttgcgtttcacctgctccatcacgctgatcccttcggcaagcgcagcggcaggctgaggtgtaaacggctcgtcgatcagcgcttttctcatagattcgggaatcttatctgcgattgcgaaaataaacccaagcttcatcggcattttcgtcctgaaaatacattccggcgtaatcttaaaccggtcgcagaaatatttttccatctcttttccgagcggagcggctgtctcaagtcttacaactgccattttacgtcttttatgaagtgtttctttcataatataacggaaatcttcattatctgccaacgcttcatcatccggtgcgatatccgcattccgcgttacgcaaatatagtttttgtcagatacctgatactgttcaaaaacaagttccagatattccatgatcactttttccattcggatgtagcgcacatcatgccccggaagatagagaacgtccgaaatgtactgtggcacaggcacaatgccgagcatgacattattttccattttcagcgtcgccacgacgtaaatatctttattaagcagatgagggaacggatggttcgcatctacgatctgaggcgataaaaccggaagcacctgttctttgaaatattttttcacatacttcttttcctgctgctccaattctttaaaatctaacccacatacgccatacggctgaagctgcttttttatttccgcatatgtcttatctctctccttataaagaggagctaccgctttataaatctcctccaactgctgcttcggagtcattcccgaacggatatcctgttttttactgtcagctactgccatatcgtaaaggctgccgacacgaatcataaagaattcatcaagattacttgtaaaaattgcgacaaatttcatcctctccataagaggaacactttcgtcctgcgcctcttccaacacacgctgattaaaacgaagccatgataattctcgattttgcgtatactctaaagtctctgtttttcccatcataccctctcctttttgattttccgacatttctcatcttgtaaactatcgtttcatttatcgtgaaaaagatttctgcttttatttttccaaatattccataagatcatcaaactttcgttctgtgtacttatatccgtgttcataaaatgcatgcagcgtttctttatttctctcaagtcttgaaacaggctttacctgcggtctgagaataaatatctcacctcgtttttcaagctgatctaaataattcatcgttttattatactcaaaacttcttctgaagatcgtcctgatcaaattcggatatgatttatacgctcttttatatactctctgcatcgtcggagaaagaaccgacttcctgtaaccttgatttttcgtaagaatcacgacgatcttttcattttccatctgctgtgcccgtctgatcggaacagagtccgccagtcctccgtcaaggtacggaacattgtcgatattaacgatcggagtaagcaaaggcatacttgacgacgctctgcaaagtttcatcagacggtcgttatcactatcctctgtcatatactccgcttttcccgtcagacagtttgtcgtaacaatctgacagttgatctccgagttaaaatatgtctcgaaatcaaacggaagcagttctttcggatatttatcaaagatcagatccatattcatcagacttttctctttgacgaagtctctgatcccatagtaatattttccttctttgtcagtcggtatcatacagtctctcgttcttcccggctgccgcgaaacatagtccaccgcattgcacgagcccgccgaaacgccgatcacatccgaaaaatacagatctctctccatcagataatcaagcgctcccgaagtaaatattcctcttgtcgctccgccttcaagaacaagtgttgccttctttattgtcatatggataacctcttttctgctacaatctacttccctcttttaacttctacattatataacttttttccttattgtgaaaccagaagttgatttttaaacaaatcttttcaaattcttttcaaaatctttactttttgttgtaggtcatatccagaagcttctcctgccttatccgacaataattcaggttttttcataaataaattaccggccttcctttgctttattttttactcaacagcgctttcacttcctctacagtcaatactttcccataggatataacttcgccgttaaacactaatgcaggtgtcgtcattactccgtaaccggcgatttccgcaaaatctgtaacatgttcaatctcataatctaatcgaagttcagatactgccgctctggttgctttttctaattccatacattttacgcagcccgaacccaatattttgatcccttgctcttgtttcttattttctgtattttgcattgtttctgacgtgcaattttcaccacaacagcatgattttgtttcttttttctttccaaataatttcatttcttattcgctccttttaaataaatatcgcactaaaaatattaaagagataacctacaatgataatacccgacgtacaaatggcaataaataaagtcaataatttaggctttactgcctttttcaacatgattaaagacggcaggcttaatgtcgttactgccatcataaatgataagatcgtacctaattgtgctccctttgcaagtaatgcctctgcaaccggaattgttccgaaaatatcagcgtacatagggataccgacaagcgtagctaaaacaacaccgaacgggttattacttcctaaaatactttcaatccatgtttcaggtatccaattatgaataattgctccaatccccacaccgatcaaaatgtatggaaatacttttttgaatgttcccatcacttgttctttcgcatattgaactctgtcctttttggttaaggcaggggaactaatatcaaccctacttgcatttttgacgaaatcttctacatatttttccatatgtaagttttcaatgaaggtgccgccgatgacggcaatgatcaaacctacaatcacataagcaaaggcaactttagcaccgaaaatactcattaacaatacaagacttcccaaatcaaccataggggaagaaatcaaaaaggaaaatgttacgcccagtggcaatcccgcacttgtaaaacctataaatagcggaatagacgaacaggaacaaaatggtgtaactgtccctaacaatgcggatataatatttgctccgatgccatgaaaacgccccaaaattttcttacttcgttctggcggaaagtaactttgaatatacgaaataaagaaaatcaataaacataacaaaattgtgattttaattacgtcatacaaaaagaattgaatacttccgcctaatcgactgtcaatgtctagccctagttgtgatagacccttaccgattaaaccatttaaccacttcatacctaatatttggtcttggaaaaacgaccatattgaattgactacttccaaaaaagtccctccttcatacaacatatcaaatatttttgatgtgataaagttttataaaagccacctttcgatgacttttatttgcagcaatttgattgattttcagtatttggcgttgttaattctagcaatcgttttgacgcgtattcacttccgcttttacttaggctgtaatgtgtccattttccctcttgtcttgcatgaacaatgccggaatcgcaaagtattttcatgtgataagataaagctgactgtccgatgttcatgttttcaatcagaacacacgcacatttttcgccactcttcaagtaatctaaaatagtaagcctttttgtatcacaaagagccttaaagatttttgcgtcttttgaaaaatcagtcatcgccgtcattcctcacatcaattatttttgatatatacatcataagtcttgtaaagtggtttgtcaacatgtcacatcaaaatattttgatgtgtttttttcttcctcttgtctgccaaagacaaaaaaaagaaaaagataaaataaaccgagagtcaactgcattctgactctcggcttcatttttcaaacggagacggagggattcgaaccctcgtgccccggagggcaaacgcatttcgagtgcgccccgttatgaccacttcgatacgtctccatgaagagctgtgcatgatttccatacacagcttttacattataacagaattatttccaaaaagaaagaggatatttcaaatttaatcaacctttaatcatcttcctcagtcgaaacagtatatgtctgtctctttcttgccatctcgtcactttcaagatactcgtcatatgtcgtaatcttgtcgatcagttgtccacccggaacgatttccataatacggtttgcagtcgtctgtacgatctgatgatcccgagacgtaaaaagtaaaactcccgggaatttgatcagtccattattaagagctgtgatcgattccatgtcaagatggtttgtcggctcatcaagaagaagaacgtttgctcctgaaatcatcatcttagaaagaaggcagcgtactttttctcctcctgaaagaactttcagcttcttcacaccgtcctcgcctgagaagagcattcttccgaggaatccgcgaacatatgtgacatccttttcttcggaatactgtgtcagccattctgtgatattataatcactgtcaaattctccgccgaaatctttcgggaaatatgcctgagaagttgtcactccccatttataagttccttcgtccggttccatctctccgatcaggatcttaaaaagaactgtctttgcgacttcattacttccgacaaaagcgactttatcatcgtgaccgagagtaaagctgatattgtcaagcactttcacgccgtcgatcgttttagaaagaccttctaccgtaagcacttcgtttccgatctcacgattcggacgaaaatcaatatacgggtattttctgctggacggtttgatctcgtcaagctggattttctcaagggcgcgctttctcgatgtcgcctgctttgattttgaagcatttgcgctgaatcgggaaataaagtcctgaagttctttgatcttctcttcttttttcttatttgcttctttcatctgacggataagaagctgacttgattcataccagaaatcataatttcccgcataaagctgtatttttccataatcaatatctgcgatctgcgtacatactttatttaagaaataacggtcatgagacacaacgatcaccgtattttcaaaattaatcaaaaactcctcaagccacgcaatcgcatccagatcaaggtggtttgtcggctcgtcaagaagcaaaatatccggattaccgaacagcgcctgtgcgagaagcactttcaccttctgcggacctgtcatatctttcatcattttataatgaagatctgtctcgattccaagaccattcaaaagagacgccgcgtctgattcagcttcccatccgttcatcgtagcaaattcaccttcaagttcacttgcctttattccgtcttcatccgtgaaatcttcttttgcataaatcgcttctttttctttcataatctcatacagtcgggcattccccatgatcaccgtatcaagaaccggatattcatcatatttaaaatgatcctgctgtaagaaagaaagacgctctcccggagtgatcgccacttcaccgttcgtcggctcaagctgacctgataaaatcttcaaaaacgtagattttccggctccgttagcgccgatcagaccataacagtttccctctgtgaacttgatatttacttcttcaaaaagcgctttttttcccacgcgcagagttacattatttgcactgatcattacaatatctccttttttgaaacttcgttttacgggatatgtgatgcttaatacgcaccaacgcctatattaacatataatccatgaaaaaggcaaggacttataggaaacatgtacgtttccccaatccctgccttctgtttccgaaagctcctataattttaagctgttctctcaatgcctgctgttcatatcgctgtatacttcacaaaacctggcggcaacggaaaccggttcgtttcccgcataaagatgagaagcatctcccagcttcaacccccgaaaacaagcgattcccttctctcgttcttctgtcactatttccgtcaccgatgtcggagcaaacgcaaaatactgccatgccgaaaaaggcgacatattccacagatgcgacaacaacgcgcacgtaatcccaaaatggcaaaaaaacgtcacggtctccgtgcattctctctccactctataactgctgccttcacgaacatatccatgctctgcaagaaatctgtcaaactcaagagttaccctgtcatatacttccaccgcatctgaattttggcatagatcggattttctccacgcatccctgtccatacattctccatgttccatccaatacgacggaacgatatcccacacgattctcggcacataccgaccattttctttctccgcggtaggataagccttttgaagatgtaccgcctgattcagatcgatccttgccggaaattctctcagccattctacagtctgtgcggtctttcccactttatccagacagtactgcgccgtgtctttcgctcttccaaggggagaaacataacagcttccgagattcaagtcagccgcccgttcggcaagcagttttgcctcacgatgtccttttttcgtcagcgtatcatttatgtaatccggatctccatgtctgataaataaaatcctcactgtctatctcctgcctttcttttatgcaaagcgtccgttttaaccatcgttttgcaagtccggtccacatccccacttcgtctaatgcgccatatatatgcgcctgctcttcctctgtccatttatcaggacgttcttttagtttttgttcaaaccattcttctgtggcgacagacatcccatgtgccccttccgcaaatacatgatgcgcataaggtacgcccgccttcctgcatgcttcggcaaacaaatacccgttttccgccgaaacggtcttatcttcaagagtatgccacaaaaaacacggcggcatctcttctgtcacatgtttttcgaccgacagatattcccgctcttcttcatcagaatcttctccgagcaaagctaaaaacgaatcttcgtttctatactttcccgaagtgattaccggataaccgagtatcatcgcatccggtctgcatgaaacttctttaagaagagaattttcttcttttatatcctgaaaatgaactccgagacttccgcataagtgcccgcctgccgaaaatccgcatacagccactttctccggatcgatccggcactgtttcgcataataacgtacgagccgcaccgttctggccagatctctaagcggctgaaggtgcaaaggctcgccttccgatgtcggattcacactgtatgtaagtacaagcgcattgtatccggccctataaaatgttcgtgcgacgatatcgccttccgatgatgacacctgacgataggctccgcccggcacaacgatcattgccggacggatctgcccgtcttcatgcatataacttatcacataaggaatatctctttcttcactttcatacgaatattcctctcttttccaaattgccgttctcttacctatcatttttccacctcttttataccgatcggcaaaaacattttcaacaatataccttgccggcgcaaggatgattcttataacttgacatctgccaaatacggattctccgcttcgtaaaacttctcattttcaactgcctctgccagcttcatatcaatcggcatacggccaagcaccggaacgttcatctcccgagctgcttcctctacatgactttctccgaacactttaatctcttttccacagtcagggcattttacataactgtagttttctatgatcccaagtaccggaatattcatctgttccgccatattcgccgcttttttcacgatcatctgtacaagatcctgtggagatgtcacgatcaccacaccgtctaccggaagcgactgaaatactgtcaaaggaacgtctcctgttcccggcggcatatctacaaacagataatcaatatcgccccacataacatctgtccaaaactgcttcacaactcccgcaataatcggacctctccaaataacgggcgcggattcgtcttccaggagaagattgaccgacataattcttgtctcatcttttgcaatacatggaagaatcccttcttccgttcctcttgctttctcatgtattccgtacattttcggaatagacggacctgtaatatccgcatctaaaattccgactgtatatcctttttctctcatcattcttgcgagcgacgccgtcacaagcgatttaccgacaccgccctttccgctgactacaccgattacttttttaatagatgaatatttgttttccggttcacggaaatcctcttttttgctgctgcatgaatctgcatgtgcgcatcctgcgcaagattcttctgtacatccgtttgtattttgctgttctggcatgatctgctacctctttctataatttactcttttctaagtataacacattcgggcaaaatcttgtactgattttgcccgaatatcatttctcatttattaatcatttattcatattcatttaacgtctgtttacaaccgttccactgttatcttgtcacatcgttgagccatttataacttcgataccgtttatatgtgatcggtattttaataatctcatcactcataagtatcacataaacaaccggcacacttagcttaaatacaaatgccgcaagaaaaccgaacaatatcgagcagcaccacatcgtcgtcatatcgagaatcaatccgaatctcgtatcgccgcccgaacggaacacccccacgacaagcgttgtattaatcgcctggccgacaacaaaataagacataacaaaaaacatgatcctcaaatattcttttgccgtaccgctcaaagtcagtgccgccgatgccaaaggcgaaaccgcaagaatcacagttcctcccaatattcccatgataatgctcaatataagaaaccgttttgcatatgctttcgcatactctgtctttttctctccgatcgtctttccaagatagatcgccgccgcgctggacaacccaaacgatacaactgtcgcaagctgtcttgccacctgcgccactgaatttgccgccacagccgcgcttcccatatgaccgagtatcgctgtgttcgccgccgttccaagtccccataaaacttcattgactacaaccggaagggcataacgcataaaatcagaaaatagaattttatccgtatgaagcacatatttgaacctcagcctgatctccctgttaaataaacgggcatatatcgcaacaagcacaacttccagaatacgggcgcaaagagttccaagcgccgctcctgccacacccatcttcggaagtccgagcagaccaaaaatgaaaatcgcattcattatgatattgcatataagagacagaagatagacaactgttgccacaacaacccgttccacactccgcataatatacaaatatgcctgcgtaactcccatcattatataggtaaacgccacaattctcaggtatttaactccttccgaaacaacaaccggatcgtttgtaaatacctgcattaacagttccggtaccgcaagagccgacacagtaaaaagcgccgtcacacagaccgctgcttttactgccattcctaatatcttttcaatcgcatcccggtcgccttttccccaatactgagccgtgagcaccgtcgctccggaggtcagaccgaacaggaacaatgtcataatatactgaatctgtcctgccaaagatgcgccggataaagctttttctccaacagcgcctaacataatgacgtctgccgccgtcacgcctacgttgatcagattttgaagagccataggaacaacgagcgccagcaccgttttgtaaaactttctccggtcaatttctatatgattttctctctttagcatgatattttccgtaaactaccttttacttattcttttgctgccctgtaatgattctgcagctgtttttcgatcattcttttccgttaaagcaatacgtacacactttacacggatcgattccgatcgatgcaatcagatcatccagacggtggaaacgaagagtcgtaaaattctggatcttccgaatctcttctaccatcttcgcataacggcagctgtccggatcggcatattccgcaagcacttctgccggacagttttctccttctgcctcttgaatgatcctgcgtgtgatcagatcaagatctgatttggatcttgaaaaattcaaaaacttacaaccgtacacaagcggcggacacgccggacgtacgtgcacttctttcgctccgctcttatagagaaattccgtcgtctcccgaagctgcgttccgcgcacgatagaatcgtcgatcaaaagcagtttcttatcttcgatcagagactgcaccggaatcagcttcatctttgcgatcagatttctctgactctggcttgtaggcataaatgacctcggccacgtcggcgtatatttaataaacggtctcgcatacggtattcccgattcattagaatatccgatcgcatgtgcgatcccagaatcaggaactccggctacaatatcaggatgcacagaatctccatcgcgctttgcaagcatacttccacatttataacgcatttcttctacattgacgccttcgtaagaggaagtcggataaccataataaacccataaaaaagaacaaatcttcatctcttttcccggagctaccaactgttccacgctttccggagtaatcagatcgatctctcccggccctaattctttgtacgcttcataaccgagattaatatacgctgaattttcaaaagaaacacagtacgcctcttctttcttaccgacaacaaccggagttcttccatatctgtcacgcgccgcataaattccgtctttcgtcataagaagcagcgtaagagagccgtttacagtttcctgcgcataacggattccttccacaagcgtttctttcttacagatcaaagatgccacaagctctgtcgcattgatcttacctccgctcatctcctgaaaatgggaatgcccttcttcaaacactttttctaaaagttcttcttcattattgatctttccaaccgtaacgatcgcaaaacttccgtgatgcgactgtataagaagcggctgcggctcgtaatcagaaatacatccgattccaagattgcctttcatctcatctacatccctgtcaaattttgtacgaaaaggagcattttctatattatggatcgcacggcagaactctccgtttccatacgcagccattccgcctcttctcgttccgaggtgagaatgatagtccacgccgtaaaataactccaatacacagtctttttttgatgcaactccgaaaaatccacccattttctatgtgcctcctgtaaatttatcaaattcattctgctatttatctttcaccttataaaggataaggagttcccggcgataagtcaatactttctttcatatgcctgctattatcgtttattatagatatatataagcagaagttctattcctttatttttgccgctttggcatcaaaatcattctccctgcaaacgattcccattttctccgtctatacaataagaggatgccttattttgacatcctcttacctgttagtcttccaaggcttctttcatctctttcattttttccatgaagcctttctttttcttcttctcgactttccctgttgtctcatcatgttcatgaagtgtatttcccgtcaattcatcaaatcttcgcagcgcttctttcgcctccgaacttaatctttccggagtctggatctcaagcgtcacataatgatctcctcttgcctgtggattacgaagagacggaactccttttcctttaaggcgcacttttgtatctgttttcgttcccggttttacattataaatcacatctccgtctaccgtaggaatacgaatatctcctccgagcgccgctaccgcaaatgaaatcggatgcgtagagaaaatatgaatatcttgtcgttttaacgacggatgcgccgaaacattcacttctacaagaagatctccccgtggtccgccgtttactcccggttctcccttgtctctgatacgaacgctctggccgttatcaattcctgccgggatagacactttgatcttctttcggtttgcaatgtatccgcttcctgcgcattttgaacatttttccttaatcactttaccggagcctccgcagttaggacatgtctgcacattttgaactgttccgaaaaaagactgggatgtatagacaacctgcccccggcccccgcatttcgggcatgtttcgggagatgttccgggttttgcccctgttccattacatgtttcacatggatctttcaaaataagatctaattctttttcacatccgaaaaccgcttcctcaaatgtgattcttatactttttctgacatttgcgcctcgcatcggtccgttacttcttccgcctcgtcttccgccgccgaacaggtcgccgaaaatatcgccgaaaatatcactgaaatccgcaccgctaaagtcaaagcctccgaaaccgcctgcgccgcccgcgccgccatcgaatgccgcgtgaccaaactgatcatatttctgtcgtttttcaggatcgcttaaaacagcatatgcttctgatgcctctttaaatttcttttccgcctcggcatcccccgggttcatatcgggatggtacttctttgccagtacacggtatgcttttttgatcgccgcctcatcagcatctttcccgatgccgagcacctcgtaataatctctctttgactctgccataatacgaatactctacctttcctcaagaaaattctacgaaaccgctttttacacgatcccgtagaatttttattttacattttgcctgatatttcaagcttttatctcgtttcctctgatatcttaaacttctttataatctccgtctacgacatcatctccgttgaatccttccggagccggtcctgcatcctgacctggattcggtcctgctgcacctgcacctgccgctgcgcctgcctgctcatacatctttgtgaaaagtttctgtgcgctttccatcagtttttccttcgcagctttgatctcagccacatcggcttcagatgtattttccggagttgattttgccagcacgtcttttaacgcctgcatatcggcttctacagccgctttatcgttggcatccagtttatcgccgacttccttgattgccttttctgtctggaataccattgcatcagcttcatttcttgtatcgatcgcctctttacgtttcttatcctgagcttcaaactcagcagcttcttttaccgctttatcaatatcggaatctgacatattagaacctgctgtgatcgtgatatgctgttcttttcctgttccgagatcttttgcagatacgttgacgataccgtttgcatcaatatcgaaagtaacttcgatctgcgggattccacgcggagccggcgggattccgtcaagtctgaactgtccgagtgatttattatcttttgcgaactgtctttctccctgtacgacattgatatctaccgctgtctggttgtctgccgctgtagagaatatctggcttttctttgtcgggatcgttgtatttctctcgatcaatcttgtggcaactccgcccattgtttcgatagaaagagaaagcggtgtaacatcaagaagaaggatatctcctgctcctgcgtctcctgcaagttttcctccctgaacagaagctccaagagcaacacattcatccggattcaaagatttgctcggttcttttcctgtcagtctctttacttcttcctgtactgccggaatacgtgtagatccgcctacaagcaatacctgaccgagatctgccgctgtaagtcccgcatcggaaagagcgcgtcttaccggctctgccgttctgtctacgagatctcttgtcagctcatcgaattttgctcttgtcagattcatatcaaagtgtttcggtccttcggcagttgccgtaatgaacggaaggttgatatttgttgttgttgcggaagaaagttctttttttgctttctctgccgcttcttttaatctttgaagagccatcttatccgttgaaaggtcaacgccttcttttgccttaaaatctgccagcatataatctgtaatcttctggtcaaagtcatcaccgccaagacggttatctcctgctgttgagagaacttcgatcacgccgtcgccgatctcgataatggaaacgtcaaacgtaccacctccaaggtcgtataccatgattttctgctctttctcattgtccaggccgtaagcaagagccgctgccgtaggctcgttgatgatacgttttacatcaagacctgcgatctttcctgcatcttttgtagcctgacgctgcgcgtcgttgaagtatgccggaactgtaataacagcttccgttactttttctcccaaataaccttctgcatccgctttcaatttctgaaggatcattgcggaaatttcctgaggagaatattttttctcatcgatcgtcactttaaaatcgcttcccatctctcttttgatagaagaaattgttttgtctgcgtttgtaactgcctgacgttttgccggctctcctacgagacgctctcctgtctttgtaaacgctacgactgacggcgttgttcttgcgccttctgtgtttgcgatcactgtcggctgtccgccttccataacagctacgcaactgtttgttgtaccaaggtcaataccgattatttttcccatgattttttcctcctgcttcttatcgctttttattattctgaaataaagttgcttttctactaatttgctacttttaccatactgtgtcttacgacgctgtcatgatacatatagcctttttgaaattcttccgtgatgatgttttcacccgcttcctcatcttccacatgcataaccgcattatggaaatcaggattaaattcctggcctaccgcttcgatcggttttacaccgaccccttccaaagtcgtcatgatctgtttgtagattttttccattccttctacaaaaggatcttccttactttcctccggcacggctgcaagaccacgttcaaaattatcgataaccggaagaattttttctatgatatctttcgctccgatttcatacatttgagatttttctctctctgtacgcttgcggaagttatcaaactctgccatttgacgggtgagacgatcagtcaattcttcaatcttctcgtcttttttatcttttttttctttctttgcgaaaaactttttcttttcttttgattctgtatcttttgtatcctgagactcttccgtctcttttgaagcttcctcctcaacagatcctttcgtctctgccgcctcgtcctgctcatctgcagccgcttcgtcttccatctttgccgcttctgcctttgcttcctcgacagcttcttttatcatatcttctttgctcatcttgtcacccaccggctttccacctttctatccttttggatctttattataaatcgcatccaactctccctgcagaattttcagcgtcttcatgacatgttcataatccatccgtttcggtccgataatgccgatcgttcctttcatgccttcgccaagttcatacgtcgctgtcacgacactgcagtccttcattgttttaaccggagtctcatctccgatataaacctgtattccgtgactatcctcacttgccagtgtctctgtcacaagatcggcgagctgctgcttctcttcaaatgcactgatgatctcctgtgcgctttgcttatcgctcaactccggatacttaaagatgttcgtagctccgcttgtataaatcttcatatcttcttctacatggatcgtctctgccaccgcatccagtacatgagcgacaacctcactgtgaatgcctgcctgctctttcagccttgcgatcaatccaagtgtgatctgatcgatcggaagtccgttcaatgtagtattaagaagcatatttaacttcagaagattctcattacttaacatttcccctacttcgatgatcttattcttgattacattaccgccaagtacgataaccgctacgatctgttctgcatcaacttgagaaagctgaataaatttcagcgtattccgattgttaatcggagacgataccatcgtcgcataattcgtattcgtcgccaaaactcttgctgcctgctgtaatactttctcaaccttatcggttttctccaacatcgcgctttctctttttgcaatctcttgttctttttcttccatcagcatatcaacataaagccgatatcctttatccgaaggaatccttcccgccgacgtatgcggctgaaaaatataaccgagatcttcaagatctgccatctcgttcctgatcgtcgcggaacttaaattcagatctgtatatttagaaagtgtccgcgagccaaccggttctccggtctcaaggtaattctgtatgatcgcttttaatatagtaagttttctttcacttaacgacgtatcgaccgccacagcttttcctcctctctcgctattagcactcttttctttcgagtgctaacacctttcgtatattaagatagcactgcattttccttttgtcaacagtgtttattatttttttatttatttctgtacatccgaaacgatgtcttctatctgaatttcctattatccgaaagaggcagaatcacagcatccgctttttcaaaacaaaaactcactcattacatagttgcttatatcaactccccgctctgtcaggcggatctgccctttttcttttatcaaaagacgttctttttcaagttttccgatcgtttctccgtaaaccgtatctatttgcaccccgaatgtttcaaaaaaacttttttccgacactccatctgttttccgcagtccgagaaacatgaattcttccatttgctcttgcactgacagtacacttacttcttctgctttttcccataccgcttttttactctcttcttttttgccgtccggatctacagtcttattcagtcttatataaacatccattttatctgtattgcagaatcggtgttcggcaatcagagaggacgcccccagtcccagtccgagatattctcttcgctcccaataccctaaattatgcctgcactcatatcccggttttgcataatttgaaatctcatatctctcatacccgtattcccgaaggatcttctctgttatttcataaatcgcccgttctgtatcttcatcgggaagcggaagtatctgtctgtcttttcttatattaccgtctttatctgatacttccggcatactactctcgcgggacaacagttctttttggcatatccgctccccatcctccccgtaaatcgtaccgaaaacagttccttcttctataattaaactatatgcggaaatatgttccggctgtaactgcgcaactgtgcgaagcgttgtttcccagctcttttttgtctgcccgggaatcgccgagatcaaatcgatattaacgttatgaaatcctgcttttcttaccatcttccatgtagtgagaaattcatcatatgtatggatacgtccaagcattttcagttctccgtcatcgaccgattgaagaccgatacttaaccggttcactccgcatgttttccacatgtttatcttttcttccgacacagttccgggatttacttccatcgttatttccgcattctccgcaatatcgaaactttcccgcaaagcacgaaaaatagaggcagtgtatactccctctaatatagaaggagttccaccgcctaaaaaaatcgttgtcacgcaataatccgaaaactgttctttttttccttttatctcctccgcaagagcttccacataagcagaaacctcctcttgctttgcagaaaacgaaaggaaatcacaatacgcacatttctttacgcaaaaaggaatatgcacatacagttccagttcttttttcatattttcctttacctctttaagatgttttaaacatcactttttcacttatacatcgacaacaaaaatcactcgtcatccaacttcagtacgctcataaatgctttctgcggtatctctacgctgccgacctgacgcattcttttctttccctctttctgcttttcaagcagttttctcttacgtgaaatatcaccgccataacattttgccaacacatcttttctcattgcctttactgtttcacgagcgatgatcttacttccgactgccgcctgtatcggaatctcaaaaagctgtctcggaatttcttcttttaatttcgcgcacatttttcttccgcggtcataagcgcttcctgcaaatacaataaacgacaatgcatccacttcttctttattaataagaatatcaagcttcacaagttcagatttctgatatcccatcatctcataatcaaatgacgcatatcctcttgatcttgacttcaatgcatcgaaaaagtcatagatgatttcattcagcggaagatgataattcaatacggcacgtttttcctcgatatattccattccctgataaatgcctctgcgttcctgacaaagatccatgatcgcaccgatatattccgatgtaaccatgatctccgcttttaccataggttcttccatataatcaatctccgccggatccggcatattcgtcggatttgtcagatcgatcacttctccgtttgttttatggattttgtaaattacactcggcgccgttgttacgagatccaaattatattccctctccaaacgttcctggataatctcaaggtgaagaagtccgagaaatccgcagcggaatccaaacccaagagcgaccgatgtttccgcttcaaattgcagcgccgcatcgttgagctgtaatttttcaagagcgtctcgaagatccggatactttgctccgtctgccggataaagtccgcagtataccatcggatttacttttttatatcccggcaaaggcgagtcacacggtcttgacgcatcagtcactgtatcgcccacccgcgtctcttttacattcttcaggctggcagtaatatatccgaccattccggcgctcaactcttcacatggtataaatcttcccgctccgaaagttccgacttccacaacatctgcctgagcgcctgtcgccatcataagcatcggagttcctttcttcaccgttccttcctttatcctgcaaaatacaatgacccctttgtaagaatcatagacggagtcaaagatcagcgcttttaacggagcctttggatctccctgaggcgcaggaacttttttcacgatctgctccaatacgtcatggatattttgtcctgtcttagctgaaataagcggggcatcttccgcttcaataccgatcacatcctcaatttcttctttcaccctctccggatctgcactcggaagatcgatcttattgatcaccgggatcacatcaaggtcatgatccaacgcaagatatacattcgccaatgtctgtgcttctactccctgagctgcgtcaactactaaaatcgctccgtcacacgcagccagacttcttgaaacttcgtaattaaagtctacatgtcccggcgtatcgatcaggttaaacatatattcctccccgtcgtctgccttatatacggtacgaaccgtctgtgctttaatcgtaattccgcgttctctttcaagctccatgttgtcaagcacctgagactgcatctctctgctcgtcaagaggcctgtctgttcaataatcctgtctgctaacgtagattttccgtgatcgatatgcgcgataatacaaaaatttcttattttactctgatctataactgacaatttcattcctccattatttgcatattttatatgatttctgtatttgattttgtgataaacttcactgctttcccgaattcttcacaataaaaagttccacagccaaagtatctgtcataagtccggtcttaacattttgctctaactgcgccccttcttccataacagttctcagctctccgagttcatatcgtttcgccgcatccatataccttcccgcagcaaacggatggatccctgcctttgaagcgatttccttcttcccgtatccattcaccatcagacctttgacatgaaataaaaggcggtattctctcgtcatcaaaaacagaatacgcatcggcggttctttcagggcaagtagctcataataaagatccaacgccctcttctggtcttttcctgcaaccgcattgaccatctcaaatatatggttcgtaatctgagtgacacagatctgatcaatatcgtctcttgtaatccgatctcttccgatcgtataacaaaacagtttttccagttcttgtgtgatattctccatatccgtgccgaccttattcagaaaatatgccgcatctgcgccttccatctgctttttttctttctttacaagaccaagcacccagcgccgcagcgtattttcatcctgaaccgtcaactcgacaatatgaccttttgcctttaccgctttatacagcctgtttcgcttatctacctctttttctataaataaaaaataagtagtaggcgggatgtccgtaatataatctgccagatctgttcctgcatttttaaaaaagcctgtatcttcaaacacaataagacggcgcgatgcaaaaaacggcaatgtctccgccagatcgattacctcttttatatctatgttctttccttcatagacggcataattcatcgtatcgccttccggaatcatcgctctgacaagccgttccctatactgtcgcttcaaatatgactcttctccgtacagaagataaatctgtttaaattgtcccgttttcaaatcttcatttaagcttttcataactcttgtattataaaggaaaaacaatcattttgacaagagaaaactctcaatactaatctgtattccgtcagactttattgtgacagccccgtctgtctgagtattatatgttttcacttttctctttttcaacctatttaacgtctcttcatgcggatgtccgtaccgattatcaattcctgccgagatgatagccgctcttggatctgtcttctcaagaaatgcagctgtacccgagtttttcgatccatgatgggcacattttaaaatttcatattttctcaaaacatcgcttttaacaagaagttcctctcccgcaccttccacatccccggtaaaaagcatatcgaaattcccataagaaaactcaagcacaagagacgcctcatttcccgcctttggttttgtcagcccctgcggtatgtccgtaagcgggccgatacatctcaaccgcatcacttcttttgaatcgtttttttctgtctgcctttctcctcttccatatatatttgctcctgttttcacagaaacgacacgcgttccgttttctaccgctatgcgcgccagatctgccaacttttcatcatgatattcttcgggaggaagcacaagcgtgtcaatacgaactcccagcttctgcccttccagaagttctcttattccactgatatgatcctcatctccgtgagtcacaaatacataatcaaggcatccgatgccctccgacaacaaatacggttcgatccgttgagcgcctgcctgttttacatcactgctgcccccgtctatcaaatagtttttcccttttcccgaaagaacaatgccatcaccttgccccacatccagcactgttatttttattccttcaatatcccgggtttttgctccgcataaaacaatcaaaaacaccgccgaaacaaaaagcatatacccccatattttctttggaaaacgccgatacattccatataacgcgaacaatatcacataataagcgacaagtaattgtacgctcggttttcctgccgttatccgcccgaacggaagcataactgccgcagagcacaatcgatcatacgcccaaagtatcacgccggaacttttcagcaaaataataccgatcggttttacaagcaggatcatcacagaacccgacagccccgttcccataataaccgggagagccgggatcacaaacaaatttaaaaaaaccgagtacggcgggatttcaaaataaaagtacagcataggaccaagcaaaaacagattcactgccaaacttgcgctcaccgctttccccatatgcgtccatatattctttttctccgtaccacacccgaacaaacattcaaacaaaggcgtcagcatacaaattccgcaaagtgatccaaaagaaaacaaaaatcctgcatctgacagacagagaggatcttttgcactaagcagcgccgctgccacagcaagacttgtgggaaggtcataatctcttcctgtcacttcagcgcccatccgaacggaaaacataataagcgctcttaaagctgaaatactcgctccggtcattactgtataaaaaagcaaaacaatcgttccgacagctcctgacaccggaaatcccactcctctttttctcagaaatccataaagaccgcttccgataaaggacatatgaagccctgatatggccagcagatgaccgatcccgtttttctgatacaactttttcatatatggatcaaggtctcctttttctccgagaaagatcgcacttatcgtgtttccataataactgcccaaacaccctacaaggagtttcttccaaccttgcctgaattcatgcaggaattgtctgatgcattcagtctgcccggataatataccgacttcatccgcccatacatatgcgcctattttctgccttttgtaataagctctctgatcaaaattgcccggattacgtgcagtctcaaatgcagacgcctttccttttatttttagtttatttccgattttgatatgtgccgcatcttctttttcaagataaacaagcactttctcttcccatatttttcttggcagctcttgactgaaatcataggaagaacgatgcccgtcgctttttccgaatacagactgccttgcgatctttcgatcgctgccactataaaaagagacggcattcccctttacacggactgccgttacagattctttttcatcaatcctatctgccgttcccgtcaatataagattgatttctcctttattgtttcggtttacgatctgcccaagcgcggaagtgtaatctcccgcgccgaaaaacagcacccttatcgcctgtactgtaagaaacagtacgcaaaatatacataatggtcgtcttttcattttttgtcatcggctgcgaccaactctaaattttctttcagcggctgtgaaagatccacagtgcccatatacttagcttttgactctccgttaatcgtaatctgaacctgcgtcgcctctgttccctcaacaagcgaatttacgattgaataaatcgtaagtttcggcaggatatcatactctccgttcagaaacgtactatcgaaattcacataacaaatatcatctttgatcgtcactcccaacagatttgcattcgggttgatcgtcggataagctccgctttcaggaccctgcatcagtttctcaacgatcattttctctttcgacaaattactgctgtaccttgccgaaactttttgcggaacaagcttatctccgctttcatttgcaaaataaagcgttaattctaccgtctggtaggcgctcggtgacgatcctgtgttttctacgaaatcatcttctgtcataagtccgatcgaattgccgtcactgtctttaagcgactctccgtcgatcgtaaacagtactgcgttgaccccttcaatttccgaaagcgaacatacaatagatgccctcataagcttttcttccagactgtttacttttaaatacgctttattgaagtcgatatctaatatactcccccgcagttcacatttttgtacagatacttcattcggaatcggaggaacattttcgattttatccgatggtttccgaagcgtttccagtatatcctctgccataccgcagatttctttgtccgtcatcttcttgccttttgccgttttcccggtttcatagggcgctttaacaagtcctgttctgtcttcattaagataatagactgacatctccgaatctattttcttcttccggcagcctgaaaggaaaaacggcagacacaaggacaaaataagacaaatgcatattacgaccgcaagtttcctgttccttttcatctccccactccttccggcactgttgtatagatcagcggaatccgaactgtaaatgtcgttccctcgccttcgttactatgcactttgatcgatcctctgtgaacgatcactgcgtttctggcgatcgcaagccccagtcccgttccgccgatttctctggaatgagacttgtctacccggtaaaaccgctcaaatatatgtgcctgatcttcctgagggattccaagaccggaatcttctacttttaaataaaaatatttatgatcggcatttaaagacacatgaacccatccgttttcatgattatatttaatcgcattttccacaagatttgaaacggcaagtgtaaatttcgtctcatcaatctctgcgctcaccggacggaaactttccatgaccatctcaacatttttcttttccgcgatcggtttcagcctctttaatatttgttcaagcaagtcgttgatattcacctgctgaatgttcatcgtctgaccggtccgattcattttcacaagagaaagaagatctgttatgatctgattttcccggtcgatttctttcgcgatatcttccataaattcacggtacatttccacaggaaggttttcctgctcaagaagcgaatctgccagcactttcatcgatgtcatcggagttttcagttcatgggaaacgtttgagacaaactcttctctggagtcgtccagctgctttagtctgccgagcattttgttgaacgcttcacttagctgacttgtctccgcaaacgtgtctacgtgcagcacatcgtcactgtatccttcactcacattttcaatcgcccctgtaatcttatgaatcggttttacaagtttattggcaagggccaccccgaaaacagccaggaaaatcgccgctattcctactacgacacctccatgcgtataaaatacctgttttgtaacttcaatactgtctgtagagacacttgctaaaatcacaccgtctatcttctttttccccgggatattgatcggtgaagtcacttcgatataatgattctttttatcatagtggttcgtcggctttgtgcgcatgcaccgaacgacgctttccgatacattcgtctttccttcatcgagattatatgtatctttaattacgcagagatcttcatccatgatcataactctgccgttatatatattcgtcagctgcgtcagattagaatcgatcacttccgaagtcggatcggaaagatatccgtatgccgagagctgattgcttaatattgtacattgattttggatttccgcagtccgaagttcgaccgcacgcgactcgtaaaatgctacgattccgaaaagtgttgcaaggcagggtatcagccctgccagcattgtacaaagaatcacacaaaaacgcatgttcccgataattttacggttggatacaaattgatatttaatcttggaaataataacccactccccactttgtatgtacatatttcggttcactcggattcatctcaatcttctcacgaagccttcggatatgtacgtctactgttcttgcatctcccgggtaatcatatccccacaccagattcagcagattttctctgctgtatactttgtttggattcattgccagaagctctaaaacatcaaattcttttgccgtaagattgatctctctctctccgataaatactcttctgctctcacaatcaatctttaagcttcctttgatcagcaccggtccgcctgccggttctttccgtttcgacgtccgcctcatgatggctttgatcctcgccttcacctctaaaatgttaaacggtttcgttatataatcatccgcaccgtattccagtcccagtatcttgtccatatcctcgctctttgccgtcagcatcacaaccggcatatccgaaaattcccgaatctgctgacacacctgaaaaccgtccagtttcggcagcatcacatccaaaaggacaagatcatattcacatgcctttgcgtattccaaagcctcctcgccgtcataggcgcagtctacttccatgccttcctgctcgaggctgaagcggattccttttacgatcagcttctcatcatcaacaactaaaattctcttacccatactcctcttttttcgactccttatgcactgcggtatacaaaaccgctctcttatgtcagatcgttatgtcttcttttattttattaaatactccctctttgattccctcaatctgcatcaattcttcgattgactgaaagccgccgtgttcttcccgatatgcgattatactttgcgctttcgcctctccgactcctgtaagcgtcatgagttcctctttttcggctgtattaatatttatcttcccatcgtccgtacgttcggtcacttccgatacaacccctgcgcctttcacttcatctaaagaaggcacataaatctgttctccgtcaacgacaaccctcgcctgattaaccgcttccgccgcagcgttttctgtcagcccgcccgctttcgcaatcgcttcaaacactctggaatcctgttccagttcatatacgcccgaagcctgaacttctccgcaaacatatacgaatacttttttacgctccggattttcttccactgtaccgctgtccgcttccgccttttttctttctgccttctctgctggctcttcgctcttttgtgatgtatgatccgacttttcttcttccgcagaaaataaaaattcttctgtttcaggaacggccgaatctttgttcccgcacccaaacaggaaacttgccgaaataagaaagaacactgtcatgacagcgtatttttttctgtattttttctgattgtcttgcatattcttctcctcagctttgccgggagaattacccctttatgtcggacattaatattgtaacgaatttttactaaaattacaatagacaattaacgtcttgttacatctctgtcaacctattaaggacaactttctttttctttacaaaaaaaacatatatattacagatttattacttttatttccattgaaaaactgctatgccggcaaccgcaagaaggagaccacctgcttttctccatgagaacggctcccgatccattccaaacaatccgaaaagctggatcagataagcaaccgtaagctgtgcgatcacaatgagaagagctgaacgcgcaggccctaacgcttcgatactttttataaccgtccatgtgatccctgcgccgatcacaccgcctaacagcatatatttcggctgtacttccataagctgtgaaacctgatctcttccggtaaaaaaccacatcgcaagacaaaccgcaaaagccgtaaactgtacccagccgtttccgacccacattcctgttgtcttcgtaacctgtgtgttaaatactccctgaatactcataagcgctccggacaaaagagcaattaaaaaaccgatcatatacatacctccgaactgtttagatcaaacaatttttctaacttcctttagtatgtccttcgaccggtttcttattctgtctatttatgtaacattttctcttatgaaaacattggagaaatatctttacggaaacacttttatgcaagtattctgcgcatcttctcaaccatctgatcgatatgctctttttctacgatcagcggaggaacaaaacggattacgtttccctgcgcctgtatgataagcagaccttcttcaatcgcacgatcattgatctctttgatcggctttgtgatcacaagaccctgcatcagaccttttcctcttcgctctgtcacacagtcaaattccgctttaagttcttctaatttttctgtaaagtatggagctatctcattgacatgtcctacaatattttttctctcaaaaatggaaagaactgtctttaccgccgtgcacgcaagcggatttcctccgtatgtcgccccgtgatctcccggtttaagagaatatccggcaacctcttccgtcattgcaaacgcgccgaccggaatgccgtttccgatcgctttcgccatcgtaaggatgtccggctttactccgtacccctgccatgcaaacatcgtacctgttctgcccatgccgcactgtacttcgtcacagatcataaggatatcgttttcatcacagagctttctgatcccttccataaattcctgtgtcgccagatgaatgccgccctctccctgaagcggttctaaaataatcgcacacgttttctcattcacaagcgacttcacactgtcaagatcgttaaattttgcaaactttacccccggaacaagcggctcaaaaggttctctgtaagaatcatgtcctgtaaccgataccgctccaaatgatctgccgtgaaacgagttttccatagcgataaattcatatcgtcccgatccttttgtatatgcatatcgtctcgctgcttttaaagccccttcatttgcttcgccgccgctgtttgtaaaaaatacccgatccattccgctgactttattcagcgcttccgcagcttccccgcagctttcatgataataaaggttggacgtatggtataatttatcaatttgttttttcagcgcctcgtttaattctttattgtcatacccaagccctgtcactgcgaagcctgccgcaaaatcaagatattcttttccgtctgtatcatacagatacattccctttccatggtcaagtgcgatcggaaaacgattatatacatgaataaggttttcctctgccgcctgtatcttactgttcatcgtgattatacctgctttctgtactatttaaaatcgctgttccgatccctttattagtgaaaatctcaagaagaagacaatgcggaatccttccgtcaagaatatgcactcttgaaacacctgcttcgatcgcatcgatacagttctgaagtttcggaagcattccccctccgatataaccttctgtcattagtttttccgcctcttttacacaaagttccgagattaaggtagacggatcttccggatctttatacactccctcgatatcagtcaaaaacgctaatttttccgctttcaccgcgcgcgcgatcgcacacgccgcatcatctgcattaatattatatgtatggtaattttcatccataccgaccggacaaatgatgggaaggaaatctttttccaggagatcgtaaataatctgttcatttacctctgtaacttctcctacatatccgatatcctgaccgtcagagtatttcttcgccacctttaacaaagctccgtccttaccgctgataccgatcgacctcacgccaaggctctcaacaagttgaacaagacttttatttacttttccaagtaccatctcggctaattccatcgtatctttgtctgtcacacgaagcccattgataaacttcggttccataccggctttttcaacccatttgctaatctcttttccgccgccatgtacgatgatcggcttaaatccgacaagcttcaaaagcgtcacatcctcaataacgcgctttttcaattcttcgtcgatcatagcgcttccgccgtatttcacaacgatgatctttcggttgaaccgctggatatacggcaaagcttcaatcaaaacttctgctttatcaagatattgctgcatgtttttattcatgttctctctccaatctttttgtctcgtatctttgatcctgcaaataactcttttttcactgacatgttctagcttctgtaatctgcattaatgctgatatattcatgagtcagatcgcatccccatgccgttgccgcggcatcaccttctttcagatcggcgatcgcagtcaccttaggctcagataaaatttccgttgctttttcctcactgtaatttagcgcaacaccgttttcaatgatctgaagctttcctgccgcactttcaaaaaacaaatccaccttctcaggatcaaactgtgctcccgaatatcccatcgcacagaggattctgccccagttcgcatcgtgacctgctattgccgttttcgtcaaatttgagcagacgatcgatttcgacaaaacctttgcctgctctttcgtcttcgcgcctacgacttttacttcaaaaagcgccgtcgcgccttctccgtctcccgccatctcttttgcaagcgtttcattgacataatggagagctttcttaaactgttcgtattcttttgttccatatttaatcttcttattatctgccattccgttagccagcaaaagaaccgtatcgtttgtagatgtatctccgtctacggaaatcatgttgtaagtatcttccacatcttcacttaacgcacactgaagcgctttttttgtaattgcggcatccgttatcagaaaggctaacattgtacacatatttggatgaatcattcccgatccctttgacatcccgccgatcgtcacggtcttccctccgatctcaaaggtaactgccgcttctttcttctttgtatccgttgtcatgatcgcttttgctgcctctgttcccttttctttgctgctgttctttgcctctgccagcattttgattcccgatttcacccggtccatcggaagctgcataccaatcactcctgtggaaccgacaagcacgctttccgcctctacgccaagaacacaagccgcctcttttgccgtttcttcacaatatttcattccctcttctccggtacatgcatttgcaatgccggaatttacgatcactgcctgtggtttccgctttgactccacgatcgcgcgatcccactttacaggagccgctttcacaaggtttgttgtaaaagttcccgccgccttacacggcttttcactgtagatcagcgccatatcggtacggtctttatacttgatgcccgctgccgctgccgctgcctgaaatccttttgccgctgttactccgccatcgatcactttcattttgtcctctcctttttgtaccctatatgttctgtcaaagtttcttctataaaagaaaactccgcctcttaaaagaggcgaagtcaatccgcgatttcactttaatgaaagaagaaccgtttctttatcaaaacgtctgtatttctgttttttgttctccccccgcctttttctgtgtcgacgattgttttaaatcatctaaccgtctaaattctatacgcaaatattattagctattatattatgaaataaaatctgttttgtcaactatttcatcttttgaattacgggctatacgaatcatttttaaattaccggacatggattcaaactctctcacaataaactaaataccgctgataattgtgaggatatggatgacaagtcacaagagtcaccatatctttgccttcctgtattctgatcttatcaatctcatccggagatatcacctctatccgttccactttataagtcatcgtttcccagaagtttgtaataaatatttcatccccgattttcaatttttcaatctcacgaaacatctttgcataactgtatccccgatgtgcgacaaccgccatattcgtattattcccaccgatcggcatcgacgtttccgtaagctgagcagctccttttgacatattttcttcgttagcgcccaaatataacggaagctcaagatccataaccggaattttaatatatcctgcaattccatcttctactccgtactcttccaaacggattgccgggtttgcatatgcatacggatctgccagattttcctgattgttttttataagttcttcgttatagttcttcatttcttcataaagccgggcatatttttcaggattcgcatcccggacattctccgtcgtttcttcaaactgacgaaacatactctctgtctttatcttataaaatttctgaagaatatgcggataaagcagaatcccgcatccgatcaaaagaagaatcagaccgaaaataaaaagttttctttgttttctcactcttttcatctttttctcctttttagacttctcttcccggcttttttctttctgccccttgtccttcgttttttcttcattttccttacacacaccgccactgcagcaacgaataaactgacgagggcaaataccgctgcgccatatgcgatcatctccgttatatcccgctcttttttcgccgtatccgactctttctcttcgctttccttcacgatttcatcacatattttttctccccggacaagcagtctatgactgtttaccccgtacggcgtacacgttaagagcgttatgtattccttatccgctatcggacgcaatgcatctgtatcttccggctctatcactgaaatctgatctacctcataagtaagaagatgatccaatacatggatataaaacaaatccccttccttcattcgatccaaatctgtaaacaattttgcagtagacaatcctctgtgggatgcaagaaccgaatgcgtaccttttccgcctataggaagagccgttgtttccatatgtccgacgccccgtctcaacaccctctcactgactccatgatagatcgggagcataacgtcgatcgccggaatttcaatatatcccatcactccttctttttcttctacattgagcacatctttataattaccgggcaaaacagagccgcttcctaatataaacggatcttctacagacattcccgtaacagattcattatactttacagccttttcccactctgatttcatatctgtcttcggaagttcttcaaccgtctgctcataacgactgatcatctctgcctggtgccgctctgcaagcttgttactgactgccggatacaacagtatacatgctccgatcagaaaaagagccgttacgattagctttttacttctgctcataatcacctaaagggaggttcgtcttctaagactccctccctcttccttcttagtctttcaatctgctttctattgatcagcgatcttttttctttctggacataaaaataataatgcccgccgctgccataaccgtcagaccgactgccgtaaaaatgatcgttccatttccacctgctgccggaagtttactcggttttgtgtttatgatcgtatcgcttggaaccgtagcagtagatgaatcgtgattcactgtcacttcaaaatatttactcggaagctgatatccttttaccgtttttgtctctacaagataatacttctttgctccggtagctgcgtcgtcaccttgaactttattttcttcattcgccttatttgtataatatgcaagacctctaaactctgcaacgcccttatcgttcgtctttacaactgtagtaaattccttttgattcggatcatataccttcaaagctcctgtaatttctcccgccttattattttggagaagttttactgctgcctgtgctttttccgtactgtcgaaaatcataaattcaacatcttttaaaggtgttccgtctgccttttccccaacctttttaatggcaatctttccggtatgtacttccggccgctcgttttcaggcacgcttacatcaacagccgtaccctttgcagttgtaaatttcaaatctgcgtcattataaattgcttcccctgtttttgccgttttattgatcatcgtatcaaaacggatctgaagaaatgcagcctgagcatccggattattaatcgcttttttcaattttatttttcccgcatcggtcagacttattatcaatgtattctcatttccttctgccggctcttccactgaataatccgtatctttttctaactcatctattaccgttttataatccttatctaccgctttaacaacaatgttccctttatatgtaagctgagaatcgattttatctgtcactttgtataattttgcggtatcatagctgccgttatcatttgtcaatgcaatattacccggaatcgccgtatggataatccacgtctgattctcttgcatatcaaaagaatcatgcttatttcctacatatgtaacatccttttcaatagacagcacttcattctttggatatacatgtacattataattaagtgtctgaccgtctgcctgcgtcatcggaacatcaacataaaatgcttttcctaccatcgcatcatctttctcattcggaagaaccgcatcacttccatcggatgaatccaaacctaactcttctactttgtatctgcccaacggaagatcttccaaaactgcttctccggactcattcgtaactaccgtacgagatactgtcgtttcgttccattttcccgcttggtcctgctccatttttgtaacctgaaacttaacatttgccagcggttctgccgtttcaggaagactatccatttcaataccgccgttttctgtgtttgattcaaacgcattttctgcatcaggcatcttatatttatgaatcgtaatagaacctttctggtcattacccactacttgtccgctattttccacagcaaacgccgtcgtcattgttccaaacaacattactgctgccagagctatcgttgtcatatatttcaaaatctttcccataattttaagctccttttcttttgaatctaaaatataatacaagtgaacaacagatgatcataaatccactgaacacaaaaatcttcgtaccgtttcctcccatcttcggaaggaggcttgtctctctgttagaaaccttaaatccttctatatgatttccactgattgccggtacgtcgcctcttgcttcaaaagtgactttcttactggcatcatctgtaacagcaatagtcaccttccaatatcccgtcggtttcaaatatcctttcggagcttttgtctctttaagaaaatattccccttgtttcaaccgaccgaaatcaacaattccttcttctgatgatacaaccggacctcctacaatgctccatttgtcggcatcgttctcatcaccctgataaagggtaaattccgcgcccgcaagctcatttcctgttttttcatctacttttatgaaggaaaacgggactgtaggttcattttccacttgaagaattccatcttttttttcgaactgcggaactgtggaatcgtctttttctgttttttctactttaacttcatctttatgtgcatcgacggttactgtccatgttccttccggcaaaatgaatccatccaatgtcgcctcttctgataatatgtattcgccggatacaagttctgaaaacttcacgattccatcagccttgcttacctcttccgcgctccatgtacatccttgttcatccacaaatcccgtcttatcgttatgtgcatgtgtacaagactccggtgaaatcaagcctttgcactttttatcatgtttatgattacatgttagtttaaaccgaactccttccatcacagtttgatcttctgcgcttacctttttaaaaacaaagtccgttttttctctgtcatttccgactgtaagattcgccttcaatctgtaaatcggttgaactgttaccgtaccgtcaatcaccccggcctctttttcatcaccttttcctttgttaataaactcagcggcgttttttgccgcttctcccgtctcatttgtaaaggtcttcccggtattcttctgcgttttccggtcaaaatacgttacaatgatctgatctaacaccatccctgttcccggagtaactttaatatttacatccggcgaatatcgatcgatatatgtactgttttccccggctgatgtggattctccttctgtaggcgttaccgtctgttctccgcctgtgatttccatttcaccgcccccaaccgagaaaaagacaggatcactgtttaactcaaaaccttccggagcttctgtttctgcaaaacaatagtctccgttcggaatctccgtactaaaatttatctttccctcttcatctgttatatactcatccggctgatacagctctccttttacaaaattgccttcctcgtcccgaacggctttatacagcttaaattttgcatcttttacaggtctgaatcttccttcgtcggtgcctgctaccgtttttgtcaaagtaagctttgtttctgcgggttccggttttacttttacataaatacggatcatatgattaattaaaaatttcatgcttgaacttccgatcgtcgacatatctgtttccgcattttccgccgtgccataataccacaacacattatctgttcccaaaccgcatctcacatatccacttgacgaaacattacgcaccggaaatatttcatctgtcagtttatcatagtccaaataagcgccatcgatattggtagactgaatcatcgtagcatcttggtcttttaatatttcaatacgaagtccaccgcgttcaatataaggaattgacagatttatattctttatattttcatctgaattatcttccggtttgatcaaaattaccggatctgctcctaatttaaacgcctggtcgagcgtttgctttatgatcaaacgccctccggctatcaccggatattttcgcaccggatttaaagatatattaagatgtgtatttctaagctgctctccaaaccacttttttccttcatcaatatcggtcaatccttccgcagaacctaatgattccaaataatttattgataaaggcgacaaatccgaaatggcattgttctctaagtcgatcattccggcttttctaagccactcgattccttcgatacttttgatcaattcattctccggcttctgagtgtctaactgttctgtttttttctcaactttcttatttgcatattgcacagctccgggctcatccactaatgactccagatacttgtttgcctcttcctgcgtattaaattcttttgatatatccttaatttcaaacgatggaataaacgtagccatctgtgcagatgctatatatgttactttccttgcatatccgtctgcttttatcatccccgtaaaagaccctaaaacttctttcacgctttgccccggtgttcccatccatcctgcttcaaacaaagaatcataaactgcaacggcaaaattacgatctgtaaaaccaacgtccataatctgcccgatgcctatatctctgtctatactgattgccgtagttccttgtgtataaacaggcaacacaaaaaaagttacttttgattcagcaatatcagtctgcgctccttcccctgctttattttcctcattccgccctgtcttacctgatgtctgatcgtcggaaactttcttctttgttttcgtattatttattgtttgttttgtctctgtctttatctgtttgcctgcctgtacatcggccacattccccaatgttacggcagaaccaaatagcaaactgcataataacagtgacacgcccctttttattttattcattatctactcctctccccatcttctctattgttctgctcatcgcatcccaactcctttctactatactgctgtgaaaagcagaagatattagtgagaatttcccttcacatcgcctcttttcctctccctctgttccactcacccaaagtgccaaaagacgcattcttggattgcaggcggcttccaagttctcggacaaatccggactttagctcgtcgtcgttgcaaaaacaaaaagccgcttcctttttgcccctctgaaaaagttacttttcggaatattttatctgtcaatcccatatagtaactagacattaccaatattagcataacaaacctatagactcaagagaaaatgtaactatctattgccaaaatttcgctaaaaactcagcaaactaccactcgaaaggagacgctatatgcaaaatccaaaacaaatttttgcgtccacactaaagtatttacgatataagcatcatttttctcaagaaaaattagttatccagatgcaaatacgcgggagtactattactcgtgaagtttataaattcattgaatccggtttcggcaatatcaaagtttttgacttagttattttaaaaaatatctatcgtattccttactctgatttctttgtcggtctttctcctgccacacttccacgaacttcgataactatgttacttagacatcctactttcaccgataatctcgcactcttaagaacatcccatgaatatacacaacaacagttaaccgatgcaatgaatgagatggggacttttattcaccgggctgcttatgcaaatattgaacgcggaaaacgaaatcttaaagttacagatcttgtatgcttaaaaacaatctacaatgtcccttatgaagcgttttttgaaggaatcaaaatccacgaataaagatgtctatacaaaaaacagagctgccgatctgtacagctctgttttttgtataactctcatatgataactttattcaaacagactattgaccgttaaatgcagttatattttcttcatttaacgtaaaatcataataattcagatccagacgctccgtccatccgattgtattccaaaatgcatttccaatatcattttccgtaaatgcgatcaaagatactttattaatcttttcttctttcagcgctttcatcgcaaaaacaaccatcctttttccgattccgtgacgtctgtaatcttcatctacacagacatgatacaaacacccccgtcttccgtcgtgaccgcacaaaatacttccgacaatgcgaccgtctttttctgccacgacacttgtcgtcgggtttcgtttcaaaaagcgcgccactccttcttttgaatcatcgatacttcgaataccaaatccttttatttttttccaaagggcatataccccctcataatcttctatcgtcatgatccgtaccatactgcatcatctcctctgttttttcccgtttgattttactttctgccctgctgctttttgcacgatatacatcttaaggaaacatcggaacaagctcaaggccttcactttccggaagtccgaacatcagattcatattctgaaccgcctgtcctgccgctcctttaaccagattatcgatcgctcccatcataataatccgatttgtccgtggatcgatcttaaacccgatatcgacataattacttccttccacccatttcgtttcagggcatacgtctttttgaagcacacgcacaaatttttcaccgccataatatttatcatatacagcctttacgtcttcatagcttacttctttcgtaagttttgcatactctgtaactaaaattcctctgttcatcggaactaaatgcggcgtaaaattaagaacgacctttttcccggatgcgtatccaagctgttcttcgatttcgggcgtatgtctgtgtgtcgccactccgtatgctttaatattttcattcacttcgcagtaaagattcggcagttttgctcctcttcccgctcctgacgttcctgattttgcatcgatgatcaaggtgcccatatcgatcagcccttcttttgccaacggatatgccgtcaaaatggaacaagtcgtatagcatcccggattcgccacgagacgggccttcttcacatcttcccgattaacttcacataatccgtacaccgcttcttcaataaactgtggggatttatgttcgagcttataccattcctcgtatatttttacgtctttcagacggaaatccgcgcttaaatctataatctttgtctttgacaaaatttcttcgtttacaagagacgcacataatccctgcggcgtagccgtaaaaatcacatctacctgtgatgccagttcttccatattatcatccatgcagaccgcatctatgatctgaaacatattttgatatacgtccgcatattttttatctatgtaacttctcgaaccgtaccatttaatttccgcctctctatgccctgtcaatattctgaccagttcacctccggcatatcctgttgcaccgataattccaacttttatcataatctattcgctcctctctgctgtttgcttttcacaaacctgccctgtctcaatatttcttcacaaaaaataaaatgaatatgcattctttttgcataataatacatcattcttgcataatatgcaagttttttctgttatcaaatacattaatctgtatttaacttatatccacttacaaaaaatatcggaaatcgagacgctctccgaattaaacttcagcttacggttcgatttccgatatttttatatttctttctattatttttttctatgtttcttctctaaccagtttcttcacacattcctctataacagcagatatattttctgtaaactgttctagcatcatctctcctttttcttctgttgcaggtaccggatttccgtatgttcccgaaacgctcaactctccgatcgatgtgttgtccattccgtacgtagtcggtctgacaggatattcctgcactgcccgctccatatgaactgtctccggctttactgccagcataagtgacgtttcaaactcgcaggcatgaaacattcctccccatgtcggagtttccatatatttatcataaatttcttccattcccggataaaacatccccaacactttcacatctgtttcatcttgtatttcccgtatcgcatattttatcaccgacctgttcgcctcatgtccgttcataaaaataagaatttttaccccgtatctttctacagaacgaacaacatctttcaatatttcccgaagaatatcctgtcggatcgttacagttccgattctgtcacgccaactccaagaatacccaaaatgaatacttggatacacaagcgctcccgttttttctgctgtcttttcagccaatgcttccgccaaataaacatctgttccaataggaagatgatacccatgctgttccgttgatccaataggaacgattactaccggaaactcacgtaaccgctcctgcacttcccgccatgtcatatcttttacttgattgctcatatttgggacacctccacatactttcgcgctgtttctctgatctttttcaaatcactcctctttgcatgtttcggaacaagattacttccggccgccacacctttatatcctaatctatagaaattcactgcattttccggtgttaccccgccaaccgccacataatccatctccgggaaaggaccttttaacgctttaatataacgatcggaaaacgcatcggcaggaaataattttgcaagatggattccacaatttaccgctgcctgaacttcagacggtgtcagcactccgggtaaaacttctatcttcttttccaatgcatatcgaacaatctgctcatcaaatccgggagtcagaatatacggcactcccatatctgaaagtacatcaatttcctcttttttcttaactgttcctgcaccgatataaacatcccgaccttcaaaatactttctgcttgttcggatacacttcatgccgttttctccgtcacttagcgaaatctcaaaccatctgatcccttcttccacaaggccttctatgatcgaaataatttctttttcttccacttcccgaataatcgagacaagtcttgcactttctaacatcattttctccctaataaactgccagccatcgctttggattttcaacaaaaattttatgaatcacgtcctcatccaccccttcgtccagaagtcttggaataaattttgtcttgatatatcgaaatcccggacctcctccgtatccttccagataagaggctctccccatatctcccgaaataagaagctgatcagcatatccgtgagatatcaatgacttaattaatgcaactctgatactgtcaggatagtattttacctttcccggtccatcaaattgaatatagattccccggtcagcaagttttaacaaataatattcatccggatttcgatctaaatgccctaaagcaacagtggaaaaatctacattttcccgagcaagaatatctaacaattccattcccattgttcctgcttctgtatgtccccagatcggcgctccacaccttttctgcgcctgtgccgcagcaactgccgtcttttcttcaagtggatggatcatattgtaatatgttcctatttttatgaatcctgctctgattccgtctctcccttccaaaatatcgtctgcgagaatatcggaaatttcttctgtacttttttcttctacccaattcggatagtaaatatgtttgttaaatccggtcgttgcaatgacatgaactcctgtctcttcagacattttttttaaaagagacagattgcgcccataatctaacgtagacgcctctactaatgtctgtccgcctacagacttaaacagctttaattctgctacgctgccttcataatcgctcacttccaaatccctgtctttctgacatgtcggcggaactgcatacaaatgttcatgtgggtatgtaaatcccatctcctctgcctgaatatctccgcaaactgttcttgcaaatttcattctcataccgcctttcttcatttttccgcttttcttttaaactcctgcaatcattcctattaaacgcataaatacacttaccagaattgcatctgttgatgcaaaccacagaccttccactccatatcctgtcacatcaattaacgggtatgccaacgcaactatcaacgtaaataaaaatcctaacagaaatgaagcaacgacgcatcctctttttcctcctaatttatctccaaatactccggcagcgcctcccatgaaaaacaatccgatcactcccggtaatacgacaactttcaactgagttgaaatcaaagttgcaagaatcccgcctaccatcgcgcagaggaaaccgactgttgtagcaaccggaccgcttgcataaaagatcggaacatctaaagcaggtcttgcaccggggataagcttctcgctgattcctttaaacgccgggataatctcacccagaaacattctgacaccttgaagaagtacgagtactcccgctacaaatgtcattgcctgaataacagcatatactattatattttgtcctcccgccaattctgaaacaacctctgttcctgccatcaaagccgtgaaaatataaactactatcatgacgatactcataagaatcgacatatcttttaaaaagtccagtttattcgatactttcactttttcccatgtatctgtttcttcatcacgatttttctttctgaccagccgacctacaaatccactaaaaacaatcagggaacttccccaaaatccaaatgcaacttcatccgtctttaaaattttccttgtataaggctgagcgattgcaggaaatacgaccatacaaattccctggacaacagaacctatggcaactgccatccatccgttaatccccatctgatccaacacgatcgccatagttcccgcaaacgaaaacatcatatgccctgtcagaaaaatgtacttaaacggagtaattctcgccagaataatattaatcacaaacgataaaagcataatcataggcgtttcaaatccaagcactgtctgaactgccgctactaatgcgttatcttccggaacaacacctgacattccaaatgctgcattgaacattgtgctaaacggtgtcagcgcagatgcgatcaaacttgatccggcgctcaagataagaaaacccaacattgttttcatcgttccctgaatcacggttgacggtctgtttttcattgcaataagaccgatcatcgccactaatcctaatacaactgtaggctcacttaaaaatttaacaaaaaaattcaccataatataccgcctccttacttattcaaatatggtctgatcttttcttcgatttccgctttatctaagagatttgtaattgccaacaccggaacatctgcttcgatctgttttgcaatctctgacgatgccacaatcaaatcgcagctttttcctttataagaacctagatctgttgcctcaccttctactgtaatcccatactttcttccactttctttcactgacatcaacaacataagacttgttccaaaccccattccgcacactgttacaactttcatcttctcgcctccttttccattaatttttccagttcctcatatgtattcaaggctgccagtttttcaatcatccgttcacctgccagcaaagaactcaaatcctgcaaaagctcaatatgcccatcatctgacacccctccgagcgcgaacacaacccaaacaggatcattacacggatgatgaaaacaaaccggttcttttaacttcacaaaactaatacaaggttcttttacatttccgcccggtcttgcgtgcggcaatgccaatcccggagccattaccatgtacggtccgaacctttgataagaatcgatcatttcttttacataacctgcttttgcttttttattttctacaagaatattcccacaatattcgatcacttcttccggtgtagacaaaagcggcggatctaaccgtaccatttcttccgtcagcatctttttcaatctatttgccataatacacctccatacagcgttctatctcttccgccgatttacaggacaacaatctgttcttatcttctaagttcaaaaagagatgaaatatatattctaattcttctttcatacgctcatctccccgctgaaaacatcccataacaactaactttaccgatgttctcccccaaataatcggttctttcaataatgcaaacacaagaaagctgcttccttcgatcaaaccgtgaggcattgcgattccttccactatttctgttgataccaaattttcgcgtcctacaattccctctgcttcttgttccgtaataaatcttttttctctgcataagtcacataaataattcaacagctcgattttttccatatattgatcaatatacaaatacatttttgagacgctctcatatctccacttccggtgacgcgctaaatttccgacaagctgttccaatgcaatctgttctttaatatccaacatcggcgacagcctcacccacggttttcccataatttcaggctcttctaccggaaatgtcgtaataaaaaagtctgcttcttccgctttttttcccgcctcttccaaaaggcctgttcctattacttcgagatgtggatatttattatgcagtctgctttccaataattttgccgatccgattccgcttccataaataatcgcacatttccactttttcgactttagacttctctccaaataagatgcaaaatgcatgcccaaaaaactgatttcatatttacttaatgaaagcttcgtccataccgaaatttcttctgccacttccatcgcatagtaatacgctgtcggataactttccaagacatcattgtaaaacagattttctgtttccatccctaaaagatatctgctgaaattcgatgccagatgaagcaccagtccgtttactaaaatatcgtcctgaaacagatctaccttgtaatcatttttaatcctctgaaatgctctttctgtcatatcttgatagaattgaagatttttttcattaatgctgtctacatatccgttttgccaaaaagcctgcctgtaaacaagagcaagataaatattttctatttcctcatcagatttcggacacactgatgtttcaattctcttttgtatgttacgaacaacttccatatcatgatttaaatgaactgtctgactgatatttgcaaaatagtcagttttaatcgtctttcctatcgcaatcctttgcttttgtatcagtaagtatttcaaaaagaacagttcattttctttccttttatgcactgatttttgcgcaagctccgcatcaatctcacttctcacttttgccagcatttctcttggaacacgaaaaatcttctccgtttcttctaatgactttttcttcagcaatttatacaaatagtttcgtatataaacttcactgcctcctataaaaaaacctacatacggtttgtttaagagtctgagcccttctctttccagctttttctctactttttctataattctggacatacctgatctgctataatgcaaaagttccgcaagatcatccaacttacatgtccgctcgaaaaacaatttaaaaagtactttcgtcacttccacatcttcttcaaccgccaacgcatccctgaatttttcttcttcaataatctctaaccgataccctcttccttttacggtatgaataaaaaatccatattttaaagattgttcttttaattctttcatatatcggattactgtccgctgactaattccagccaactccccaagttcttgtgaattcaaaaattcttttgaggattccaacagagcctctaataactgcttgtatttttcctgcatcttcaagctcttgtcctccttccataccttttcgctgttgttacactaattataataatatccatttatgaagtcgatatgtatttatggcagttgatacatgccaatttcccatcctctttcctgctcgacattgattttgcattgtgatcagccaatgacatttgcaatataaaagagagttagggcgccttcctcaaggaaggcgccctaactctcttttttgttttaacagctat

SEQ ID NO: 7636 - DNA, 23664 bp, Unknown
  gut microbiota DNA sequence
attgtcatgcagttttcaaggttcaaatatatctgaaaagcatttctgcaatttactcaaaaaatcttcattttaaccttgacttttaatagttagactttcatgcaaaaaaggcaggataccttccttttcacgggaacatatcctgcctggtctctttattattttgttttcattttctgttttctttaaaatatgataaagaaaaactccccagctaaactggggagcctccagaagctataccttgcggtcctacggcttcattttttatcacatctcacagttcttaattacttcactgtgaaatttaatcatgactttaccatatataacgaaaggttcccgaagaaaccttccagactacaggcttcgcaagtttctgtagtgcgattactttttatcatacttttttttaacagatttgtcaaaaactatttcctatcttttacttctactagaaattctttctccgacatacctgcaatctgtgaacacagtgcaactgacacccctttttgcatatagaatccaagtgcaacttctttctttgcaaaattggttgcttgttctaccgtatacttgacatcaaataaaacagctttcggtatttgaatctcaatctgcatattttcatcctttcactattcactggtttcacattttctctgccattcttcaaaagccttcgaagcgtttctcactcttcctttcccaatatctcggtatcctgttttcagcttttggtgaagttctgctttcgtcatagtatctgcattaatagaacatcgcattttcaaaactgaaacatcttccgctgcttttcttaaatgcatgaaatacctccaaacttagaacaaaacattccttctacatacgctactatttttcctgatagttccgtcctaaaaatttcttttctttcgtaaacacagctacctgatgttcatcaatatccatctggattaatttccgctgttcttcattttcgattttatcccgattcaacgtaaggatatattgaaaatcctgatactgctcttcctgcttataaatataatttaaacattgaactaacgtatcttgatccacatcgaaaatgttgtcatgtaccaaaaacaacggatgcctgtctctggtgtattgattaaataataacgccatatcataaatgaacacctttgttctgtctacactatggcttccatcatcgtaaatacgaagcgtcaactcaactggtgttttctttcgtgccttatcaacagtctggaggctaaacgaacattccttatttcccataatggattcatggatttccaaaatggtatcaataaagtcatccatgatttctttgttttgctcaatctcactatcaatttccatgagttgctgggttttttgtaaattcagcattcttttctttttctcattcttttcgtattgatcaaacaaaaacttcgtatgagaaatggaatccttcttcgcctcataaatctttaaacttacttttagattctttagcactccttttttatcgatgactttcagtttctctgaatattcatcatccagtacccgaatttgttccgcaatacttttcaattggctctccaattcctttgccttttggtttaccaatgttctttggaattcttctatcttgttcttaaaacctacgacctcatttaaagattttactactgcatttcccaactcgctcttaaattggttatagaccaattcgatttctctgtcatcaatctgctccggctttggcatttttctgattttttcatagtcatatcgcaaagccttttggcgtttacgcaactgatccagcaaatcctccagttcaataaggtctgcctccatagaatcaaaagtctcattcgttttaaaactttcaatcgcatcttccaatttttgtaattcatcttccaatgcatttaattctgccttaacatctgaaattttcttttttccttcttgcgtcaattcttttttatcttttgcaataacggtattgactgcctctatctcctttatagtttctaaagtgtttttatatgcctctaaagaaaatcccaacaaaaacaaatgagcgctcaaatcatccggaatctttttcgtcaaatcatggcatttgatgatatctgtgaattccgaacgttcatcccgcatcaaaattgaaaagagatttctgaaactaggtactttcttcccatttaattttgggaaaataagccctgtcagatattctcttgcatcctgaagtttatcaaaagataccgttctcccttctcttatgattacaggctgatccgcttgtttccggtttctttttatcgtgatcgcttcgtcccctatatccagatctaatattacgttttcttctaacggaaatacttctttcggtatttttgcaattcttgatttttcataatcattcaagaaaccaaaatctaaaaactcaatactcatagactttccaacaccatttgttttccgaccttttacagaactatcatcgtatttctcgcctaatataatattgactccgtcatgaaaagaaatctcttcaaaaatattactttctgaatagagccgattgagacgaatacgacttatttctttacccatatattcgcctcctcaaattcgacaatattaacagaatataaaaaggaaagacccaaaatcaactgtctgctgcttgtgatccccgcctttttcaatgctttagatacatcataaatagaaatcttcccagcttcctgcttttttatctctttgagtatgagatagccaatatacattgcggaagatttcagtgcattgctacttgccagcatcatactcactcctttcgtttgggaataccctacatttaatcatttcgttgacaagatagaatttaattgcagaacggtcatactttttaccattcgcgcttaattttgtttcaaaatatgtaaccagtttattcaatgcagcaatcggattatcctgctcttcttccaaaaattgtacgctgatatcctgcagatagaacataataataatgtcttgtgcctcatcgatccccagcgtttcatttacaatcttcaacgcttccccataaatggtgtaaagtgtcgtatattccgcaatcaatctatctgcaaaatcccgaaaccttttataaatcttatactccggatctaccgttgtctcacaaggcttctttacttttctgtgttgcgaaatatactctatcaaatctatgatcgtgtccacttcactggcctgcgtttctttcactgaataatatttattacacaattctgctgacaggtaattactgattgcttttatttgttctgtttccaactctcgaacatcttgcatcagtttttctacatcccaaatgtctctttctttttcaaatgaaaacattccctgtgtatcaaaattggaagaatattttttcttctgtgtcaaaatcagcacaatcaatctatcatagctctgatacgctttgtttttattaaattcttctatcgtatgcttaatctttgtactactattatctgatgtgacttgaactgctatcctattctttggatctaccaaatcaatcgccggggcatttttctccaaatagtttgcatttttcaattcatatccatagataagattcaataatccgggaaagaaatcttctgcaacgatgttaatatcatagagatttaccgcattcaagatagacacttcccgacttaataaggccagactctcagccacatttttcaaataaacctctttgttcatcatgctctttcactctcctcatttgttgcttgcttcattctaccacacttttttctaaattactattgatttttccagaaaactatggtatatagaatgccttttttatcatataaaatctacacaactcctctttttttatggttttataatttttcccgatctgtgttttgtctcacattctgcacttttcggatactttcaaacactccccggaatatacagttccagaaagccaccaaagagctggaaaagcacctgcctttgaacacttccgccatactacaagattacacaagttgccacaacctgttgcacatcccttaacttcgaacactttttgttccgtatcgccacttcccgttgcagcttgtctcacatactgcacttttcgggtacttttgaacacttccggcaggagatcgattcagagcaccgcaggatacatccagagagctgaagaaagtacccacctttgaacacttttcacctttcaggttctgcttttactgccacaaggatgttccgggcctccttccactcataagaacaagttaccagcgtcagggttgtctcacaacctgcaccagctacccctgtttcaaacagcgacagcgcttttgcctgtgctgcataagcctccaattcctgcggactgtgaaaagatgtctgttggaagtcgaacatggacacatcagctttcaatactgccgctatcctgtactcttccatgccttccggcgtctgaaagaacaccctgggatgtgctttccagtaatcataggaggcgtacctgtccagattcccgaacatcgccccgctgttcatgttgtgaccgtagatagtcagattctttgattctcccaaaatacagtctgcctggaggaacaaacttccattgatgtcgtagtttccccggtaatccctccgcagataatactccggatcttcccggctgctctgcatgaccggataatcgatcccaacctccgggatcgtaagccagccacgaacacccggatactggcgctggagggatcgaaggtcaacggcagacacttccggttctcttccagcctgttcctctttctctcctggagagcccccgcccggagggatgtcctccgggaagcaggtttttaactcctccaccagttctcgattctgccggggaatgaccacataattctgataaagcagtaccacactgaggatacagacagcacacaagactgcctgcagcatccacagcttattcttcttttttcgcttcatctgcttttttatgtctcttcttatagagcatggttgccatgagtccggctgctgacacgcctaaaagtgcaaacagaaggatttgtttccagtggtcatctcctgtctgcggtacacccggagtttccggtgtccttgcatccttcatctccaccttctggacttccatggtatcttccagtgtaaacttcacatcttctgcgatctcatagccttccggtgctgtgatctcacgcaggatcagttcttcccctaccggaagtttctctaccagatgcggttttccatctgttacccactcttccaaaacttcaccctctttatttaagatctgaagcttggctccttccagttcctttccggtggtgaggtctgttttggagatttccactttggaataggtatctttcatctccactttggtcacactgccatcttcctttacttcaaactccatatcttccgcagacacatacccttctgcataaggcggcagctcttcatggagcgtatacgttccttccggcagtccataaactacgtgcggttcttttgtgctgatccactcttccacgatgttgccatcctggtcgatgatctgaagcttcgccccttccagttcttccccagttgtggcatcggtttttgtaaactggcttttcgttggctgattttccacttcttttgtcagcttgatttctgcaaggttctggtctatgtaagaggcatcgatctcccagatttcttcattcggaagataccccggctttctcacttcctctttcacataatattttccatgatagaggtcgctgtcaaaggtaagctgtcccttctcatccgttgctttcttctccagcagagtgtccttttctacaagaacctcaccctgctgggagaggatatcttctttggcatacaatccaaaaatcacgccttccagcttctcttctgtgactgcatccttcttttctacagaaatggaaatcttctgtcgctcatttttataagcaaccccttcataaacaactgcctgcgtatcatcctctgcggttagggtaaattctttctgttccgggttcaatacgaaatggtcgcctgctatggtttctttcatataataagaacccaatggaagattatttaccactgcctttccttctgtatcggtcactaaagttgccaccagatcgtctttttcataacggatgaccggattgccctgctcatcctttgctccgtccggggaataaatggtgtccttggcatgcaacgaatgacccccagttccagactgcggcaggtagctgcattgggaaccgcattatcaagacgcattaagtccaccgtccatcctccgatatccacaagaagaacagagggttcatcttttaagtattccggataaagagccagggctgagtacccctgggggaacagtttcacatcctcaatctggatctcatagcgttccccttcatataagaaacggattggctgttccttccgaaacagatactccttgaatttctgtttttcccttccaaacccggtaaggggaagcccggctgcaagaacaactttcgctgtcctttccccctttcgctttcgaatctcctgtgccagtgctgccagcgtcaaaagataataattgtcgttggcggtcttgtcctttaccaatgtctgtctcccagtcccacacacataatactcaccccggtattgcaggacattctgcatggtatagggttcgtattcataccggatgatccctgtcgggaaacacacctgctttgttttaatggcgtaatatccatgatcaattccgataatcatcacttaccactcccttcttttctgttctatgaaaaattcccagtgaaagaacccttgctccccggaggcgcgccccggcaggcattcttttctttccagcccattgttcttcctactcccggtctcgaaaaaatgtctggacgggaagataatgcaatgttccttccaaaacaagagccaatctttgaaaacggaggattcccctattctgcagctccaccatttcgtaatatgctttctttgttaaaaagtaacgatgatatattcccgcttccccaaacttctccgtctgcttcaacaccaaaaactccaccatataccgggtatccggtgcaaaccgtttctcacatagcatggcatctccctgtactgccttcacaccctccgactccctggctactgccaataactcatggatactgatactcacgtttgctatcacctcccttcaaaactcttttccaaattttcagtgaaaaaaagacaggcacctacacgatgtctgtcgctgcgggatcttccattccctttttgtatgatttttaaattaagttttttattttaccagaatttggacaaataaacgctatatctcagatatagaattaaaagagtctactttgattgttcatgtctcttatatcttttttaatcacttgacgaatccagcgtcccaaggtaacataccaacaattaaaaatttgaaaggagtccttaaaatgctgtgtgatgaattatataatgagctttgtcagcttttaaccaactttgagaccggggaaagacctgtcgatgccaacgatttttactccctgcttgtaaaaatacaaaacaactgggaactcgtggtccattgccaataacacaataaagaaaccttaatcatacaactgatcagagcctatggtcttttcgtcggtactattttctaccgttctcgccattcccgtttacactgaggattcttttgaaataattcctcataccgaagaagtatatccatactgtcttgtgtaaaatcaaatggctgaagcatggggtatcgcggcaatgcgcttgaaacatattctaattgttccaactgcttagacgtgtattttttctttctggcttcgctatatggcaaaagaccgtattccgtcttatacgctggaatacggtctttctgcatttcctgtaatgcttcaatcatatttttgtgatggtgtctggatttataggtatctatctgccctctggtcatgccgacagccgatgcaaaatctgatatccttttataaaattttccttgaatcttacatctcggaataaaggcaaatacctcagtgtttggccatccacattcatcccgcagttgctttactaaacgaaagcactctataaacgaatattctggtttatagcgctgttgtccatatactaacagcttggagatattatattccctgcataaaaaagcagcgttctgatatactttcccttcatacacaatttcatatcttttcccattattcctgatcggcaaataaatagcttcctccaatgttttcccatatttcaagcgttcaaaaacattacagggctgcacttgatactccgcacataattccactaatgtattataggttttcccttcgaagcatatcggttctttctgcaatagttcaagaataatttcttctaatgtcatgtttcttgtatggattctggctgatatggaagtctctctaattccaaatgctattgccagcgcatatctgctctgatatcgtttgccccatagcataattttcttctcttgtgtctctttgcaacgatctaccgcttcttctattgttttgcacctttgtatataatgtgctaatgaattccaaggtaatccatattcttcagccaacgctttaggcgaacgatataactttccattgtattcaaaaagccgacctcttcctcgcacatcattgatgcacatttgcattgcatcttctaacgaccagcctcggcgccggaaggaatatattctctgacggtcaattccatattcctctgccatttcttttatcgtttcatatgttttcccatcatagcaatacgccatagtcatcacctcttctcttcaccacaccagtatacctacttatcgtaaaaaagctattcagcaaatccactaaattttactctttatttgtttcctcccctataatcacaaaataaaaggcagatagaagttttccactttcatatccacctatgcaaaattcccatattcaattaaccaaatcttcctgtaatgtaatcctctgtctttttattttgtggtgtagaaaataatgtatctgtccagttaaactcaatcaactcacccataaggaaaaatgcacagcaatctgagatacgaactgcctgctgcatattatgtgtgaccataattactgtatattttgatttcagttccataagtaaatcttctattttccctgtactgattggatcaagcgatgctgtactctcatcacaaagaattacttttggctgtactgccaacgctcttgcaatacaaagtctctgctgctgtcctcccgacatccccaatgcagatgtttttaaccgatctttcacttcatcccagagagccgcatctcttaaagagcgttccacaatttcatccagtttcactttagaacgaataccatgcgttcttggtccaaaagccacattgtcatagatgctcatcggaaatggattcggtttctgaaataccattccgatctctttgcgcagttcatttacattcgcattagaagaaaatatatcctttccatcgtattttacttctcctgtaatgcgcacattctctacaaggtcattcattcggtttagtgttttcaaaaacgtggatttaccacaaccactcggtccaatcaatgcagtaatctgatgttccgggatatccattgtaattccctttaacacctgatgatctccataccataatttcagatctttagtttctataattgagttcatttctgtctcctttttgtcaattctatattacaacgtgatacccaaactcttccatattccgtgtatcatgtacttatattcatagcaaaatctacgctatacacgctatgcacatgccctaagtgtactataattttcgtccattagaagaacttccggttcaaccgcaagcgctcgcgctatgcaaagtctttgctgctgtcctccggacattccaagagcgctctttttcagcctgtctttacattcatcccaaatcgccgcatttctaagagaacgctccacaatatcatccaacttagacttggaacggattccatgcgttctcggtccaaacgcaatattatcgtaaatgctcatcggaaacggattcggcttctgaaataccattccgacacgctttctcagaagattaacgtccatccctttaaaaatattttgtccgtccaacgcaatttcgccttctatacggcagccctctacaagatcattcattcggttgatcgactttagcagcgttgattttccgcagccggacggtccgataaacgcagtgatcttattttcttcgatttccagatttatatttttaagggctttaaaatccccataatacagatcaagatttttaatacttatctttgacatacctgtttcctctcttaattcaccttatgcttttgtcagtttccgcgcgatcatacctgacaatgtgttaatacctactactaaaaccaacagaataaccgctgttgcatatgcctgatccatataaagaccttcacttgacaaatgatacatatgaaccgccaatgtacgccccgatcccatcacacttttcggaatctgagccacgcttcccgctgtatagatcagcgccgccgtctcaccgacgattcttccgattgcaaggatcactccggcaagaattcccggaacagccgacgggagcacaatgcgaaatactgtacgaagctttcccgctccaagtccgaagctgccttctctgtaagaatccggaacagacttaagcgcttcttccgtcgttctcataataagcggaaggatcataatagacaatgtaaacgctcctgccaaaatcgaaaatccccagtccagcgtatttacgaaaaacaacattccgaacaatccgtatacaatagacggaattcccgaaagcgtctctgttgtcagacggatcacttctacgaatttatttccttttcccgagtattccacaagaaagattgctgaaaaaataccgaacggaactgcgatcaaaagagaaagtatcgtcattacgatcgtattgataagcgccggaacaacggaagcattttccgaagtataattccattcaaaaagcgaaagcttaatatgaggtactccgttgatcaaaatatatgcgatcaaaaacaacagtaccgaaaacgtaagcagcgctcctaacatcacgagcagcattacgagaaatgatcccggatgttttctgtatgttttcagcctgtctttgactgtcattttattactcatgatctgtcctcctcttaagcagtgcaacgctgaaattaataatcaggataaatacaaaaagaacaacgcctgttgcgatcagcgcttctctgtgaagtcctgtcgcgtatcccatctccattacgatattacctgtcagcgttctgattcctttaaacagatttccgacaagacggggctgatttcccgcaaccatgatcactgccatcgtctcgccgaccgcacgcccgatcccgagaacaattcctgcgatcacacctgattttgccgcagggatgatcactctgaaaatacttctttcttttgttgctcccaacgcaagcgctccttcatagtaatgagccgggacagcccgcatcgcgctttctgttgttccgataatcgtcggaaggatcatcatggcaaggatcagagaagtcgtaagaatactgtttccgtcacctgcgttttttataagtcctgcatcttttaatgctcttccgaaatcgcggatgatcggaacaacgacaacaagtccgaaaaatccatatacgacagaaggaattcccgccagaagttctgttgccgctttcagaggtctgtaaatttttttcggacagtacattgccataaatacagaagtaagaatgccgatcggcacaccgatgataactgcgcccgccgtaacatacaagcttccgatgatcataggaaagataccgaacagttcattactcggacgccacatttctccggtaatgaatttcacaaatccgatttctttaattgcagggatgccgttagcgaataaaaagatacatatgagagctaccgccagtaccgaggcacaggcggcaacaaagaacactccctgcatgaatttttcagtccatgcttttgatttcatactaatttcctcttcattttatctgatcttgccgaacagttctgtcacacgccgagccttactcagcgatctcatcccatgtaagtacgtctccgaggtagatggattttacctgatcagatgtcatctcttctgtcgggttcgctttgtttacgatcactgcgataccgtctgtcgcaatgactgttccttccagtttctctttttcttcgtctttcagctctcttgatgccataccgatatcatagcttccttcgatggcagatgtcatacctgtcgttgaatcggatgactgaagttcaacatttgcattcggattcacttttttgtatgcctctacaagtttctccattaccggagctacagaagaagatcctcctacaactacgcttccttccggcttagttcctgcatatgcctgaacatcggataccggtatgtaacctgcttcttctacaactttctgaccttccgtactcatgataaaactcataaaatcttttgccgcttcattgtccagatctttctttactgctacattaaacggtctggatactttgtaacttccgttttcaatattttctgccgttgcttcggctccgtcgatcttaagtgcttttacagcgtcctcatcaagagatccaagagaaatatatccgatcgcatattcatttccttccactgttgtcatcataaccgaagtattgtttgtgatctgcgcttccgttgtcgtcatgtcgactttttctccgtcaacttcttcctgaatgccgaacaattcgataaacgcgcctcttgttcccgaaccatcctcacgggaaacaactgtaatgtcatttgcgctgtcccagtctcctgcatattttgcatctccgcctttatccgcatcttttgcatcatcgcttcctgatccacagcctgtcatagctgctgccaacattcctaccatagatacaactgcgataaactttttcattttcatagtcttacaatctcctttttgcttccgctttttcatttttttgttttcttttattcttttttatttctttctattcagcgaaaacacctaaaaccaacttcacatttcgctgttttcttttgtgctcctttgcacattgactatcataaataacaaatgtaaaatgtaaaatcagcgctatgttaaatctatgtaaaatgaaatttattctaaagcagccgccgggatcttgaacaattccggactttggcttgccggctatacaaaaagcgcccacacaaaaatcctgttttttcaaacaatgatttttgtgtgggcgctttttccatggagtataggggagtcgaacccctggcctcaacaatgcgaatgttgcgcgctcccaactgcgctaataccccttatggacctggcgggaatcgaacccgcgtccaaaaacctatcccatgtacttctactatcatagtcagttctttttcattccctctgccgcacgggaactaacacccttacggtttcagtagcttcatgatacgcctatcggctcaaagctttgccaatatcgtttctcacatcgttgatgccggatttccgtggtgtgagtgccacagagccgacatgcggcaattaggccgcagctaattcgaaattatcgttagcgtttaattttaagtttgcgatttaacgcatcagcctgcggatagcttctccatcttcaagatccctgtcgaaaccagtacaagccctcgtctgtcaggttgtacagaagatgtaatttttacatcatttataatatagaatatactgcttcaaaaatcaagggggtatagcgcattatttcttttcttccgcttattcttctttttattttatctttaaaactacagttcttctccattcgaccggattacgttcttgtaccagtcaaaagacttcttcttatacctgtttccgcttccatttccttcgttatcaatatcgacataaataaatccatatctttttttcatctcgcctgttgtaaacgatacaagatcaatgcatccccacggggtatatcctataagatctactccgtcaagttcaaccgcttttttcatttcggtaatatgttctcttaaatatgcaatcctataatcgtcatcacatgttttatcttcttttaacacatcgatcgcgccgaatccattttctacaataaacagagatgcttcgtaacgttcataaagagtaaccagagcatatcttaatccgacaggatctatctgccacccccagtcacttgccttcacatacgggtttggtacagaatacggagaacttccgtccagagattctgtcgtatctttttttgcatctgctttcaccgcattcgtcatataataactaaatcccagatagtcgcattttccttccgccaaaatcttctcgtcttcaggaagcatctgtggttttgttccttccctctcccactccttttttgcataagccggataatgccctctcatatgtacgtctgaaaaataaaatctttcatgcatacattctgccgcagtcataacatcttctggattgcaggaatacggataaaacggaacaaaagaacacatacatccgatctgaaactccggattgatctcgtgaccttttttcacaacgatcgcacttgcaagcagctcatgatgcgccgcctgatacatcgcctttttcttatttgtatattccgaaaagagaactcccgaatttgtccatccgaaaatatcagctgatgtattactttgattattgatctcattaaatgtcatccaatatttaactttatttttatatttctccatgaccgtcactgcatagtttacaaagaaatcaatcaccttacgattgacccatccaccgtatttttttgccagatgatacggcatttcaaaatggcttaacgtaatgaccggttcgattccgtatttcaaaagttcatcgaacatatcatcatagaacttcagcccttcttcattcggttctgtctcatccccgcttggaaaaatgcgggtccatgcgatacttgtacgaaaacatttgaatcccatctccgccatcagcgcaatatcactcttgtattcatgataaaaatcactcgctttatggttcgggtaatatttatctgcttcaattccgtttgtaatctcccgcatcttctcatgtgttccacctgtcatcacatctataacactgattcctttaccgccctcattccatccgccttcaaactggtttgccgcaactgctcctccccataaaaaatcatttgataatggcatcttgcaaattctccttttcattttattttcaattaggcgtttgcgaaacgccacaagccgcataaatacggcattttaacttttataaaacaaaatatctcctcaacggattgtggtaaaatagagttgcctagaaactataaaccaaccacccgaaaggagatgtacctatatgataccatataagcagctcactttggcagaaatttttgaagattgccaaaacaaattcgataatgacaaatatcagtttctttctctacttcaccaaaccattaatcttgatgaaattgttcctgtttcttttgttactcattttcacgcttccacaggaagacctcgcaagcatccactttatcctatgattaaggttctccttattcagcgcattttctcaatcccgacggatactcttctgattatatttttaaaatattctcaggaactacgggatttctgtggcttccgtgttgttcctgatgcctcaaaatttacccgctttaaacaggactttcttatggacttacaatcgatgttcgatcacttagttgatatcactgaaccgatctgccaacgtattgattctaaccttgcttccatgagtatgatgatcaaacatcatattgctccgattctaagagagtttgtgcacatttctcttttgatcttgacgtcagtttaaataatctgatgatttttttcaattcattcatacttttttgtttatctgtttcaaaattaactactttcgcgttccgttttatgcaatttcgtttcagatgtaaaaaatctgtcctgtattttgtgcaaaatgtataaagcataaaaacttctccatatctgatctttcagaaaggaaaagttttcactctgtctttttactactctgttatttttaatcactctctttttcggaaaatctccacagaagattcttgcctgacttttcatatctgctgtttaaagcaatattttcttcgtaccgtctgctaaattccattccatataaaatatcaagaagatatttccccgatgcaaaaaacgtggaactccaaaattcttccactttttcagaacctgccgcgtataaaaactctgttgcatattgacctaccacgcctttcctgtttccggagattacgataattttcgttcctcccctgtgcagcattttttcaatctccgccagctgctcgtttttgcccgtatgactgataataattgccacatgtccgtctgcgggcatggccgcatgcagcccttgtatattaatttccgagtgaacactcgacaatttcccggcatgaaaaaacaaggcgcatccgtatttcgccaaataaatattcatatcatatacataaaaatcaacacaagacgcatctgcgatcaactttccgatccgcactaactgagtataagagagttctttattcgtctcctccaccgcctgtctttgtatcttttccgctttccgaaccatagtaaccacattttcccgctccgacatcgtaactgcggaaacgtcttccattcccccggttctcaactcccggacaaactgcattttaaattcaggaaaaccttttacccctatcttttgacaaaatcgagttacggaagcggcgcttgtaaaagtcgcatgccctaattctcttgaagacatttcttctattttttccggattttccaaaatatatctgcatatatcccgctctcgttccgtcatattcatctgttcttttataatttgaataatagacatacaacacctctttcttgttttttccagtataacacgcaccatctgtctactgcaataaatgtagattttaaacatgtatgatctaaattccttatcttttaaagcatttgacaaagtatgaaaatgccactaaactaatgatgataattgtaataatatgaggtataaatgctatgaaatataaaaatattgtttttgatttcggaaatgtaataggtaaatttaacggacgtgatcttgtaaaacatttttcttcctgcgaagaagatcaggaacttctctttaccgcaattttttcaagatgggatgatattgacaatggttcggtagactatgaacaaaacatagacaatattgcagcttcactccccgaccggttagaatctgccgtacggacactttttcgcgagtggccgcgtcacctgacgccgatcaacgatacgctgcgctttatagatgagttaaaagagcgtaacattccgttgtatctattatcaaatgcaccgacctattttgccgaatatgccgtcaactatgattttctgaaggagttcagcggaattgtattttccgctcctcttaaaatggcaaaacccgatcctgcaatctaccgttacttgtttgaaacgttttcccttgatccgaaagaatgtttctttatcgacgatctggaaaaaaatatcaatgccgcgcgttctcttggtatggacggaattgttttcaacggcaatatcgacgatgtgaaaaaagcgattggtttctgatctcaagaaaccagtcgctttttagctgtaccttcttctgttctgtttttttgtttcgttttcttttcggattttacgtttttcagatttcagacacttttcgtttttgcttttttcttctttttcgagcccggtcgaaacagttttgtcatcactgtaatgacagctcctgctgcgataaagaaatccgcgaaattatatgtgatcccttccaaatgtttatcttccaagcgaaatcccacataatctacaacgtgtccgcgaacgagccgatcgaacatattactgatcgagcctgccgccatcaatgaaagtcctgcctttttccaaaacctcttcttctttgtcacaaccgtaaaggcatgccatccgagcacagctcccgacgccgctcccgccaaaatacgggcagtctcaggttcatcttccagaaggctcatacagactccttcgttttgaacgtgccgtaaaacaaccttgtctgtaatcgcacgttcttctccttttgcaagtttattctcggcatagcattttgccgcctgatctgcggcagccaaagctgccgtgatcggaaaccatctaatcttcattgagtttctccactgtcttatctgccgcatcttctgctttctccgctgatctatgcgccgcttcttctgctttatccgctgatttatgcgctgtttcctcagctttatccgccgctttatgaactgcttccgtcgttttttccgctgctttatgaacagcctgggtcgtcttatctgccgctttttcaagcacttcttctgtcttatacgctgctttctgcgcagcttctcctatcttttttgccgtttcttctgctttatcagccatcgcttcggcaacatccgctgctttttcctttactttctccgcatactcctccgtcgcctcttccatatcccgggcctccatcttctctccgcagtacgggcagtatgccatatcttccgaaaccattctgccgcatttaacacaagctgcagaacctttcaaaaccgcgatcttgcgttcgtacttttcaatttccttttcccgttcttttatcgaatcacaaatctgcgcagtgctatcgtcaagttcttcgcctgatttataacgctcatacaccgctttgcccaactccatcatatcaacggcgttttcacgagcaagatctctgatctgacttttaactctctggatctctatcatctctcctgctttattcgtcaccatttcggcagtctctccgaaccgttttccgaaattttcaaaaaaatctttcatgtgtatcaatctcctttcgtcttttatccaaacggacgtccgaagtacaaaaaacatcggtcgtatctgatatttaagttatcattattatacccttttctgaaacaacttcaacatttctcattggaatttatacttttttcacttctgattcttcggaagcgttctttagatcaaacactcttttttcattttttcaagaatgaggttctgattttccgcatatgatataaaaatcaaatcggagaatttattttatgcttgaccgcgaaacatgccgtgaacatattttatccgaagattaccgcgactttatcggaaaccatgtccgaactccctttttcaacagtctcatgaacgtgcatcgctgtgaacaggaagcgggattttcttacaaatgcttctatcttccaaaggagatttccgacccgatcactctgccgaaatattcatatgcttcgattccgaactgctattcgcctcttaatatgcagacactcaacgaagccggaatcctccctgttcaaaactaccctacgcttcagcttaaaggacgcaatattttgatcggatttcttgacagcggaatcgactatacaaatccggtttttcaaaacttagataatacaacccgcatccgcgctatttgggatcaaactgtgcagaccggaacaatgccggaacatttttcttacggaagcgaatttacggaagaacagatcaacgaagctcttagatcggattctccgtttgatcttgttccatccactgatgaaacagggcacggaacttacgccgctgcccttgcatgcggaagcgccgttcctgaagaagaatttctcggcgccgcacctgaagcctctatcgccgttgtgaaactaaaacaggcaaagcaatatctccgagactattatttcattccttctgatgccgaatgctaccaggaaacagatcttatgctcggaatccgctatttaaaccttcttgcagattccctgaatcttcctcttgtcatctgttttacagtcggttctaatatgggcggacatatcgggacgcttccgctcccgaatctaattgaaaattatggttcgcttgccaatcatatcgccgtcatcggaaccggaaatgaggcggatcagcgtcatcactatgccaatactttaacgaacggatcaaaaaacaaaacggtagaaatccgcgtcggagaaaatgtttcgggattttccatggaattatggacagatattccgaatacatcgtccatatccattatatccccttccggggaagacacctcgcgaatcccttttcatgcgggatcaagcgcagagcttgattttctctttgagcgtacaaaggtatcggtcgattaccgtatcctcgtagaaaaaaccacttccgaacttgtatttttccgttttaacagcccggcggcaggcatttggaaaatcgtcattgaaccgatcaccgtcaccgacggtcagtttcacatgtggcttcctgtcacggaatttattgacggagaagtgtattttcttgaatctgacccctattatactttaaccaatcccgcaaatactcaaagtcccgttgtcgtttcctattataacggaacgacaaacgccgtatctcaaacatcaggcagaggatatacacgatccggtcagatcaagccggacttaactgctcccgggattaatatacgcggtcctgtttccaacggacgatttgaaacacattccggctcctgcgcagcctgtgccgtcactgccggcgctgtggcgttgatgttggaatggcttctctatattcaaaaagctccgggtatagattccttccaaatcagaagtcttctcatactcggagctctgcgtcccgatacgatggagtatcctaatcgtatatggggatacgggcagttaaatctttaccatacatttgaagtgatgcgaaaattataacgatttaaatttagcgatagcgaacctttacatcgccctcctcatttatgacggagatcttctttcctgcatttttctctgatgccgatatgcgataagatacttctccgtcttcctctctatactgatcatggggagtgtctttgggcagagaaagatctccgtattcaatctgcagatcaacttcatacttttccagttcttcgggaagaataagatctacgtctccgcactcggcctggcaggtcaaattttccagtttttgcgcatcccagcgaagatccccgtattctaatgtcacatctgcaaaagaacaggaaatttcactcgataatacgtctccatccagcgcttccactttcatcttttcaaacaaaacccggtctaattccacttctccgcattccgactgtaccgtaaacaccttaccggaaacatcggaaatcgtgctgtcgccatactccgattgtaatacaaacgtttccgctttcagtccatctacagatacatctccgtcatttaaaatcagttccatcgacgttgtttccgactgctctgtttttacatctccgcattctgactgcactgtaaacgtcttaccggaaacattggaaagtgtactgtcgccataatccgattgcagcgtaaatgtttccgctttcagtttgtctgcgaatgcatctccgtcgttcaaagtcagtttcattgacgttgtttccgactgttctatttttacatttccgctgtccgcctcgatcgacactttttttccattgacatttgaccagttgacattcccataatcattgtatatatctgcggtttcaagaagcgttcctttcggaatataaactgtaatgtaagatttttctcctgatagattttctccgaggttcaatccgaacatacctgtcatatatccgttgtgatcttgctgagcaatagaaagttttccatttgttaattcacatttaggtttaccgtaatttccgtcaagtgtatattcgacataatatttctcatcttttgaagccataacaactacatccgcttcgcttcccacatagagactcagttctgaaaaaggttcgatctctttcttttcctgccgataaggagttttctgctcgtacggtgaatggattccgccttttgtaaaaacaactccgggccagccgcctaatgcgattccaactcccataaagacaactcctgttccggctgtcactgccgaagcaatcaaaatccgcttagttatttttttcatttttctttcctcccttcataatctttcctaaaagctgagccactttataaagaagccatttcaagaaacagaaaattccatatacagacataattcctactgcgccgcagcaaagactgaatcctaatgtcgccaatccatccgggagactttggatcagcagagccgctcctcctatcacgccgatcaccgcagctcccgccagcgtaaccgccgtaagaaacaagcctgcaaacacacagaaaacagaaacaatcacggctgcgatcacacagatcaaagaaagtgcgatcggaagtgcgatcggcgccgcgcagattccgagaataccgatccagactgccttaaaactgtgttttaccgttttcggcggctgctccatattcttttccgccagattcataatcaattcttttgccgcatcttccggcgatccaagatcttcgatcgcctgctgttcattctcctctcccgcctctgcaaagtattcctcaaagtagtctatcgcctgattgaaatcttctttcggtagccttctgagactgtatgacaattttttcatatattcactttttgtcatgataaattccctccctttacaatatcatccacaaccgtccgataacgctcccattcctctgtcaattctgccagatactgtctcccggcatctgtgatcgtataatacttcctgtttcttccctgaaactgtctatcatacgtttccacaaaatgattttcctgaagccgctttaatatcgggtacaacgcagaatctttcatcgtagccgacgctcttttaatgatcctgccgatctgataaccatacgcatcttcttctgcaatcacagagaggacaagaagatcgagcatcggtgcactcaacggtaatgtcatattctcactcctttatatatgttttatttatttatatgtttaatatatttata

SEQ ID NO: 7637 - DNA, 30277 bp, Unknown
  gut microbiota DNA sequence
ggtcgagggcataaccaaagcggagataggcacatgtcgttggttagcatctgtgttttagatgcttatcaaagacggtacccgtaagggtaggatgaaaaaagattctttgtatgtagttttgaaggtacacaaaacaaaatattcctccttagctcagtcggtagagcattcggctgttaaccgaagtgtcgttggttcaagtccaacagggggagcttagaaagccttatattacatgtgtagtatgaggctttttagttcaacagccttgtttattatctgtttgcaattttcctcttatttttggagaaaatatcttgcaaaataaacatatatatgataatatataaatcgctgttaaggaaaacagtaaagtatggccccgtggtcaagcggttaagacatcgccctttcacggcggtaacacgggttcgattcccgtcggggtcatttgcagatttttgcaatatgtaagtattatgccgatgtggctcaattggcagagcagctgatttgtaatcagcaggttatcggttcaagtccgatcatcggctttgttcctaagggaacagacatcattatggacctttagctcagttggttagagcaaccggctcataaccggtcggtcctgggttcgagtccccgaaggtccatttatggcccagtggctcagttggttagagcgccgccctgtcacggcggaggtcgagagttcgagtctcttctgggtcgtttctcttattgattaccaataggagaaaacaatttgatagttgccgcagtggcggaacaggcagacgcccgggacttaaaatcccgtgggtagtgatacccgtaccggttcgattccggtctgcggcattgattaaaagtaggaggaacgctgaatttacagcgtttctcttatttttttacttcaaaaagtttgaaacacctttgaacactttttcttgtgtcttaaatttatttaaactatacgggataggagttaagttaattgaatatatataacggaattttgtattaagagcagacaacacaaaatatttcgtataagtatttaatctagaatatgagcaatggaggaacctatagtatctatgttgatccgaatcccacaatttaacctttcaataagattgactatatagaacagaaaatcattaccggtaaaatggaaatatctaaagcagattttccttgcctgcagaggatagaaaacataaatacagtatgctaaaatgaaagtaacaaaccagaaactgaggagataaagaatgtttgtcagaggatatcagatgtcggactgtaaagaaattacagagctgttttataatacggttcatacaataaatgcgaaagattatacaaaagaacaattagatgtgtgggcaacaggtcaagcggatttagaaaaatggaatcagtcacttcaagagcactatagtatagttgctatagataacaaaatcatcgtaggctttggcgacatagataaagacggttatcttgaccgcttgtttgttcattctaattatcaaggaaaaggggttgcaacagctatttgtaaccaactggaacaagcggttgatggaaaaattacaacttatgcttctattacagcaaaaccattttttgaaaaacgagggtataaagttgtaaaggaacgacaggtagaacgacaaggaatttttcttacaaattatgtgatgataaaggaacaataaatcttgaatttataaatcgaaaagggaatttatgaaaaaaattagtttatttattgcaatgagccttgacggatatattgcagacagcaaaggcagtgttgagtggctgactggacagggcaatgatgaggataatattgattcatattctgaatttgtgaaagacatagataccgttgtaatgggttggaatacttatcatcaaattgttacagagctttcaccagaagattgggtttatgacgattttacaacctatgttgtgacacacaagcaaaaaaagtcttccgacaaaatccattttgtcaacaaaaacccagttgaactgataaaagagctacgaaaagaaaacggaaacggaatttggatatgtggcggtgcaaacttaatccaacagttggttagagcagatataatagattgttattatataaccgtcattccaacaattttaggatcaggtattcgactttttgaaaaagctgaccatgaaattaagttgaggctgctaaaaacacagtcatataatggcatgatggatttaatctatgcaaaaagataaatcccagtttgcgaggtaaagcgtatggaaaaattgatagcaatggtgatctgtacaattcttgtagttgcattggttggctgtagtacttcaaaggatgggaattatcccgcaacaataatggtaaatggaacaaatttctattcaaccaacaatgcggttgctgttgaagtggatgatagtgttattcaatacacaacttcctatgcggagaatggtgttcctaaaaaggatggagaagcaaattttaataaagataccggaacgccatacgcaattcttgaagatggtatggtagtagtgcttattgataatgaatggatagagttcaaaacaaagtaagcagaaaagttctagtttaattgaaaaaatttgaatgtgagaggtgcatataagtgaaaccgaagaaagccagaaaactcatttattttctgtacattattggatttattttaatactacttagctacaagcgtataatgtttttgccaattggtgtgattgtagcaggttcgtctgttgtgcctaatttacttttttacaagtgtccgcattgcggaaaacatcttggaagtaatggtggtgatttttgtcaatactgcggaaagagtattgataattaaagtccagttagtgttgagatgaaaagagctatctaaacaggtttggagttaggagatgatgtcaagcaattccctatattacttccggggcaagtgaaactattaagcttgaaaagggtaagtggtatcgtgttgaaacaggaaaagatcttacaatgagtatagtaaatgttcgtatagaataataaatgtcaatagaaattcgttcttcggttttttatattgtatactatataaaattgcattatattactatagtaatcaagtaaattagattttaaggagcgataactttttataacaggtaggttgtgaatggaggaaatctgtatgattatcgaaggtaatgaaaaagaaatagaggcaatggaacaatttcacaaaggaaaccgacaggaaggactgcggttacaagaagaattcgcagctgcattcagagaggaatataaagataaagatcattgtccttgcaagaaagcctgccgctatcatggaaattgtaaagagtgtgttgcgatacatagagcacatcaagaacatgtaccaaattgtatgagacctattattaatgcaaagataaagctgttatctgaattaacagagcatacgatcgcagaggaaatcgaagctccgcatgagatacttttttcagatttagggtaacagattttataacagtagcgggtgaagcaaatccccctgctttagctgtggggagtgtcaaaacagcaatgagagaaaatagaagttgctttataatagcagcgagagaaaacagaagttgctagggggaagaataatgaagattgaacatatcgcaatgtatgtaaatgatttagaaagtgttagagattttttcgttaaatactttggcgctgtatgtaatgacggttattataactcaaaaacaggttttcgatcgtactttcttttgtttgatgatggagcaaggcttgagatcatgaacaaacctcagatggaggacgaagtaaaatcgccggtgaggacaggatatattcatatagcatttagtgttggaagtaaagagaaagtggattttctgacacggcaaatgcaagaagatggatatgaggttgtgagtggtccaagaacaacaggagatgggtattacgaaagctgtattatagggatagaagggaatcaaattgaaattacagtttgacaaaatatttttaaagcgttgaaaaaaattattgaggtaaatttttatttatctcaaatactatataaaattatagaaagggaaactgctatgatattagaaaataaactcggcattaccgattctgtagaattagccaaagctgaagaaaaaatcagcaaaaaaagagcaatagaactttttgaaagcggctatttgaattatcttaagccgggaacttttaaatcacttgctgaaatacacaaatatttatttggtccgatttatggttttgccggacagataagaactgttaatatttcaaaaggtaattttcgttttgctccgattatgtatttagaagcagctcttgaaaatatcgaaaaaatgcctcaatcaacatatgatgaaattatagaaaaatatgtggaaatgaatattgcacatccttttcgtgagggaaacggcagaagtacaagaatttggcttgatttgattttaaaaaaagaattaggtcaggtaatcgattggagccgtgtagataaagaggactatctttctgccatggaacgcagtcctgttaaagatattgaaatcaaacatatattaaagcaggcgctgacgaacagaatcaatgaccgtgaggtttatatgaaaggtatcgatcacagttattattacgaaggctattccacatttaagataagtgatttgtaattaaaatatttctatcaatggcagaagttaatataaagaactgccgttgcaagtcgttctctaagtaaaattcaaaggagaatcgattgtgaagagagtggcaagcgaaagaaacctatttgcaaagatagcctgagcttgctgctctaaattattgtttacggattgaacggaaagattatgaaaaaaaacagttgacaaattattttttagtgttatactttgaaagtcaaaatatttaagaatcaaataaaatatgacggagaagaaaaatgataggaagagtttgtggaacgggatcgtatttaccgattcggacagtaagcaatgatgaactatcgcatgtcatggagacgtcggatgaatggatacgagaacgaaccggaatcagattccggcatgtggcattagaagagacaacatcagacatggcggcggaggctgcggcccgggcgttgaaaaacggagaagtaaatgcggatgagatcgaattgatcttaactgcgacatcttcttcggatgtgatttatccatcggctgcgtgtattgttcaaaagagaatcggcgcccagaacgcgttggcatttgatctgaacggagcttgttcgggatttgtgattgctttcaatacagcgcaggcatatattcgcgcaggaatctataaaacgattcttgtagtcggcgcagaaagcatgagtcgccttgtggattggagtgacaggagcacatctgtattattcggcgacggcgcaggcgcgctgatactgaaagcggaagaaggtgatcattattggcagacaggtcattctgacggcacgaaagattttgtgctgacattaagatcaaaaagtctgtttgaagaacaggatgataatccaaaagatgtcttatcaaaaagtgatgaaggatcgtcagtggaagaacacgatgacgtaagtaaaaatgcagaagatatcagccggaaaaagaaaagtcataaaacaggaatttgcatggatgggcaggaagtatttaaatttgcggtcagaaaagtaccggagctgacagaagagcttttagaaaagtcgggactgaaaattgcagatattgatttttttattttgcatcaggcgaatgaaaggattgtgaaagcggcggcaaagaaattaaaagtcgatatgagccgttttccgataaatatggaaaattatgcaaatacatctgccgcatcgattccgatccttttggatgaacttgttcaaacgggaagattgagaaaaggtcaaaaaatattgcttgccggatttggcgcagggctgacatgggctggaagtattttagaatggtaaatctctttgagagatcaaacgaaaacaaattgtggataaaaaataaagtaaaagagaaaagaaaggaagaaattatcatgacagagagaatgaaagaaatcgtagcagaggcattgaatgtagaaatcgaaactttaaaagaggacacatcatttaaagaagatttgggggcagattcacttgatctttttgaattggtgatggcgtttgaggaagaattcggagtagagattctttccgaagatctggaaaagatcacaacgatcaaagatgcggcggcatatatggaggctcacaaagagtaaaaaataaaaaaccggatataaaaaatgaaaatagaaacaaagaggccgataataaaaaagaaaaaagtatcaggagaaagtattgtcaaaatgaaaacagaaataacggaacttttgggaattgaatatccgatcattcagggagggatggcatgggttgcagaatatcatctggcagcggcagtatccgaggcaggcggtctgggaattatcggagcggcaagcgctcctcctgaatgggtgagagatcagatacaaaaggcaaagaagatgacagataaacctttcggagtcaacattatgcttatgagtccgtatgcagatgaaattgcaaaggtaattgtggaagaaaaggtaaaagttgttacaacaggagccggttctccggaaaaatatatgcagatgtggaaagaagcggatgtaaaagtgattccggttgttgcgtctgttgcacttgcaaagagaatggaacgctgtcatgccgatgcggttgtcgcagaaggaacggaagcaggagggcatatcggagaggcatcaacaatgactcttgtaccgcaagttgtcgatgcggtaaagattcctgtcattgcggcaggaggaattgcagacggaagagggattgcggctgcatttatgctcggagcaaaaggagttcagatgggaacggcatttatcgtaacagaggaatgtcaggttcatgagaattataaaaatgaaattataagggcaagagatatcgattcaaaagttaccggaagatcatgcggacatccggtgcggacgcttagaaatcagatgacgaaactgtatctgcaaaaagaaaaagagggcgcgtcttttgaagagctggaagcattgacacttggcggtttaaaaaaagcagtcgttgaaggtgacgtaaaaaacggaagcctgatggcaggacagtcggcaggacttgtcacagagaagatgacatgtgaaatgctgatccgaaagttagtaaaaggaacagaaaaacaaatcagaggaagtgtattttatgagtaagactgcatttatttttccgggtcagggcgcacagacagccggaatgggaaaagatttctatgagaacagcaggacggcaaaagacatatttgatatggcgtctgaattattgtcgcttgatatgcggaagttgtgttttgagaaaaatgatcttcttgataagacagaatatacacaggcggctttggtaactgtcagtatggcagcagagcatgtattaagagaatgggggatgactgcggacgttacagcgggattgagcttaggcgaatattgcgcggcagcatcggcaggagcattttctacagaagacgcagttctgatggtgagaaaacgcgggatttttatggaagaagccgttcccgcaaacaaaggggcgatggcggctgtaatcggacttacaggcgctcggacagaagaagtattggaaaagattccgaatgtatggatcgcaaattataactgtcccggtcagttggtgatcacaggagaaaaaagcgcagtggaaacagcgggaagtagcctgaaagaagcaggagcaaagagagttattttattgaatgtgagcggtccgtttcattctccgatgatggaaactgcaggacaacagcttgcgcgtgttttggagaatgtcaggctgaatcaaccggtcattccttatgtatcgaatgtgactgcggattttgtgggagaaacaggagagattaaggatcttttgatacggcaggtatcatctcctgtgagatggcagcaaagtgtggaaaaactgatcgccgcaggggtagatacatttgtggagatcggaccgggaaagacattgtctggatttatacggcggattgacagaaatgtaaaatgtttcaatgtcggtacatgggaagaagcagaaaaagcggcagaacagttatgttaaagcgacagaaagtggaaggaaaatgatgttaaaagggaaaattgcagttgtaaccggggcatcccgggggatcggcagagcgatcgcggtgaaacttgcggcagaaggcgcagtcgtgatcattaattataacaggtcgaaagacgaagctgaaaaagtaaaagagcagattgaagcgtcgggaggacaggtaaaactgattcagtgtaacgtagcttcttttgaatcatgcgaaaagatgtttgaagaggttatgaaagagtttggaagaattgatattcttgtcaacaatgcgggaattacaaaagacggtttgcttatgaagatgtcggaagatgattttgatgcggtcgtagatacaaacttaaagggggcgtttcactgtatacgctttgtttcaagagcaatgatacgtcaaagaagcggaaggatcattaatatctcttcggtgtccggggtacttggaaatgcaggtcaggcaaattatgccgcatctaaggcaggggtgatcggtctgacaaaatcagcggcgagagaacttgcaggaaggaaaattacagtaaatgcagtcgcgcccggatttatccggacggaaatgacagcggttctttcggaaaaagtgaaagaaaaggcagttctgcaaattccgatggagcgattcggagaggcggaagatgtggcgcaggctgttgcgtttcttgcatcagagcaggccggatacattaccgggcaggtgctttgcgtagacggaggcatggcgatgtaattataatcgctccgcttgaaaaggaggaagtatgaagagaagagttgttgtaaccggtcttggagctgttactccgatcggaaatacagtggatgttttttgggatgagattaaaaaaggaactgtcgggatcggaccgatcactcaatttgacgtttctgattataaagtgaagatcgcagcgcaggtaaaaggatttgatgcaagagaacggcttgattttaaatctgcaaaacgaatggaattgtttacacaatacgcggcggcagcagcgaaagaggcgtttgaagatgccggaatcgacatggaaaaggaagatccttacagggcaggcgtgatcgtcggatccggtgtgggaagcttaaaatgtgtggaagataattatgagacgatcctaaagaaagggccgaacagagttcatccgctgatggttccgctgatgatttcaaatatggcggcgggaaatatttcgatccggcttggacttcggggaaaatgcacaaatgtcgcgacggcatgcgcctccggttcacattgtatcggagatgcttttcgggcaattcagtatggtgatgcagatatcatggttgcaggaggagcggagagcgcgatctctccgacaggtctggcaggattcacggcgcttacggcgctttctacatcagaagatccgacttgtgcatcaagaccgtttgacaaagacagagatggatttgtcttgggagaaggagcaggcattattgttttggaagaactggaacatgcgaaggcaaggggcgcaaaaatatacgcagagcttgcagggtacggagcaacggcggacgcatggcacatcacatcaccggcagaagacggagagggcgccgcaatggcgatgaagcttgcaatgcgggaagcaggcgtacgggcagagcagatcgactatattaatgcacatggaacaagcacgcatcacaacgatctgtttgagacaagagcaatacgcagcgcacttggaagcgcggcagatcaggttgtcgttaactcaacgaaatcgatgatcggtcatcttctcggagcggcaggcggagttgagtttatcgtatgtgtaaaaagcattcaggacggatacattcatcagacaatgggaacaaaaaatgtcgatcccgaatgtgatctaaattatgcggtaggctcaccggtcaagaaggatgtaaactatgtattgacaaactcactgggattcggaggtcataacgcttctcttctcgtgaaaaaatatgaagattaaggcggggtgcaaaaatgaagacagaacagatccttcagttggtagaagctgtgtcgggattcggattggacgaatttgaatacgaagaagacggagtaaagctgaagttgaaaaaaggcggaaacgtctgcacatcagtatcggcagaaacggcaggaagaacaaagacagaagcggagattgcaagaacagaagaaaatgcggaagtcttattagaaggcaaaatagtgaaagctccgcttgtcggaattttctatgcgtcgccggaagaaggaggaactcctttcgtgcaggcaggagacaaagtagaaaagggaacggttctcgggatcgtggaagcgatgaagcttatgaatgagatcgaaagtgattttgagggaacgatagaagaggttcttgtcgaaaacggagcggcggtagaatacggacagcctctttttgtcatcaaataaagaacgatacaaaaacggcatagtaaaaatatcagggaggcagagtacggagatggaaagagagacaaagaaaagcttaaatatagaacagatccagcagatcatcccgcacaggcatccgttttgcctgatcgacaggatcgaagattatgaaccgggggaatttgccataggctataaagcggtaacatatacggaagaattttttaaaggccatttcccgaataaaccggttatgccgggggtacttattgtagaagcgcttgcacaaacaggagcagtggcgattttaagtacgccggaaaataaaggaaagattgcatttttcggaggaatacaaaactgccggtttaaaggaatggtatttcctggcgacgtgctgagattagagacaaagattattcgtcaaaaaggtccggtaggaatcggaaaagcggttgcaagtgtggacggtaaagtagtagtaagcgcagaattgacgtttatggcaggagaatagatttatgatcgaaaaaatattgatcgcaaaccgtggcgagattgcggttcggattattcgggcatgcagagaaatgggaattgaaactgtggcagtctattcggaggctgacaaggaggctcttcatacccagcttgcggatgaagcagtctgtatcggtccggcgcaggcatcggaaagttatctgaatatgcagaatttgatcagcgcagcgctcgtttcgggagcagatgcgattcatcccggattcggatttttatcggaaaatgcaaaatttgcagaactttgcgaacagtgcgagattacctttatcggtcctgattctaaagtgatcggtaagatgggaaataaaacagaagcaagagcaacaatgatcgcggcagggattccggttatccgggggacaaacggagcggttttagatctggaagaagggaaaaaagaagcggcgcgcatcggatatcctgtgatcattaaagccgccttgggaggcggaggaaaagggatgcggacagcgcaaagtgaagaagagtttgaaagttgttttgtgacggcgcgcaaagaggcggaaaaggcattcggagacggaacaatgtatatcgagcattttgtggagcatcctcgtcatattgaatttcaaatccttgcagattcatatggaaatatagttcatctcggagaacgggattgttcgatacagagaaatcatcagaagatgatcgaagagtgtccgtgcgccgcgttgtcagatgaacttcgtaaaaaaatgggcgaaacggcggtaaaggccgcaagggccgcaggctatacaaacgccggaacagtagagtttctgctggaaaaagacggtacattttattttatggaaatgaacacaaggatacaggtggaacatccggtaacggagtgcgtaacagggatcgatctgatcaaagagcagatacggatcgcaaacggcggggaacttactttcaggcaggaagatatcaggatgacaggtcatgcgatcgaatgtcggatcaatgcggagataccggagcgcaattttatgccgtcagccggaagaatcacagatctgcatcttccgggaggaaacgggatccgtgtagatacggctgtttacagcggatgcgaggtgctgccttattatgattccatgttggcgaaactgatcgttcacgggaaagaccgtcgagaggcggtagataagatgaggagcgctctgggagaaattattatagaaggaatcggaacgaatgtcgattaccagtatgagatttcggaaaacgaggattttatatcaggaaagacagatgtggattttattcggaggctgagtagtgaaactgcataatatgtttaaaaagaccgtagggaaagaacatggaacatcgaaaaatacaaaagtaagaaatgttcccgaaggattgctgaaaaagtgcaataagtgcggcgcggctattttggcagaggatgccgtaaataacaattatatttgtccgaagtgtcacggatatttcaggatgcatgcaggacggcggatcgagatgatcgcagatcccggaacttttgaagaatgggatgcaaagatgaagtttgaaaatcctctggaatttagcggttatgaggaaaaagtacgaagattaagggaacagaccggacttgacgaagcggtcgttacagggaaagttatgatcgcgggccatccggcggtgatcggagtatgtgacggacgttttatgatggcgagcatgggcgaagtggtcggtgagaagatcacaagagcgatagaacgggctacgaaagaaaatcttccggttattttgttcgcatgttctggaggcgcaaggatgcaggaagggatcgtttctcttatgcagatggcgaaaacggcggctgcgctgaaacggcacagtgaaaaagggcttctgtatgtgagcgttttaacagacccgacgacaggaggagtaacggcaagctttgccatgcttggagatattattctggcagagccgaatgcgctgatcgggtttgcaggaccgagggtgatcgagcagacgatcggaaagaagctgccgaaaggatttcagaggtcggagtttttgctcgaacatggatttgtagatcggatcgtagagcggtcggaaatgaaaagcgttcttgcgcgtattttgcatatgcatgaccgtacaaaagaaaaaacagaagaaagtaccggggaaaccgaaaagattgaaagcactacacaagaagatactatgccaaaacaggtgcggtcaaaaggcggaataagcgcgtgggaaagagttcttctttcaagaaaaacagaccgtccggtcggaacagactatgtgaatatgctgttttctgattttatggaatttcatggagacaggctttttagagacgatcctgcagtggcaggaggaattgcaatgttcgggaacattccggtcacggtgatcgctcaggtgaagggaaagacgacgaaagaaaatgtgacacgcaattttgcgatgatgtctccggaaggatatcggaaaacattacgattgatccggcaggcagaaaagttcggacgtccggtgatctgtatcgtagatactccgggagcattttgcggacaggaagcagaagagcacggacagggagaagcgatcgcttcaaacttatatgaactgtcctcgataaaagttccgatcgtttcggtactgatcggggaaggcggaagcggaggagcactggctctggctgtggcagatgaagtgtggattctggaaaactctgtctattcggttctttctccggaaggatttgcaagtatactctggaaagacagcaagcgtgcgtcagaagcggcggaagtgatgaaactgacggcggatgatctgaaatgcttagggatagtggaacaggtgatcagagaaccgaagtcgtatacgtcacagacaatggctggggtatgtgaagaattaaaaaacatgctcagcgtttttttgaaaaaatacggatctatggatgaaagacaactgctgaatcatcgatatgacagatttcgtaaaatgtaaaaagtgcttcttttccgaacaaagtgtgtgctataatataggttacgaaaatgcaggcgcaagaagcgtcggttatggaacacaatatatggaaaaggaggaggtccgatggatgcgtacagaacaattaatgatacgcttgtaaatctgtttaatgaaatatgggaattagaaaaagaagcgatcataaccgaagaatttaaagacattacaaataatgatatgcatatcatagaagcaatcggattatccggtgaaaatacaatgtcatccgtagctaagaagctgaagatcacggcggggtctctcacaactgcggtcaatgcgcttgtcagaaaggcatatgtgaagagggaaagaagtgaagaggacagacgggtcgtatatatagcgcttacggaaaaaggagagaaagctttttatcatcacgagcagttccatcgtcagatgaccaacgccgtgatagaaaagctggatgacgaagaaattgacgcacttgtaaaaatgcttaaagatatttctgcatttttcagaagttatcagtcataacacaggaaaacggaaatctgataaggcgggatttgtggtatggatgaatttatttttattttggaattgatcggaacagtagcgtttgcttcttcgggagcaatgatcgccatagaaaaaaagatggatattttcggggtaaatgtgctcggggcgacaactgcggtaggtggcgggatcatgcgggatatcatactcggattgacgccgccgggggcgttttcgcatccggtctatgttcttgtggcggcgctgacatcgacgattctttttgtgatcgcatatgcgaaaccgacggcttttgagtctcgggtaaagacagattattatgataagctgatgttctggtgcgatacggcaggacttggaatatttacagtagtggggatacaggcggcggtgcgggccgtcggcggggaaaatgtgtttttctttgtatttatcggaacgcttacaggagtaggaggaggggtgcttcgtgatattatggcaggcgagactccgtatattcttgtaaagcatatttacgcatgcgctgcgattgcgggaggaatcgtctgtgtagtcggaagaacggcattcggagaagcttacggtacgatattaggactggcggcaacggtgctgctccgttttttggcagctcatttcaggtggaatctgatgcgtgtatcataaggtttttcatctcggaaaatagccggatgataagaaaattacagtgaaggcggactgaaattacagcaagaatgataaaaatttgacgttttctgaaaaatgaggtacaatcccctatgaaactttttgatttgggttgaataagtgatactgaacaggattagagagcggtatcggaaatacttggttgtattattttaggagggaacaagtatggcagtaaagaaaacaacttcgacatcaagggcagcggctaaaatagcaaatgcgatcaaagcggagcctgcaaaggcggctaaaacagcggcgaaagcagtaaaggaagaagagaaaacagctgtgaaggcagaggaaaaggcagaagtgaaagcttctgaaaaagctcctgtaaaagcagagccggaaaagaaagaagcagcgaaagcgattgagacaaagaaagacacaacgaaaaagcttgagacaaaagcggcagttttggtagatacaccggagacagaagagaaggcagctgtaaaaaaatcagtaaaagctccggcaaaggcagagaaaaaagcgccggtgaaaaaggcggcatctaagaaagcggaactgaaaacagagatgtttcttcagtttgcgggaaaagaatatacagacaaagagatttttgacaaaataaaatatgtttggtcaaaagttttgaaaaataaagtcggcgatatgaaagatgttaagatctatctgaagccggaagagtcagcagcttattatgtaattaacggcgatacgacaggtaaagtcgatctgtaaaagtctgctatcctctctgtagcgggattgccccggcagggaggttttttatttatatgaggagaaaggaaggcgtatggcatgagcgaaaatacgaaaagtaagatgacggagaagaaagaacaaaggaaacggcttgaacagcagatccgttttattattgaagcggacaaagtgaaaagcgtttttcggcagacatatcttgccgacggaagccggaaagaaaacgatgcggaacattcatggcatctggcattgtctgcgatacttttgaaagagcatatggacgcgcctgttgatctgatgaaagtgatcgtcatggtactgatccatgatcttgtcgagatagatgcgggtgatacttatgcatacgattccgagggcgccaagtcaaaaagagagagggagttaaaagcggcagagcgtattttcggtattcttccaaaagatcagggaacgtatttcagaagtttgtgggatgaatttgaagaatatagtacagaggatgcaaaattcgctcatttgctcgataatttccagccgcttttattaaatgacgcatcagacgggaaaagctgggcagagcatggagtgcataaggctcaggtgtgtaagcgaaatgagcggattgcggatacgtcggatatcgtatgggaaaaaatgcttgaaattatggataaacatgttgagaaaggaaatttgaaaaatgtatgagcgggaaacagagcggctgcaaaagatgattgaagaaagtgaaagtatcgttttcttcggcggagcgggagtttcgacagaaagcggaataccggattttagaagtgcggatgggatttatcatcagaagtatcgtttttcacctgaacaggttgtaagtcatacgttttttatgaggtatcctgaagcattttatgaattttataaagaaaaaatgatgattcttgatgcaaagccgaatgcggctcacctgaaattggcagaactggaacgggcgggaaaacttacggctgtcgttacgcagaatatagacggtctgcatcagttggcaggaagtaagcgagtgtatgaactgcatggcagcattcacagaaattattgtatgaactgcgggaaattttatgatgcacaatatgtcaaaaaaagcgaaggtgttccgaaatgctcctgcgggggcgtcgtgaaaccagatgttgtcctttatgaagaaggtcttgatgaggagacgatccggggcgctgtggaggcgatcgcgtctgcagatatgctgcttatcggaggcacgtctctcgtagtttatccggcagcaggatttatcgattatttcagaggaagccgtcttgcggtgatcaataaatcagaaacggcaaaaaatatccgatcagaactgacgatttcagctccgatcggagaaatattaagccggataaaagtgtgatcagtcagattcccatcgtccggatgcgccgcatgggaggacaagtcccgaatcagtgacaggaagtccgatttcctgcgactctacatggccgttccatggctttagttctgtcgagatcatatacgtaagtacagcgggtgcaagccctgtcgtataggaattgacaaggaaaaaaagggcgtctttagacaagatctttgtgcaaagtttgatgagcgggtggatcatatcttcgatcttccatatttcgcctttcggaccgcggccataagacggaggatccatgatgatcgcgtcataagtattgccgcggcggatctcccgttcgacaaattttacacaatcatcgacaagccagcggatcggagcgtctttcagcccggaagacactgcgttttctttcgcccagccgaccatgccttttgaggcgtccacatgggtgacatgcgctccggcggccgctgccgcaagagttgcgccgcctgtataggcaaaaagattcaaaacttttaccgggcgtcccgcgtttcggatcttttccgaaaaccaatcccagtttgtcgcctgttcgggaaagagtccggtatgtttaaaactaaatggtttcaaattaaatgtaagagatccatagtgaatctgccactgctgaggcagactgaaaaattcccattccccgccgccttttttactgcggtggtaatggccgttcatctgtttccatcctttatgattctttttcgtgttccagattacctgaggatcggggcgaacaagaagataatctccccatcgttccagtttttctccgttagaacaatctataacttcataatctttccagttgtctgcaatccacataataatatcctttctccatacagtgtgtgcgaatatagctatagtttaccacaagcatgtacaacaggaaagcataaaacaatctaaattgtaacagttcagccatgcagcgcggttttacgaatgcacaggctgagcttttactgtctgtggatttcgtcaacttgaattttcaaagtgaaatacggcatgattcatgatacaatataaaataagaaataaaattttgagggagatgtcttatggtgaaaatgacagtagatgcaatgggagatcactgtccgattccggtagtgaaaacaaaaaaagcgcttggaaaattacagggagcaggacagatagaagtgcttgtagataacgagacggcaatgaaaaatgtcatgaagatggcaaaaagcagcggcgcgtcagcggaatcggaaaagatcagcgaccgggaatacaaagtgatgattacggtagaagagaagaacgcggctgtatcagaaagcgatcaaaaaggacagaccgcaggaaaagaaagccgggcgcaggcagaaggcggggggaaagaagcaggcgaatcggatcacaatccggcagcagaaaatggaagtaacagtagtgcgcaggggatgaacaaagtgcagttatcatctgcgggatgcgcgacatgtatcggaacggtcgttgcggtttcttctgataaaatgggaagcggaaatgatgagctgggcgcagttttaatgaagagtttcttttttgcggagacgcagcttgatacgcttccggataaaatccttttttacaacggaggcgcgaaacttacggtggaaggttcggactgcctagaagatatcaggattttggaaaaagaaggcgtcgagatactgacgtgtggcacatgtcttgacttttacggattaaaggaaaaactggcagtcggagcagtgacaaatatgtatacgattgcagaaattcttcaaaacgcagtcagcgttgtttctccgtaacgacaggagaaggacataaggaaaaatatttattatgggtgaaaaagaaagaatggcaaaaagtataaacggatagataaaagtgtaaggacagtattgcaaaagtttgatacaatacgataacagctcataggaaagcggcatgttttgtcccgaaatgcagcttttgagttgagtaagtttacatggggaaaaggaaaacaaaaatacagatatcccctacataataaggaggtattaagacaaatgaaaaagaccaaaaaactggtaatgtcatggctgcttgccttttgctgtgtcatcactttggttgcgccgtctgtcgtaaatgcggcagcagatgatttcgagatcatcgatgatacagacgcacgttttgtatattcagacggtaatgcaaataacggcggatgggaatcggcgggagcgggcgacgcttccgttacagagcactggagcaacacggcaggcgcgacattggacattacattcaacggaacaaaactggagctttacggtaaaaaagctgcaaatcatgcaatgttcagcgtgagcattgacggaagcgaggcagtagaatgcgacgcctatgccgcagtgacagaaccggaggcaaaattgtttgaaagcaaaacgcttgcggcaggaaatcatacagctcatatcacagttttagaaaaaagaaatgaagcttctacagggacaggaagcgtttatggcgtacagtttgtgtatgcaaaagcatttgaggcagagattgccgagccggaatttccgggatatacagaagttgacgatgctgtttttacaacaaatcatgagcccttcaagatccagtacgagccggcaggcgcttggactgcgggaagcggcaacggaaatttgttttataacggaacagagcattacagcgcaaaaggcgttgatgtgtcttatgagatgatctttactggaaccggagtagagatccatgccagcaaaaatacagttcatatgaactgcgacgtttatatcgacgatgtgaaagtcggagaattggcggcacaaaatgccggagcaatgcacaaacagaaattatttgagaaaaaagatcttgcgaatacaaagcatacgcttcgtgtcgttccgaaagagggagaaagcattgaaggcaaagtaatacagcttgataagattgttgtttttcacgatgaaattactgtgcctgattcgatcgtattgaaccggacggagctgacgatgacacccggcgcttcatcagagcttacggcgtctgtcattccgtggaatgcaaatgcgaagcttgtgtggacaagcagcgacagcagtgttgtagaagtaaacgatggaaaactgaccgcaaaagagatcgatgtgaaaaagacagttactgtcacagcggcaagcgctgaagacaacagtgttttagcagaagctaagattacagtcgatccggctctggcatttatgaacgcatatgtaggcaatgaaaaactcttagagacagagcttgattatgataagctgaaagcaggaaacggaagcgtttataacggaacagcctggttgaatgatgaactgaattctaaaattgtcgtgacgacagaaaaagacgttcacaatgttcaggttacagcaagcgatttcaagaatgaaaagggacaggttttgtcaaaagacaatattgatattaaatggctcaaagaaattgcggcaaaagaaggacgtaacgcacaggggcagacaaaaaattatccggatgtgatctacaaaggcgggaagaaagatatcgatgcacaagatgtacagtttgcatgggtaaatatcgcgattccgaaagatacagcggcaggaaattatacaggtacgattacggtttcggcggacgaattagacaagccgttcgagcttacgtacaacatcgaagtgctgaaccttgtacagccggcgccggaggcaacagaactgcaagtttggcagcatccgttttcagttgcgaattattatttaggtttaggtgaaaatccgtcgggcggcatcacaaacgaggtgcgggaagatttctattttacagaaaaacattttaatttgatgagagactcgatcaaagagtatgtttcgatcggaggtcatgacgtagttgccaatgtcgtagaagaggcatggaatcatcagtcatattataacgatctttcgatggtaaaatggacgaagaaagcggacggaacatgggaatttgattatgattggtatgatgcatggatcaatttcatgatcgagtgcaaagttttagatcctgcaaacggaatcggacagatcaagtgttacagtatcgttccatggaacaatcagatcgcttactatgatgaagcgcagggtaaagtagtgaaagaatcacacaatccgggaactgcaaagtggaaagagatgtgggaaccgttcttaaaagattttatggaacattccaaaaaaatgggatggtttgacatcacttatatttcaatggacgaaagagggctcgatcagcttgaaccagcggttgagatgatcgaatcagtgaaagacgaagatggaaaccactttaagatctcttcggcgctgaactatgcagctccggaatattatgagtttacagaccgtatcgatgatatttcgatcaatctcggaaacacaggaaacgtacagcagatgaacgatctgtcagatcaccgcagagacttaggtctgacgacaacgatgtacacatgtacgggagattatccgagtaactttatgatcagtgatccgggcgacaactattgggatatctggtacacgatgacattaggaacagacggctatatgcgttgggcatgggataactatgtatacgatatgcacggcgatgcaacttaccgttactgggagccgggcgacggatggttcatttatccgatggaaagagaagcggtaggagaggactttaacgcttccttctacagcacaccgcgttatgaattgttcaaacaaggtatccgtgatgtggcaaaagcaaaatatctgttgaacagtgaaagcgcgacagcagaagaaaaaacagaattgacagatgttgtagagcatttggcaaaaccgcagaaaggaacatatcaaggttctgcggtggcggcatccgaaaaagaccgtatgctcgttcattctgaaacagagcgcgctttagatgcgacaaacgcgctggcaagaaacgttgcggagagggagaatccgaatccgaagccggaaagcgcagataaaacagcgcttaatgcggcgattaaagatgcagaagctttgaaaaaagaagattacacagcagaaagctggaaagcgtttgagacggcgttgaatgcggcaaaagaaacagcggctgataaagatgcagctcagacagaagtagacaacgcattaaacgtattgaatgcggcagttgctaaacttgagaaggtgaaagatccgaatcagcagcagccggttcaaccacagccggagcagacaaaaccggataagacgactcctcagacaggagatcggacaaacgcagcgcttctgtttggatgcgcagttctttcgggagcaggtgtgttctttgcatatcgcagacgcagaacaataaaataatcgttttctaaagtagatttcggaaaacagaggaaaagaacgaaagagtcggagacggatctttcgttctttttgtaacggtggagggatgaagtccgaaagattcttttttggtctgctttagaaatctacaaaacagttgttaaacaggtagatttgcgtcataataaaaacgactattatggattttttcggaggaagaagagatgaggaagatggagaagattcatttaacacaatttgcaaaacacggcggctgtgctgcaaaaatcggtcctgatacgcttgggaaagtgcttgggaggcttccgaagtttcatgaggacaacctgcttgtcggttttgaaacttcggatgacgcggccgtatataagctttcggacgatacggcagtgatacagacactggatttttttacgcctgtagtagacgatccctatacgttcggacagattgcggctgctaatgcgctaagcgacgtatatgcgatgggaggagaaccgaagatcgcgttgaatatcgtctgttttcccggggaactggatccggattatttaggggaaattctgcaaggaggcgcggaaaaggttcttgaatcgggagctgtccttgttggaggacattcgatgcaagatgacgttccgaaatacggactgtcggttatgggacttgttcatccgaatcgcatctataaaaacttcggatgtaaaaaaggagatgttctgatccttacgaaacaactgggaagcggaatcgtcaatacggcggtcaaagcacagatggcttcggaagctgccgggaaagaagcggttgccgtgatgacgcagttaaacaaaaaggcaagggaaatactggacaagtttacgatccatgcatgtacagacgttaccgggttcgggcttctcggacattgcggggaaatggcttcggcgagcagagcgaagatagagctttggccaaaagatatcgcctatattgaaggggcaaaggaatatgcgcagatgggacttattcccgggggagcatatcgcaacagaaatcatgtcgcacagcttcttgaagcgggaaataccgatgagatgtatgtagatctgctcagtgacccgcagacttccggcggtttgctggcggcagttccggaagaagaaaaagatgcgattttggaagaatttgataaagcacagatggaaacaaaagtgtcggttgtcggaaaagtaatagactccgaatgtgaagaagcaaaaatatatatccgctaatataggaggagagacaaaatgatttatctggataatgccgctacgactttgcacaaaccaaaggaagtacaggaagctgttatagcggcgtttgggcagatgggaaattccggaagaggggcatcggagccggcgcttaaggcattgggaacagtctacgatgcaagagaagcgctggcacggctttttcatgccgaaaatgcgagtgagattgtgtttaccgcaaattctacagaggcgctgaatattgcaatcaagggaatactcgatccgggagatcatgtcatcacaacggtgctggaacataattccgtgctgcgcccgctgtatgaatgccgcaggaaaggtgtggagatgacaatccttacatgcgacgaatatgctaacatttcatatgaagagatggaaaaggcagtcagaaaaaatacacgggcgatcatatgtactcatgcgtcaaatatgaccggaaatatgatctctttggagagtgtcggaaagattgcggcaaagtatggtattctctttattgttgacgcttcccaaaccgcgggagtatgggagatcgatgtacaaaaatatgggatttccgtcctttgttttaccggacataaaggactgatgggaccgcagggaacaggtggtatgtatgtaaaaagcggggtaaagatccgtccgcttttgtcaggcggcagcgggatagattcttataatatgcatcatccgtcgcagatgccggaagcgcttgaagccgggacgctgaacggtcacgggatcgcgggacttcgggcggcattgtcatttttggaaagagaagggatggaacgcctgcggaaaagagaactggagctgatgcgccgtttttataacggagtcgctgaaattccgaatgtgaaagtgtacggagactttcggacggacagaagggcagccatcgtttctttgaatatcggcgattatgattcggcagagataagcgatgaattaagcggcagatatgggatcgttacgcggtccggagcgcattgtgcgccgttgatgcatgaagcgcttggaacaaagatacagggtgcggtcagattcagtttttcccattataatacggaagaggaaattgacgaggcaatccgcgccgtaaaagggcttgctgaggaataagaagaacaggcgcggggcaaggtgttatggaatcataagaaacgggggagaagatgaaaaaacgagagaaaaaaattgtgatcacttttcatacgacaacggatgcgatggcaatggaacggtactgtaaaaagagaaaagaaccgggcagactgattcctgttccgggtacgatctcggccggatgcggacttgcatggtgcgttctgccgcaagagagggaacatcttttgaaagtgatggaggagggggatataactccgcaggctgtgcatgaatgtatgttataaaatatcacagttctaccacaaaagattcacataggtttgatatcgtcttaaacaaatatattgtatgaaatatgtggaaataagattaaagtatattgaaaaagtatatgtcacagatagaggggagtgcagaaatccacagaaagaatacaaagttaggaggatatcattttgatagaagtaaaaaatttggtaaaaaaatatggaaatcatttagccgtagatcacctggactttcagattaagccgggaatggtttacggttttttgggtcccaacggagcaggaaaatctactacaatgaacattatgacaggatgcatgggggcaactcagggggaagtgctgattaatggatatgacatcttgaaagaacctgaaaaagccaaaagatatatcggatatttgccggaacatccacctctttatatggatatgactgtgcgggaatatttggattttgcagcagagctgaaaggaattagaaaatctcaacgaagagaagctgttgatgaagcagaaaaaatggtaaaggttcaggatgtggaacatcgcttgattcgaaatctttcaaaaggctatcgtcagagagtagggctggcacaggcaattttaggatttccggatatgattattcttgatgaaccaagcgttggattggatccgaaacagattatagagatgagagatttaatccgtaagttggctgagaaccatacggttattttaagctcgcatatattgacggagatcagagaagtatgtgattatattctgattatttctaaaggaaagctggtagcacaggatacgctggaaaacttggagaagatgatagggtttcacgatgtgattgaattagaaacatcggcttcggaggaggaaattcatagaatactggggaggattcccggagtttgtgcgatgcagatgcgtgtgaaaggagaaaagtgtacttatgtacaggtaaaagtgactggagataaaagcagtcagaataacagaaaagtaagagaagagattttctgtgaatttgcgaaagagaaaaaaacattatattcattgtcggcgcctgaaacgagtttggaagaagcgtttatgaaattgacacagaacgataatatagaaagaaatatgcaaatcgaagaatcgcttgtgaaagatagacaggtaaaggacggacgggtgaaagaaagccgaccgggagagaaacagataggagtggaaaccagaaaatgtgagatgaatacagagggaggaaaagaggatgaaggcggtttataaaaaagaattaaaagcgtattttcagtctataatagggtgtgtatttattgcctttcttattgcatttactggaatttatttcatggcgtataatatgacaacaggatatccgtatttttcttatacactttcaggatcgttgatcgtatttattgtagggattcctttgattacgatgcgttcatttgcagaagagagaaagaataaaacagatcagattctgttgacagcgccagtgagtttgtggaaagttgtggttggaaaatacctggcgatggtgacggtaattgcaatcccgaatcttatattttgtattttccctcttatcattaaattgcaggggacggcgtatttgacagttgattatatttcgattttgatgttcttcctgctcggctgtgtttttgcagctataggaatgcttttatcagcgcttacagaaagtcaaattattgcgtatatagggacgtttggtatttttctgattctatatttatgggatggtatcttatctctgtttccaaatacggcgatgagcggacttgtgtttataattttgcttattttgctggcagctttctacatatggagaatgacgaacagtttttcgattgcgggaggagtgggctgtgtcggagtggcagtagcgatagcagtgtattttctgaaagagacgctttatgaaaatctgtttacagagtctttgggcgggttcgctctgacaaatatttttaccgatattacacaaaatagtattgtagatgtgagcggaattgtattgtacttgtcgatgatcacattatttttatttttgacagttcagtcgattagaagacgactttgggaaagtgcggcaaaaaaacatggagcgtatagcgtgacgatgacagcggtttttcttgcaattacagttgtcataaacttgattgcatgccagataccggaaaaattccgaaagatagatgtgagtaatacaaaaatttacgagatttcagatacgacagaagatttcctgaaagaaatggataaagaaatatcgatgaagataattgccgtaaaagaaaatacagatgaacgaatcgttacatttttgagtaaatatgcggctttatcgaataaaatacatgtggagtggatagatcctgttcttcatccgtcggttttgtcagaatatgaaactacagaaaatacgattgtgatttcctgtgaagaaacaggaaaaaatacgacggtttcttttgatgatattttggtgatggatcaatattcctactattattatggaagtacatcgtatacatcatttgacggagaaggacagctcacaagtgcactgaattatgtgacaggcgaggagacaaagaaagtttatttgtcaacaggacatggggaacaagagcttgctgaaacgataacggaattgatgaataaaaatggatatgagttgtcggaagttaatttacttatgtcaacatctgtaccggatgattgtgatcttcttattgtgaacgcagtaacttctgatctgacagaagatgagaaaacaatgttgcagctgtatttgcagcaagggggaaaggtgaccgtcctattaggagaaacagaaggggaaaagctcccgaacctgataagtattttgtctgaatatggcatgacgatggaaggcggttacattgcagatatgacgagatgttatcaaaataatccttattgcattttccccaaattatctgtaagcggtgatttggcagaacagattaagtcagaaatgacacttgttatgaatacccatgggatgacagtgaacgatccggcaagggatacgattacaacggttccgtttatgtcaacgtctgatcaggcatttgcagtgacggagcaagaccaaaagcagggagaatatattcttggagcatatgcgacagaaacagtaagcgagatctccgcagagacagaagaaacagaaatttcagaagaaaatgcagaagcgtcggaagaaattacggaagatacagagaaggaaagtagattgacggtgattgctgcaggaagtctgatagatgagcagattatagatacctttacggaattggaaaatacacagttgtttatgaacataatggcagtaaattttgaaaatgtgaaaaatgtctcaatcgaagccaaaagccttagtgtagaatataatgctgttcagcatgccggattattcggaacactgatgatttttggaatacctgcagtgattttaatcagtggttttgttgtttggtacaggaggagaaaagcatgacacaaaaaaggaaaataggtttgctcataattgttttcgtggcgcttatatgtatatatatgtgggttcgcgcgtggaatcaaagcgaacaggcacaggcaaatacaatgatacgaattacagatacagaaggagataagattaaaaagatcgctttaaatatagaaaatggagagttgaactttgaaaaagaaaatggtgtgtggtatgatgctttagatcatgatattccgcttaatcaaagcattatgaatgaaattgcagatacggttggcagtatttctgcaaatcggaatttgtggagagatttcctgaactttccttattttacaggcttttcagcccattaaatagtgaaatgatatgtattttcccttatttttgcccttatgcggaatccgcaagggaaataagggaaatttttagttaagcattgctcgctactttatcaagaagtcttgcggaatcccgttttgcttttcttgttgagtgagcgtaaatattcattgtggtactgacatcagagtgtcctaacagttcctgtacatctttcggtgcagctccattggaaagcagattgctggtataagtgtgacgcaactggtgaaaatggaaatcttcaaatcctt

SEQ ID NO: 7638 - DNA, 63136 bp, Unknown
  gut microbiota DNA sequence
tctaggcaactctattttaccacaatccgttgaggagatgttttgttttataaaagttaaaatgccgtatttatgcggcttgtggcgtttcgcaaacacctattatagaaaataaatgaaaggagagacgcgtatgatcacaaaatttgagagaaaagtgatcgcaggacttacagcttttctgatgtgcctgtcgatggtgttagcagttccggtttctgtaaatgcagaggcagaacagacgcaggatgaagcggtaagtggtgcaaagcaagaggagacagtgagtgatgtgcagatgcaggatgaaactgtaaatgatgcacagcaagacgtaactacgggagaggaagttgaagaaggtgcggccggagatatacagaaattgccggggatgagcgcagaaagcacagatgcaatgctgaatacaacgtcacaagaagatgtgataggaagtattactctcaagaaagacggcacggaagaatccggttcgattatgctgcaggaagatcagacatctgttcgttatcagttgaatgttgaagaagacgggcaatattatattacggcaacaggtgataattattggagtacgtatgcgagcattacggaagaaaccgaagacggaacacaagatgtggagattatcaattcacgagttgaacttcgtaaagcaggaacatattatttggaattatcagattattcatcagaatctcaaaaaattataaaatggaaagccggaaaagtcaaagatattacccccggagaatttgatatagagttaaatgaggagaagcctgaggcgtactatagattgacagtggatgaatccggggtttattatgtgcgttctgtaaaggggatgtcagttaagataagagacacacagacaggaaatgaaattttatcttcatcgtctttttataaattaaaaaaagagaatgtttatgagattacactcggaagatacagttgggaaaacgcttcaggaaaatggggaattctgaaaggaatcgaaaaagaagtagagtgtgacaaagtgtatattaatgagacagatggcgtttactataagttcgttccgaaaacgacaggatattatagtgtagaaggcggtttttatgacgaagagtggaatcagatttattccgaagaaatgcttgccgggaatgcgtattatttagcgccgtatggaagatattggtgtattaaacagtctgaatatactccgattgatccgggtggttctggtggaaaagtacaggtcaaagtaggcgagacgtatactcatgatatgagaaaaggcggtttttatgagtttataccggaagaaacggcaagttatcatttccgctctaatgaaaatgtgaaactggaagttaaagagaggatattcgagataaacggtatcggaactttagaaggcaaagttgactattcagtagttatgagagccggatctgtatattggatacatttgtacgagatggatgcagcaacagttacatggacgattgaaaaaacaaaaacaaaaactgcggtgacaggaacaaaatatactgctgtaaaaggcggatcagacacatatgattttgtaccaagtaaatccggagattattctgtttcttttaacggaaaaggcggagttttagtatatgatgacgcatggaatgagataaaaaaatattatcctgaagaagcagacggaagccgtgttgttctttcgctggaacagggaaaaacgtatcactttgctgttgcagcattagagaaagatatgcaatgggaaatcgaatcagctaaaacaaaaaacggattcgtatacacaaatttagctgataatacagtagagattttgaaatatacaggaacggaaagtaatgtaacaataccggataagattgacaataaagtcgtaaaaactcttggagctgaatcatttacagagaatgagacggtagtaggagttacgattccggcacaagttacgaatctgcagtacggagcgtttgcatcatgtacgaatttgaagaaagtaactttcgcacaaggcagtcaactgaaaaaaatcaaagaagaaacatttgaacactgtcaaaagttagaagaaatacatattcccgacagtgttacacaaatagagaagggagcgttttattattgtcggtctttgagcaagttaacgctagggaagaagcttgaggtaattgataacaacgcctttgaaggctgcagcagtctgaaacagattgaaattcctgattctgtggaaagtatcggagagggagcatttacatattgcacttctcttgaacatgtgacgattggaaataaactggcatatgtagcgaaaagtgcattttcatggtgtaacctgacggaaattacatggggagacggaattgcaaaaatcggagacagtgcgtttgcttgtaaccaaaaacttacgacggtttcgattcctgatacagtaacggaacttgaatacaaagcgtttgccggatgtgtagagttaagtgatattgaaattcctgattcggtagaagcaatcggaggctatgcatttgagaagtgggatatatataatgaaggtggggacactgcatggtatgacgcacaggctgacggtgatgtgtatgccggaaaagtttactacaaatataaaggaacaatcgcagaaggcggtactgtcaatctgaaagccggtacgaaaggaatcgcaggatatgcgttccttgatcagataaatctgacaggaattgaaattcctgatagtgtaacgaatatcggcgattatgcatttgtcggatgtgaaaaattaaacaaagtgactgtccctgcttctgtaacaaaaatcggagagaaagctcttggatatttgacgtcgggaaagggaggacaggcttataagttagaaggctttacgatccggggagtagccggttcagctgcagagaagtatgcgaaagaaaacgaatttaattttgaggcgtatactcctgagtatattagaggagatgtggatgccgacagaaaagttagtatcggagacgtccgtatgacattgcggagcatctgtaagaaggcggaattgaacggaacacagaagcttgcggcagatgtggaaaaagacggaacagtagatataaaagacttgcggaagattttaagatatgtctgcggtaaaattgaatatttgtaaagcatattattaagtgtattgttaaacgcattttgtgagtgaatctcaaaagtgtaagaatgggaagaaccctgctttgccgaaaggcggagcggggttcttcttatactgcgatcatccgtgaatgtgagcgctgacgatatctccgcgataactattctgtggatgccagtgatatctgcggcgataactattctgtggatgccagtgatatctgcggtgataactattctgtgactgtcggcgatatatgttgtggtaattattctgtaaatgtctgtgatatatgttgcggtaattattctgtaaatgcaagtaatatgtgatgcagtgatctgtgcagatacggcagatattcttccatactgacaggctggctgttatggatacagttataacttgtagagccgatcagttctatcatcgtgaatagaagcagttccggagcagggcagtttacattgtattttttcaaagcggtcatgtagtgatcgtagaattggctggagaaagaaggatctccgtttgtaaagacacttttaaatatcccccatgataagtttttggcaataaactccatgaagaagtggtttttttgaaatcgttcgataatgtagtccgtagtaaagagcagttcatcctcaaaactgctcacatttgctttttcaagagcgcggtgtgcatcgtcaaaaagttgatttgccttatatacgatgagtttgtcacgcagatcgtatttatccttgaaatacaggtaaaaagttccttttgcaaggccggcctgttggacaatatcagaaattgttgttttggcaaatccttttcctgtgaaaagatgaaaggcagtttcgagaagtgtgctctctttctgctttttattatcatcaactttgctcataatagatcccctcttatttttgatgcttaatcttttgttatttttcctatattatgaattgttttattgagaaagtcaataaaatgactaaaattcatttttatcgctgaaaaatattgactattagtcatttttggaatatattgtgtattatacaaaaaataaggagatgatttcagtggtcaaagcaggcaagtggattgcaaagcatcgggtgttgatcttgattgtcagcgcgctgcttatgattccgtcttttttcggaatcgtgaatacgagggtcaactatgatctgctcagctatctgcctgaacatcttgaaaccgtgaaggggcaggatattttggtagatgaatatggcatgggagcgttttccatggtcgtagtagaagatatggaactaaaggatgtacagaagctggaagaaaagttcagcgaagtaccgcatgtaaaagatgtgttatggtacgatgatgccgcagatatcagtcttcccgtcgagatgctgccgaaggatataagggaagcctttttcaaaggagaagcaacgatgatgttggctctttttgataatacgacatcttcggacgaggcaatggatgcggtgacacagatgaggcagattgcagataagcaatgctttataagcggaatgacaggtgttgttacagatattaaaaatctttgcctgcatgagctcccgatttatgtggtgatcgcagtactctgctgtcttttgatattggaactgacgtccacgtcgtttcttgtaccgatcttgtttttgataagtatcggagcggcgattgtatataatctcggaagcaatatctttttgggagaaacgtcctatattacgaaagcgctgactgcgattttacagttaggcgtaacgatggattattccattttccttttgaatagttatgaggaaaataagaaacggtttccgggagaaaaagaacgggcgatggggcatgcgatcgcgaatacgtttaagtcggttgtcggaagttcggtgacaacgatcgcaggcttcgcggcgttgtgcgccatgacgtttacacttggaagagatctcggaatcgtaatggcaaaaggtgttgttatgggagtgctctgttgtgtgacgctgcttccttcacttgttcttgtatttgacaaatggatagaaaaaacaacgcatagaccactgttttctaatatgaataaaccgtcagagtttattacgaaacattatgctgtctggatcgttttgttccttgtccttttgttccctgcaatttacggaaacaaccatacgaagatctattataatatcgctcagtctcttccgggatcgcttgacagtaatgtggcgaatgaaaaactggaaaaggattttgaaatgggaaacatgcatatgatcctcatggataaaaatatggatggtgtgcagaaacagaaaatgctcgatcaggttgatgaagttgacggtgtaaaatggacgatcagcatgaactctttgataggtccgtccgtgccggattcgatgatcccggacgatattaagagtatgttgaaaagcgatcactatgagctggcatttatttgttcggaatatgcatctgcaacagatcaggtaaatacacagatcgcacagatcgacgatattgtgaaatcatatgacgatgacgctatggtgatcggggaagcgcctttgatgaaagaccttcaggatgtaacggatgtagaccttacaatggtcaatgttctttcgatggcggcgatctttctgatcattatgatcgtatttaagtcaatttcccttccggttattcttgtatcggttatcgagtttgcaatagcggtcaacatggcgtttccatattatatgggaacggaacttccgtttgtggcaagtattgtgatcggaacgattcagcttggagcgactgttgactatgcgatcttgatgacgagccgttatcagaaagaacgcggacgcggaaggtcgaaaaaagaagcgatcgcgatcgctcataaaacaagcatgccgtcaattatcagcagcggtttaagtttctttgcggcgacgttcggagtggcgtgctactctaaagtagacatgatcggttctatatgtacattgttggcaaggggagcgatcatcagtatgatcgtagttatacttgtacttccggcgatgtttatgatatttgataaaattatctgtaagacatcgattggatttctcggagaaaaggcgaagaaaacggcgcaataaaaagtaatggaaacaaaaagtaaaactatgaatgtcgggaaaggatgttggcagttatgaataaaaacagaagaatgaaacatgtagtagcggcttcactggctttcggagcggcggcgcttaccggattcggacagatcgctccggcagcagtatatgcggcagagcagacggaaactgtgaaaacagaaagtacaaaaagcggagaacaggcagacgaaggcctgtttaaagaagaaacggtttatgtcaatgcagatgcaaacggagcggtaaaacttataacagtttcggattggctgaaaaatgcgggaacgacagaaagtttaaaagatgtcagcgaacttgacggtattaaaaatattaaaggagaagaaaccttttcggagtcgggcgataatctgacgtgggatacaaacggcgcagatatttattatcagggaacgactgaaaaagaacttccggtttccgtgaaactgacctattatctggatggaaagaaaatcagtccttcagagctgaaaggaaaaagcggacatctgaagatcaaaattgattatacaaataacacaaagaaatcggtgaatgtaagcggaaaatccgaagaactaagcagtccgtttgtaatgatgacaggaatgatacttccgaatgagacgtttagcaatgtggcgatcgacaacggaaaagtagtgtcagacgggaatagaaatatcgtacttggatttgctgttccgggtatgaaagaaagtctgggaatgaatgatttctcgcagtcgtcttcgcaggtatcgcttcctgaaagtcttgagataagcgcggacgtaacggattttacgatgtcctctacttatacggtcgcattgtccgatattttggaagatttgaatgtgaaagaaatcgttgattacagttctttgcaaagcgctcttgatgagctggaaaatgcggcgttggaactggtaagcggaacagatacgttgtcttccggggcggcgcagctttcttccggcgcggcagaattagaagacggcatcaagaaatatacagatggaacggatacgttggcaaatggagttgtatcttatgtaaatggggaacaacagttagcagacggcgcaaaaagccttacggaattgagcgcaggcttatcccaggttcagtcagcagtgagtcagcttagcgcagccacagacggaagtttgacaagcgtgaatgagaaagatattaaggcaggagcgcagaaattggcagacggaacgcagcagcttgtacaggttctcggaacagaggctgttcaggctgtgatgcagcaggtgacaagtatgatcgagatgggaaaggcgctcattgaggaaacgaaagggctggaaacaagtctgcaaaacggaatcgtaaccccggttcaggatcttgcggcgcaggcacaggcaatttcaggagagcttcagaaaatttcagatttgcagacgaatcttacaaatgcatgtactgccgtaaatactgcggtaaacgaaaataatgctgttattgatgccgataatggacagattgcggcgaataacgaaaagattacgtcagctaagacgaaagccatctcaagttcacagacgattcaacaggcggtagattccctgacggcgaagagaaatgaaatcgcacaaaatgatcctcagtcagcggctcttgcagatcttgataatgcgatacaggcgctgaatgaagcgaaaaacgccgcggctgaagtgaccgatatgccggaactttcttctatagaaggaaaactaaatccggtgcaggcggatctgtcaggcgtggatgtgcaggctgttcaaaatgcagtaggaaaaatgaaagtagatctgtttacattaaaacttgcggctgcaggaatgaatgcaaaacttcccgaagtagaagaaaaattagacgcaatccagaaagcgggagaaaacctgcctttggatcaactgggagcgctgacaggtaagatcgacgatctaaatacgggaatgcaggggcttaacagtggaatcggatctttgcatacgaatctatcatctttagatcaatctcttgcagtatcagtaccgaaagcggcttccggaatcgcacagctaaacggaggatttacacaattaggcagctttaacagtcagcttacggcaggagcggagcagttaaaagaaaacagcagcgtactgaaaaacggagtgtcggctttgaacagcggagcgaaaactttgtcagaaggagctgtgacgctggcggacggaatgaagacgtttgatgcagaaggaacgagtaaactgaaaacaacggttgaaggtgcggtcggagaattgatgaaccggttagaagcgctgacatctaaagagtgcagctatgatacgttcagcggaaaagacagcgcgatggacggtaatgtaaaatttgtaatcgaaacagaagcgattgaataaaagcagaaaaaatgcctcccctgtctgagccgcaggagaggcattttttataaggacaattaaataaacttctgttcaggagcatccacttgggagtggatgcttccatttttccatccaataattgacctgcagcatataagcaagcatctgaggtcctgccataagctgcccataccatggttttccgtagtcggaaggcgtatcaaggaaacgcaatactttctttttatcaagaaatgttcgtataggagcattgggggaagcgaggacttcttttagttgatctgcgagcaatgcttcataatgaggatcataagtttttggataaggacttttgcgtctccacaagatctcttttggcaagatgccctctccggcatggcggagcagaccttttacaattccgtccggacatttgatgtcccacgggatattgaaaacgtattctacgatccgataatcggcaaacggtacgcgggcttcaagtccgctgtacataccggcgcggtccatccgatcaagaagagttgccataaaccagcggatattcaggtaggcgatctcacgccgacgtttttcttcgggagaatcatcaggtagaaccggcgtttcacgaatcgtctgttcataggcgttaagggcatattcttccatgttcagttcgtgaataaaatcgtcgtctaacaatgcttgccgcggctgcatagaaggcgaccatggaaacatattcgtttcaaatgagctttttttatgaaaccaagggtagcctccgaaaatttcatcagcacattcgcctgtaaggacaacgctgttgaactgtttgacaagtgaacagaaatacaacatagaggactcgacgtcggccatgcaggggagatcccgcgcgtctacggctttgtacagataatccagttgatcctgactgctgcattcgaggaagtgatggtttgtttcatataattctgccatctgttcggcaaacggacgatcctgacttggctggaatgtattggatttaaaatacgttttgttttccatgaaatcaaaagaaaaagtatttagtttttcccctgattttgccagatgtccggcgcagacggcagtgacgaggctgctgtctattccgccggaaagaaacgtgcagatgggaacgtctgaaagcatctgctttttgatggaatctgtgagaagccatctcgttttttcgattgtatcagaaggcgaatcagtgtggaggcagctgctaagtttccagtaaaactgtcttttgaaagaagtgtgactaatggaaatgtgttcgccggggagcacttcaagaatatttttaaatacaccttttccgtatgtttttgcaggacctaaggcgaatatttcattgaggctgttccggtcaagttcgggaacgatatcgggataggcaaataatcccttgatttcggaagaaaaaatagtagtctcgtctttttttgtataaaagagaggtttgacaccgagcctgtcgcggaacagatgaagcgtttgacaagattcatcccacagcgcgattgcaaagattccgtttaactttttaataaaagatggtccgcagcgcataaatccggcaaggattacttctgtatcgccggacgtcagaaactgttcaccttcagaaatcaattctgctttcagttccggggcattatatatttcaccgttatatgcaatgacacaactgtgatcgcctctgacgcgtctcatcggctgatgtccggtgactaagtcgatgatgttcagacgaacatgggcaagcccgcattgaggggagagaaacgtaccttcatcatccggcccacggtgcttttgaacttgattcatcatttctaaaatgtggtttctgtagttcttttcttttgtataatccgcagatgggttaaaaaatccggcgattccgcacatagaaaattctccttcttctattttttgacaatatcgcgtatgacaggctgaagctgccggttctcaagagcggcttccaaagccgggataagcagatcggtatgggcagtcattgaattcggctttttttcgggatcatcctgcccgaacggaacaaagtagatatttttcgtatttaaaagaagtccgatatttttcatattcataccgagggcgtcgtttgtcgataaagataaaagaagcggtttgttgttgcgtaaatgggcttttgccgccattaaagcaggtgtgtcggtgattccgtttgccagtttggcaagcgtatttccggtgcacggaaggatcacaagtgcgtcgaaaaggtttttcggaccgatcggctctgcttcggaaatagtcatcatcggtttatttcccgtaatttcttctgcacgcctataaaatgattcggcagaaccgaaacgggagtctgtggatgcggctgcggttgaaaagactgtctggacagagccacagcagtttgaaagtttttgcagttccagaaatgcttttttgtaagtgcagaacgagccggtaaaagcgactccgatctgcgtttcttttaaggacaaaggggattcctcctttcattttgcgcatgaattatgagagatacagttttgattcgataaattgttttaagtgacgggcagaagatgcgggagcatatttgccgggaagtcctaagcagtgcagagcagatatgccgagacgctgagccgcgtcataatcgacccctccgggggaagaggcaatatcaataataagagcagaaagatctacgttttttaaagtctcttcatttataaattgcgccggaacagtattaaaaatgaagcgaaaatctccggcgtgatcggaaagtgattttaaggggaaacttttgtcggcaataactgacgcgcgggcggattcttcggcgttatctgtaaaaacggaaacgtttgcggataatccctttaaacggtaaacaatagagtgaccgcattttccgaatccaagtactgcgcatctgcttttgtgcagattgaaaggactgtggaggatcgcttcgcagattgcgccttctgcagtcgagatactgttgtaaacaggaagcgatatatcgtctgcataatcaaaaacagcgacgttattttcggcggcttcttttttaaaagaaggagggatgcccccggcaaacaaagactgaccgggccgcagaagatgaagcagcgtctgaatagagaaacgatagatgctattttcaaccgaaacatccgcgccgtttttagtaaacggaaaagggcagatgacggacccggaatggatacaggcttcttcgagagaaggcgcttcgcgtactatggaaacatgttcggagacggagctgcagttgttcggctgagaggccaaagcgtaatgacaaagagaacggcccgattctgctaacatttctgcaagaaaaacctgacgcgcatcaccgcctaaaacagagaaatcatatgaaaatgaagacataaaaacaccgcttaagaaacatttttaattactatatgcgagtgagaaaaagatgtgagtataaataaccttgcttgtcgtatattttttcggaatattcccgggatgtcggcagtgctgtgtatatcagcatcctttttatagcggggcaaaaaatgataaaagagagtgatattaactatatcacaaaacgaatagaaaacaaatcacttttgttattgacatgaaatcaaataaagtagaagggaaggcaataagatgagcagaaaaaggaataaggtaatgaaaaacagctccggttgtcatgatattaataaagttataagattttttcttattccttttaaaaaatatgcgttatcatgttaatattaggagagagtaggagaggtgattgataatgtacaatatattagtatgtgacgatgacaaagaaatagtggaagcaatcgaaatttatctgacgcaggaaggatatcgtatactgaaggcgtatgacggtacggaagctcttgaaatgcttgaaagagaagaggttcatctgcttcttcttgatgtgatgatgccgaaacttgacgggattcgggcaactttgaaaatacgagagaaaaacagtattcccatcattatcctttccgcaaaatcggaagatgcggataagatactcggacttaatgtaggagcggacgattatgttacaaagccgtttagtcctttggaacttgttgcgcgagtgaaatctcagcttcgcaggtatacgcagcttggcggcacggctcagaatgaaaatgataaaatatattctgtcggcggccttaggattaatgacgatctgaaagaagtgacagtagatggggagttagtaagattgactccgatcgaatataatatcctccttcttcttatgaagaatcaggggcgcgttttttcgatcaatcagatatatgaaatgatctggaatgaggaagctatcggggctgacaatacggttgccgttcatatacggcatataagggagaagattgagattaatccaaaagagccgcggtatttgaaagttgtctggggagtcggatataagattgagaaggtgcagtagataagaaaaacaggtaaagagaggaatgtgaatgaaaggatggtacagaaggactgcgatgaaagcggtcgtcctgatcgtaggcgtgttaaccggagcgatgtttttcacatctcttatagtaacaacgcggctgaccggaacgctgaatccggcagagacggtaaagttaataggagagccatatgaagaatcttcggattttagcaatacagtagaaagctatatgcttcaggtgcttgaacagtttcagttaaaaacgctgtttgagtcagacggagcatacaatccggataaagtgatcgacgtaatgtcttattttggagcgtcgggagcagacgctgaaaatcattccggactggtatacagactgtcggatctgatagagtggagcaaggcatacagtgtagaatcaggcggtgtatatgataaaaacgcagtaatcgtctgcaaacagccaagcggaaaatactattattactatacggaagagtttctgaatcagcttgaaacaggagaacttcaactcgtattagaagatgatagaatggatgttgagtcatttttaaatgacttaagcaacggaacgcttacctcatccggagtgagtgataaaataagcatatatgatgcagaaggcagtaaattgtatacagactgttggaattacggggattcagtccgtgagaattatgcgcccttaggagcggctaatcttctccaagttgtaaatgaacgcccggagttaaacggaaagcttatggttatttatgatcatctggcatctgttcttacgagtataaatgataaatacagccgatataagagcgggtgggaacacctggaagagggaaacacaaactttacttatttatatatagatcaggatacaaaaaaagttacgacaaataaaagcgaatatgcaaatcttatggcaaaaggcgagtcgggaataaaaacgaacattgaagaatgcatagcggacatgaaatcaggaaaaaatgtgaaatacatttttgtttatccgaaattaaaagattttgaaacaaatatggatatattaccgacaaatgaatgggatatggtgcgctcttatgataccgacaagacgtatgacagtatttttgcggtggcagttgatacttcttatccggtcaaagatatgttctatgaaagagaccggatttatgaaaaaaatatcccgctgctaagaggcgggttcgtgatcttgtgtcttagcggaattttgttccttatcagttttgtcatgtcagggttgatggcaggaagaaaagatggagataacgaagttcatttaacaggctttgacagatggaaaacagagatcgcggcagttgccgtgatcggagtatgggcagtaggaacggcagttatcgtaggcatgggaatgatcgacagcgataatgtctacaatatggtagaaactcttgactattatggagcgcgctatatgagcgatatgccggaagtttattctatgctgtttgttcagaaagtaagttttttagagatagcgggtgcatttttatatggagcgtttacgtttatctgctttttcgcgggttatatgagtcttatccgcagaatgaaagcgaagagtttgtggaatggaagtctgctttgtatgattctttctttttgcaaaagaatagtcgattcgagtaatgacgtttggcggaccgttctttggatcagtgcatttttagtcatccactggattacgttttttgtcagaaatgtaccgatggcgctggcagctctggcagcagacggagtgacgttttggattgtcgtgggaagtatgcttgcaaaagtcaggatcaagaaagggatcgaacagatcgcatcaggcaatcttgagtatcggatcgaactaaaaggactgcggggaacggaacgcaatatcgccgagaatgtcaatgatatcggaagcggtctgaaccgcgcgattgatgaggcgatgcgaaacgaacgtttgaaaacggatttgatcacaaatgtatcgcatgacatcaagactccgcttacatcaattataaattatgtggatattttgaagcggtctgatattgccgatgaaaagatactagggtatcttgatattcttgaagtaaaagcgcagagacttaagacgctgacagaagacgttgtggaagcgtcgaaagtaagcagcggaaatattacgttagaatatatggatattgatttccgtgagatggtacagcagacggaaggggaaatggcagaaaaatttgccgcgcgaaacctgtcggttgtattgaaccttccggaagaagcggcggtgatacatgtagacggacgccgtatgtggagggtgcttgaaaatatcttcggcaatgcggcaaaatatgcaatgccggggacgagagtttatgcagatctttcggtatcggagtcggaagttaagttttctttgaaaaatgtatccgagcagcagttgaatatttcggcagatgagttgacagagcgattcatcagaggagatatttcccggagtacggaaggaagcggactcggtctttcaatcgccaaaagtctgactgaaatgcaaggaggagttttcgagttgtatcttgacggagatctgttcaaagtagacatcagatttccaaggataaagccgatgtaaaatatatattgattggattcgccccttccctttttaaggtaggtttttcaccttagggaaggggattgtgtatcctttttcttacgaagaaatagcagattacctgcagtatgatcgtgataagccatgatgcgggataagagataaacaaaacatccaatgatctgtggcgagggaagatcatgaagatccagacaatcctcgttccgactgttccgatgatagaaagaagcatcggaattgcagaatatcccattccgcgcaacgcgccgggaaagaggtccatcagtccgcacataaaataagttacggtagtatacaaaagtatttccattccgcattgaatgactttcggatctgaagtatagatttttaacagttccggtccgaagagatatgaacctccgcctaagattaatgaaacgacaacggacagcagaatacagttccgaagaactttgtccattcgtttccattttcccgcgccgtagttctggcttgtaaaactcatacatgcctgtgtgatcgagttggctgcggcgtacagaaatccgaagatattatttgcagctgtatagcccgccattgcgatagaaccaaaagagtttaccgaagattgaagaagtacgtttgagaagttgataaccgtactttgtatgcctgcgggaatacctacctgaaaaatttgttttaaatagatccacttgattgtcattgcggaaaatcgaagttgatagcttccgtccgagcgatatagacagcgaaggacaaggagacaggagatcatctgtgcgatcactgtggcgattgcaactcccgcgactccgaggtgtaatacgatcacgaggaagaggtttaaagctgcgtttacgattcccgcgatgataaggaaaaataaaggccgttttgtatctccgacggcacgcaggattgccgctccgtaattatagagcataaagaagggcattccggcgaaataaatccgcatataaagggcggactggccgatgacgtctgaaggagtgtccataagcagcagggctgcttttgaaaagaaaagtccgacaaagaccatgacgattccgctgatcaaagcgaaagtaactgcggtatgtactgtttcagacatctgcttttcctgttttgtcgcatagaaacgggcagccagtacgttcgctccgagggaaactccgataaaaagattcgtaaatacattgattagcgctgtcgtagagccgactgccgccagagcgcggcttcctgaaaatcttccgacaacgacgatatctactgcattgaaaagaagctggagaatactggagagcatgagcggaatggaaaatgaaatcagtttgtctaaaacagttccattgcacatgtctatttcatatttgttctttttcgattttgaagctgtcattttaaatcccctctttataaagtataagctttgttaaaaaactattacggtttcattacagattatattatgaatagaaaacgggaaattttcaagatgaagtttttaataacttttcgagaaattttcatgagtaaaacaatggaattagccacgataagcacgcagcgcggttttacgaatggcgcgggctgaagtgttattttgtaaatgcatttgtaaaagagaggtatttatccaacctttacattatttggtatgtatgctatcctttttaaagacaaaaccaactgaagattcagaggagatatttcttcggatcacagggggataaaggagagaaaactatgtcagagaaacagaaatattatattacgacggcgattgcctatacttccggcaagccgcatatcggaaacacatatgagatcgttttggcagatgcgattgcccgttataagagaagtcaggggtatgatgtattttttcagacaggaacagatgagcatggtcagaagatcgaactgaaagcagaagaagcgggcgtcacaccgaaagaatttgtagacggtgtttccgctgagatcaagaagatatgggatctgatggatacgtcctatgacaaattcattcgtacgacagacgaagaccatgagaagcaggtacagaagattttcaaaaagctgtatgatcagggcgatatttataaaggtcattacgaaggaatgtactgtacgccgtgcgagtctttctttacagagtcacagctcgtagacggaaaatgtcctgactgcggaagagaagtgcaaccggcgaaagaagaagcgtatttcttcaaaatgagtaagtatgcagaccgactgatcgagcatattaatacacatcctgaatttattcagcctgtttccagaaaaaatgagatgatgaacaacttccttcttccgggacttcaggatctgtgcgtatccagaacttcgtttaagtggggaattccggttgattttgacgataagcatgtcgtttatgtatggcttgacgcgctgacaaactatatcacgggaatcggttatgatgcagacggagacagcacggaacagtatgcaaaattgtggccggctgacttgcatttgatcggaaaagacattatccgtttccatacgatctactggccgatctttttaatggcgcttgggcttccgcttccgaagcaagtattcggtcatccgtggcttcttcagggagacgggaagatgagcaaatcaaaaggaaatgttctttatgcagacgagcttgttgatttcttcggggtagatgcagtacgttatttcgttcttcatgagatgccgtttgaaaatgacggagtgatcacatgggagcttatggtagaacgtttaaattccgatcttgccaatacattaggaaaccttgtaaaccgtacagtttctatgacaaataaatactttggcggcgttgtttccgataaaggagcggcggaggatgtcgatgcagatctgaaagcggtgatcgacaatacaccgaaagcggttgatgcgaaaatggacgggctgcgtgtggcggatgcgatcacagagatctttaatctgttcaaacgctgcaacaaatatatcgatgaaacgatgccgtgggcgttggcaaaagatgaagaaaagaaagatcgtctggaaacagttctttggaatctgatccagggaatctcagcaggagcgcgccttcttgaatccttcatgccgtctacaagcaaaaagattctggatcagctcggagacgggcatgtgacggagaaaccggagattcttttccaaagactggatctggaagaagtaatgaaaaaagtagaagaacttcatcctcatatagaagaagcagaggaagaggaagatgtgatcgatatcgaggcaaagccggagattacgtttgaacagtttggagcgatgcagttccaagtaggagagatcatcgcttgtgaggcagtgaaaaaatcaaaaaaactcctttgttctcaggtaaaggtaggaagtcaggtgaaacagatcgtttcaggtattaaagcacattatacaccggaagagatggtagggaaaaaagtgatggtacttgtgaacctgaagcctgcaaagctggcgggagtactcagtgaaggcatgcttctttgtgcagaagatgcagaaggcaatctggcgcttatgactcctgagaaagcaatgcctgcgggagcggagatctgctaataagaatagagaagaatagataagattagataagattagataagatcagagaaacatagagaaaaaatatctgttggctgaacacagacagttcatcccgcagatatttttttattctatagaaaattttgagttcttatgggataacatctttcgggaagatattgaagtgggattgtcactttgttcttacagagaaaagttaaaaaattttgttgtttttaatgcaacaaaatgcttatcaaggtactcttatatatgaaagcatatttaagtcagtgcgaaagagatgaaaggagggagcttatgtccgcaggaatagtggatatacagcgtcagcttattaaaaaagcgaagttgggagatacgaaagccttttcgcagttgtatgctgagatttataaagatctgtatcggtttgcgctttatatgacgaaacatacgcaggatgcagaagatgcggtcagtgaggcagtgatatctgcatatgaaaatatatccggactaaagaaagaaaattctttcaagagttggatgtttacgattctaaataatgagtgtaaaaagatattacggaaaaacggtaatacgtcgaatcaagtgagtgaagaggatgccaaaaacctcggagcagaggaaatagattttgcacagcgccatgatgtaaagaaggcgtttgaatcattagaggaagaggagcagacgatagttgcattttccgtattcggaggatacagaagcgaagaaatagccgagatgctggggaagaacccgggaacggtccgatcaaggaagagccgtgctttcggcaagatgcgtgaaatgctggactgaatggcaggcgttttgaagatggagaaaatagaagataataagaagaaaaaataacaaaaaccatcaaaataacgaaaggagattatctatgtcagagaataaaaaagaaacgaaaaatcaggatatgattgagaaagaaatgaaagagaagatgaagcaaactgttgaagatgaaaagatccccggttcgcttgagccggaagcggttgaaaagatgttggagacgagaaagaagaaaaagtcgaataatcgccgttggaaatatgcctcagtggcagcagcggcttgcgtttgtcttgtagtgggagcagtcggatatacgaatatgaacgcaggaaaaaatgaacggccgggaacggtaacagaaggcagatcagaagaagatcagggaaaaatcgcactggcaaaaaattatgatgaaattaaaaaatatttgaaagaaaatgagaaaagggcgaaagggcagaacggattcggcagagcagacgcggcctatatgacggacggggccatggcggaatcttctgtagccgaatcgacaaaagatatggcaggtgccgattattctgatacaaatatcagacaagagggagtcggcgaagcggacactgttaagactgacgggaagaatctttacattctaaatgatcagacagtagagattgtagatgtatctcaagcagagatgaaagatctggcaagtatcgagatagatgaaaattgttttataagagaggtttttgtttccgatgggcggcttgtgatattgtataccgaatcaaaatgtgaagaaggaaagaaagcagaagacggaatttataaagattatacatgcgcggcagtttatgatgtgaccgatccggcgaatccgagagaagcaggagtgatttctcagagcgggcagtatcatacaatgcgcgtgaaagacggatatgtttatttagtcagcgatttttacacatattatgattcgtcggtatcaaacgaaagcgattatatcccgcagatccagggaagtctgctccgcgcggaagatatatatatgccgcagggaacgaccggaagtcagcacacggttatttctgcatttgcgctttccgacccgactgagaaattacagacaaaggcgattttcggaaacgcgggaatgtgttatgtgagcgaaaataatatttatataacagaggagtattacggaaaaagcgagacagagaatatccagacttcgatccgtaagatcgcttatgataagggaactttagatgcggtaggacagacaaagatcgacggcgttttgaatgattcctttagtatcgatgaatataacggatatttgcgaattgcagcgacagtgattcccagtgattataacaaccggatcatgcctgttccgtatgtggaagaaggcggatcggatgttatagttgaagatgaagtggcagtggataatgcatctatagaaacaaatgcgttatatgtgttggatgaaaatctggaaatgaccggaagtattcagaatctggcgaaagaggaaacaatccattcagcgagatttatgggcgatatcggatattttgtgacatttaagcagatcgatccgctgttttccgtggacctttcagatccgtcaaatccaaagatcatcggagaattgaagataccgggattttcagattatctgcatccgtatggcgatggaaaactgcttggaatcggattgagcgtagatgaagagggcatgacgacagaaggtgtgaagctgtctatgtttgacataagtgatccggcaaatgtaaaggagatgtcaacctatgttttagagaatgtgcttagcacagacgcaggatataattataaggcggtatttgccgatgcagaaaagaatctgtttggatttatggcgtacggagattcgatcgaatataaaatgtttacttacgatgaagcggaaggttttaaagaagtattttcaaaagatattgttaattacggaaatgtccgaggattgtatatcggagaaacattttatcttgtagccggaaatacagtcgaatcatttacgttaaacggatttgaaaaaatagacgatcttgtcctgtaatagacgattggcagatggaatgaatttccaaagaaaattcagaatccgtaacggaacttagataaaaattttggggaaaaggcgctgatatcatattgacgtatcggcgtcttttttgaagccttaaaagcgaagcgaaaattaaacaaaatgaaagaaaatcaaatcccttgccgtaacgaagaagtatgaaagagtcatttttatacgacagcttaactgatattgtaaatataacaaaagcggaataaatataaaaattataaatcagtctgtcgaaaggggaagaagatatgaaaggatataatacggaaaagggttatatggggtatgtagaaggaacgtggatgctttttagctgcgaagcggattattatgaattcatagagtgaaaagccgtgaagtgagaagtcagagatggtttccgtagtggaaaacgcagaaatatgatattatatcattatgactaaagtacgggagcgttgtattatgccgaagggagcaaatcaaaagtttaagctgtaccgtctcgcacagatcatgtgtgaaaagacggatgaaacacattatctgacaatgccggagattcaaaaagagttggaaaagtatgatattatcgcagagagaagaagtctgtatgaatcgttgaaagatttagaagaattcggcattgaagtagaaggtgagcgcagcgggagaggataccgctatcatgtgataggcagacaatttgaactggctgaactgaaacttcttgttgatgcgatacagtcgtcaaaatttattacagagaagatgacgaaccggttgataggaaaactggaaactcttgtcagtcagcatgatgcggcggatcttcggcggcaggtgtttgtttcagggcggattaagacgatgaatgaaactgtttattacagcgtcgatacgatttataatgcaatttcacaaaacaaaaaaattaaatttcaatattatcagtggaatgtgaaaaaagaaccggagcttcgtcacggaggagcgtattaccatatcagcccgtgggggctgctatgggatcatgagaattattatctgatcggatatgattcccgggcagagcagatccggcattacagagtcgataaaatgcttcatattttgctgtcggaagagatacgggagggaaaggaggagtttcaaaagatcgacatggcgtcgtattcaaaaaagagttttggcatgttcgggggaaaagaacagtcggtaaaacttcttgttgaaaattcgctggcaggtgttattgtagatcgtttcgggaaagatgtgatgatgattccggcggatgccgatcatttcactgtgagtgtagacgttcaggtaagcagtcagttcataagctgggtatttgcgcttggcagtcaggcaaaaattgtcagcccgaagaatgttgtaaatcaggtgcgcaaggagattgagaaacttgcggagcagtatgcgcttcctatagaaaacagaagggagaattgaaacatggatgagaaactaaaacctttatttactccgtggcgtatcggaaactgcgagataaaaaaccgtatcgtattgacttctatgggaggaaccgatctgttcggatggatggagaaaaaccattttgacaaaatgggtgcgcgatttcttatggaggctgcaaaaaacaatgcgggtcttgtccttccggggtgtcagccggtatataatcctatgtttggacaatggctgtacaagaataaaaagatgtatgaagatctgaaagagtggatgccggagtttcataaaacaggagccaaactttttgttcagttgacagcgggtttcggccggtcgtttacgatcagcgagatgatggaaaaattatatacgaataaggcgctgcgcgttttatcaaagccgtttatggatctggataagattactgcgacggcaagcctgtctccgaaccgctggtcggataaagttccttcaagagagatgacaagagaagaaattcatgagtttgtggaagcgtttgcaaagtcggcgaaacttttgcaggatgcgggagttgacggagtggaaatacatgcggtacatgaaggatatcttcttgatcagtttacattaaaatatgtaaatcatagaacagatgaatatggaggatcttttgaaaacagatatcgctttgctgtagagatcgtgcaggcgattaaaaaagtatgtggtgaagattttcctgtatcgctaaggtacagtgttctttccaagacaaaaggattcagaaaaggcgctcttccgggagagcagtttacggaagtcggaagagatatggaagaatctgaaaaagcggtgaaatatttgcaagatgcaggttatgacatgctcaactgcgataatggtacatatgatgcgtggtattgggcgcatccgcctgtttatatgccggaaaattgtaatctggaagatgtagaacatattaaacagtttgttcggattccggttgtatgtgcggggagaatgaacccgaaaacagcggcagaatcgatcgccgcaggaagattggacggagcgggattcgcgaggcagtttttggcagatcaggaatgggtcacaaagatgatggaagatcgggaagaagagattcggccttgtattttatgccataacggatgttttaatatgtgccactataaaggagtgccaaacgatcaggaattaagtgacagcctgcatttgtcaaggtgtgcggttaatgcggaaacgatgcagtgggatcggcattttatagagaaaacaaagaatccaagaagagtctatattatcggcggaggaatcggagggatggaagctgccagagtgttaaagcttcgtgggcatgatccggttatttatgagaagaacaacgttcttggcggcacgttcatcccggcaagtgcagaatcttataaggggaaattaagagaacttttggcatggtacagaagacaaatgaaagaactggatgtggaggttcatttaggtaaggagattgacagcgttgaaaagttcggcgatgctccggtaataattgcaaccggttctgttccgcgcgtgatgaaaaatattccgggacatgaacggatgattgaggcatgcgactatctgaacggaagggatgtaggagaaagagttgtagtgatcggaggaggccttacgggaagcgagattgcctatgagcttgcgcttcagggaaagagaccggttattgttgagatgaaaaatgatcttgtggcgcagaaaggagtttgccttgccaatagttcctatttgagggaatggtttgagctgcacgaagttccggtatatctcgaaacaaagttaaaagaagtaaaagaacattcggtgatctgtacagataaaaccggaaaagagatagagattccttgtgactctgtgatcggatcagtcggttacctgcctaatccgctggaaagaaaaggaaagaatatttacctggtcggcgattgtgaacaggttggaaatttacggagcgtggtgtggggcgcttacgagactgcgatgaagatttgctgatatgacgatgcagaatgattgatagaacaagaatagtgagatattagaaaatgcagctttctcttgtgagggtaaagctgcattttaatctgaaaatagatttgtttaagcgaacaactgtaaaataatctgaatgatccaaaacagacaatacagaatcattccgacatttaagatgatcgttgagaaacgttttcctttcggaattgtgatctctccgggggcacatttgaatttcttaaagttgatcgcccaaaatatgatgcctgtaatgacaagaccgaaaagaagcagcatgtaaaaacaaatcaaaagaaactgaaccggatgctgcataacgagtccgacgatggctgacgggttattttccgctaacagagaaagctgattgaaaaatgttgatttcattaaaagcagtcccggaatcgagcctaaaaagttgactgtcatatgcagggcaaccgtgtagatcaagcgcccggtttttacataaatgaatccccagaacacaccgagtgtaaatgcgtatacaaattgattaaaattaccgtggaataacgcaaacatcaatcctgacagaaggatagccgttgcctgtccgtactgtactgtccggtcgatgatgagttttcggaaaacatattcttcgacgatgggagcgcagatcaccataaggaaaaatgctgtgagcggagacagtccggtaagaatgtcctggatcgggttgtctacgagatctccttttagtgttccgaagatagctgtcgtaaatgtgcctattacattcgtaacatacataagcgcatagcacataaaaaaggcgataatccattgccctgccgtcattttcttcttgtggatgaccatgccggggatcgtgcgtacgatgatgaccaaaagcggcattgcaataagatacatcgaaagcgatgagatgatcagggaaatattcggattcaccataagctggggtgcgatcaactgaatcaatgtaatgacagaaatctgcactcccgaaattatgatcgctccacagaaataaaaaagtccgatcttggaaaaatgactcttgtgtttttttaacggatcggacggagccgggatgataagttcagtgttttccatatgaaataacctcctcttgcgtaagattaaaaatcaataaaaaattttacgtctattatcccattttgcgaagcaaaaatcaataaaaacagaacttatatttgcagccggtgagatgctaaggcagcaaggtgttaattttagaaatcgatgttataaggaatattttcaaaatatgaagaggtaaaaattatttgcgcccgaaaaaggagggggtaaataaagtttgctggactttgcagagtggagagataaaataaaataaaaaggaggtaagcggtatgaaaataggagaaacaattttaaaattacgagaagaaaaaaagatgtctcaagaagagtttgcacaatattatcatgtgacgaggcaaactatttcaaactgggaaaaggaaaagaattatccggatttacaaacattagtaaagattagtgacgaatcaggagttccgttggattctatgcttaaggataacttctctatggtacaagaaatcgataaaaaagtaagacacttaaaaatatttaaaataggaacaatagtagtattggcgatagttattttagtttcagcttatataggaattcaaaacggcaagcaggaccatcttgtgcggacatatgaagataagttggaggaacttggatttgagcaagaaggtaataattattgcctcacagattccgattttaagtatgatatttatatgtttgacagaccttctatatggaaatggaatcaggaaatgagtgacagagagaaatttatcgtagccacacttctcgtaaagaatagcgatttggaagaaaatccgggtattacaattcggaaaacaggcgattttataacactttatatttcaagagaaaaccatttggcagacgacggttctacaaaaccaaaagagtatagtcttgatagaaacggtcagataaaacataaagaaaaaatggaagcagatgattatgaagtatatgctaaactgaaagaggagatagagaatggagtgaaaaaactcaatgaaatgtattcaaacatttatgaataaaaatatttgtataatgattgcaaggtcgaataatagggtgttgaatgcttgacacccttcttttgattaatctaaactataagaaagtgttgcggagttgtggtgtacggttgcaaaaatccgattgaactaatattttgtagctataatatgggcatgcaaatacttgcataacaagtataataaatgtgtggtgttttttagaacaggttcttgtaccgaaattcggtacaagaaagaataggatgagaagcagacagcatctcaaccggatgcttctgcttctacacagaaaaataacgcttcccaaacaacaggggaatctaatggagggaactcaggaaacggcggaactcaaaatacagctccggtacatactcatgattatagtattccgatctatacaggagaatgggtagtcgatcaggaagcttggacagaaactgtcaatgaaccagtatatgaaatggtagaacatacaatttgtagcacatgtcaagctgatatctcaggagttgcaggacaacatttagacgagacaatgcatgcgggatattactcgggctggagaaaagagcaaacaggaacaaaaacgtatacagttaatcatccagaacaagggcattacgaatcgattgtgaccggatataatgtagctgtggagcagttcaatgaaatggaagtttataaccatatcacagactggttcaggatcgaaaagagattgcgaagagggatttggttcagattatgtgacggctcagatttctttaagaatgattacagaactactcgctatggacctcatgacctgcattcattcggtcgcggctatcgccttataagcgaaaaaaatgatctccacttatgagatcaaactctcaacgggagctcatttttcgcttgcatggcttgtagttttagcgcaaatggtgtcaaattggtgtcaaaacagaaaaaatcacaatttcaaaagaaataagatactgcaaaccattgattttaaagggtttgcaaaaaaatagcaaaaatattagcactcaacccttgacagtgctaataacgggtgctatattacagatataacaaagaaaacaataaattcaaaagtgttttgaaaggagatatgacttatgttgatgcctagtatttttggagagaatttgtttgacgatgattggatggatttcccgtttgagagatttgacagagatttctggggaaagaaaaatccgctgtatggtaagaatgccaaaaacatgatgaagacagatattcgtgagcatgaagcgggatatgagttggatattgatcttccgggatttaaaaaggacgagattaccgtggatcttgaaaatggttatctgaccatctcggcggcgaaaggacttgacaaggacgaggaagataagaagggaaaatacattcggaaagagcgttatgcaggtacaatgcagaggagtttttatgtaggcgatgcgatcactcacgaagatattaaagcaaaatttgaaaacggtattttgagcctgacaattccgaaaaaggatgcgaaagcagtagagactaagaaatccattgcgattgaaggataaattcatttcttttgacaagtttttgacggtagtgaacgggaacggcgagtgtgctgttcccgttcactgccgtttttacatgcaagagcggatgtaaggatattgcaggaataaaatcgagaaaaagttttagaaaaatcacttttcgcggtttttatatctgtgagaaagtgataatatataacctgaaatcttagggagagggttatatgagttatgaaaaaagaaaatgattttggcagggattctattcctttgcttgtattaaaaatttcaattccgtttatgttcgcgcaatttgttaatgtgctgtacagtattgtggatagaatctatataggaaatattccggtgatcggggctgactcgctggcaggcgcgggggtatgtgctccgatcattacattgttgtcatcgttcggaacgctgatcggtatcgggggttccgtcttgttttcggtacgtctcggggcgggagatgaaaaaagcgctaagcagatactggcaaacagtttttctatgctgcttattttttcgggaatattgacgattgtatttttacttacgaaagattatttactgagatggtttggggcaagcgcagatatatttccgtatgccaatacttatatgactatttacacgcttggaacttttttcgctcttttgtcaatggggatgaattattttattacggcacagggatatccggggcttggaatgctgacgacactgatcggagcaatcgtaaatatcgtgcttgatccggtatttattttcggacttgaaatggatattgcgggggcggcagtggctacggtgattgcacagatgtcatcatgcatctttgttctttatacattgaagagaaagaagatgcgtattccgctgacgctggtgaagcctgagcgggagattggaaaacgaatcgtgaagatcggtttctctccgtttttgattctggcatcagacagtgtgatcatcattgcgctgaatgctgttttgcagtattacggcggagcagactacggggatacgttgatcacggcggctacgatcgtgcaaagctatatgcttttgatcacggcgccgatgcttggcgtgacaggagggtcgcagccgcttattagttataattatggagcaaacagagcggatcgtattcggaaaacagtgctctgggtgttgatgctctgtgttttctttacggcggtgatgtttattatttcaagagtggctccgcagtattttgttcgtatttttacggataatgcagagtaccgggaactgtccgtgtgggggatcaaagtgtttactctgatggttgttccgttaagtctgcagtatgtttttgttgatgcgcttactgctcttggcatgacgaagttgtctcttgggatgtctgttgtaagaaaagttttttacttttcatcaacatgttttctcccggcgttgtttacggcgaaagatgctttttatgcggagccggtggcggatatactggcggcatcggtgacaagcgttgtttttttctttgtatataggaaatatctgaaaggcagcggaagacttggggaaatcaaactgtagaaacgactgtgacggttatggaaaaacgactgtgcaggttagggcgatttgtgttgtaaaatgcggggaaaaactttataatagatagaatagcaagtaaccgcacacagatgtccgtcggtaaaaacatgcaagcatgttttatgctctacgtacactgtatggctgaactattgtatatagattggagatatgaagatatgatcaaagtgatagcgagcgatatggatggaacgcttctttgtgatgaccacagaatcgctccggatacgatcgcggcagtaaaggaagcgtgtgcggcaggcatccggtttatggtggcgacaggcagaggttatgaaggcgctatggcagagcttgacggaacaggaattgtttgtgattatatattgggaagcggagcggaagtcagagatccgcagagaaaaattgtaaaagaatgcggcatcggaatggagttgtgcagagagatctgcgaagaggtgaaagaatttccgatatcgatcgtatttcttacaaatgaaggcgattaccgtatcggaacggaaaaagaagtcgaagaaagtattatagcggagatgcagctttttcatgtaaatatgacccgggaagaggtcgtgaaaacaagcgaatatcgcagggcgatagaaagtgtaaaggttgtttctgattttgaagagattgagaaagcgggtatcccggtgtttaaactatttatgttttcacatgatcttgagttagtccgcagggtgacaaaacatcttgaaaaaaatcctaaaatcgcagtcgcttcatcatttgaatcaaatgtggagatcacggatgcaagagcgcagaaaggtccgatattgaaggaatatatcgagtcgcttggatatactatggatgaggttatggttctcggagacagtttgaatgattattcgatgatgtcaatggatttcggagcgacggtagcgatgggaaatgcggtttcggaattgaaaaaagcggcaaaatatattacgaagtcaaatgatgagcttggtgttgcgtatgccattcgggaactgttaaaaaagcagaaaaataaataaaaagggaaattggttcaagtatgagattgagaagtaaatttgctgtgaaatgcgcgaaagcgacgagcagtctgatcaaaaagttaaaccgtggaagcggggtgacgcttccgggatatgtggcgcgtctgatcgatccgaatatactgaaggaattatcgggtcaggttagaaaaaagacgatcgtcacaatgggaacaaacggaaagacaacgacgaacgcgattttatgtaaggcgttagagcatgaaggtcagaaagtgattattaaccgtacgggcgctaatatgttaaacggaattatttcggcgtttgttcttgcaacagacaagcatggcaatctggatgcggattatgcatgcatagaagtagatgagatcgcatctgtaggggtgctgccgaaaatagagccagactgtgcgctgctgacaaatatttcgcgagatcagcttgatcgcttcggtgaagttgatattacttataataaattgatgacagcggtgacaagcgttccgaagacaacgcttattataaattgtgatgacattttatcttactctttggcgcaggaaagcaaaaatgcatttgtcacatatggtatcagcgagcagatatttgacgatgtttcacgatctgaaatacgggagagcattttttgccgcaaatgcggaaagaaactggaatatcagtttttccattatggtcagttagggttgtatcattgtccgaactgcggatggaacagaccaaatccggaatatacggctgaacatgtcgtaagagaagatgaattgtattcatttgatatggacggaatccactttgatccgcagataaggacaccttataatatttacaatactctgtcggcgtatgcggctcttaaaacgatgggagcgggatatgaacattttaaagagatgatagaggcgtttgattatggaaataacagagaaagtatttttaatataaacggtgcaagagtgcagctccaccttgcgaaaaatccgatcggttttcagcagaaagtatcgcatgtactcagagatccgaatccgaaagatattatcattcagatcaatgatacgtatcaggatggggaagacgtatcatggctttgggatgtggattttcagtatcttgcggaaagtaacgcaagaaagattattacggcgggaacaaggaagtatgatatggcgcttcggttgaaatacgaagatgtttcttgcgaatctacagacgatatgcgtgcatcggtgcttgagtgtgtagagcagggcacgaaaaatctttatgttatcgtgaactactccggattgtatcagacgaaccatatgctgactgaattagaggggaaaggaggtacggaacgatgaagaaacttacaatcggacatttatatccggatctcttaaacttatacggtgacagaggaaatatacagtgttttcggaaacgtcttgaatggcgggggatggaggcagaggtgattccgtttctatcaggtgaaaaaattgatttttctaagttggatatcgtgctcttaggcggcggatctgacagagagcaggaacttgtatgcggtttcctaaaagacatcaaagatgattttaaagcatatgttgaagacgggggagttgtcctcgctgtgtgcgggggatatcagcttctcgggaaatattacaagacaaataaaaagacgatagaaggtctttcgattcttgatataacgacagaatggcagccggagagactgatcagaaatatcgtgttgaacagtccgctttttgaacagcctgtagtcggatttgaaaatcatggaggaaggacatatatcggtgatcacactccgttcgggaaagtgttttacggcttgggaaatacaggaaaatcaggttatgaaggcgttatatataaaaatgtgatcgcaacatatttgcacggacctcttcttccgaaaaatccgcaggtatgtgattatcttcttgaaaaagcgcttcaaagaaaatacggtgaagaagtgaagcttgagccgctgaaagacgagacggaaaagaaagcaaacagttatattgccgacaggtacagcgataaaaaatatgtgcttcgggaaacggtaaaaagacatacctgatccggctgcagagagtgtgacagaaagacagattttccggcaggtggaagttctggcgggaacactacgcttgttgctgtaaatataaaataaaagaaaggaagtatttcttatggatgtaagacggatgagaaatgaagcgcttggcaaacgtgttgtgaaagcgcttgaatcaagaaatatggaagcttattatgcatcaacgaaagaagaagctgttcaaaaagcgctggagctgatggaggagggaagctcggttacaatgggcggctcgatgtcggttcgggaatcgggacttcttgatgcgatcaatgcgggaaattatgagttttatgacagggatcaggcggcgacacccgaagaacgtcaggagattgcattgaaagcgtttacatgcgactggtacctcggaagtgtcaatgctatgagtgagaacggagtatttgttaatattgacggaaatgcgaaccgtgtggcggcatatgcgttcggaccgaaaaacgtactgcttatcgtaggaatgaataaagtggtgaagtcagaagaagatgcggtgcaaagggcgagaaacgaagctgcgccgatcaattcacagagattcggacttgagactccatgcgtaaaaaacggaagctgttttgactgcaagagttcagactgcatctgctgtcaggtcttggtcacaagattcagcagaattccgaagcggtttaaaataattcttgtagacgatgttttgggattttaggagaggaaattacctatggacagaaatgaaagaaatacaatggatcaaaacgcgcgaaaacgtacggtgcgaagagaagggaatgctgagggaagcgcgcgggcaaatgaaggtctgggaagaagaccgtcgggaaacggcgctcccgcctcagcaggaagaccgtcaggaaaaagcagttcggcatctgtacgaagaacatcggaaagcggcgatccgaccagaagaacaacgccgggcggaacggttactccgatgagacgagagtcgggaagtgtgaggaaaccgtctgaacaggcagggcgtgcgcaaggaagtctgcgaaaggaacattctgaaacaggaagaacgcgggatgcagcgggagcgccgacagatccgtccttaagaagagcgtcagggaaagcgggaacgccgacagatccgtccgcaagaagagcagcggggaaaacgggaacaccgacagatccgtccgcaagaagagcagcggggaaaacgggaacaccgacagatccgtccgcaagaagaacggcagggaaagcgggagcgccgacagatccgtccgcaagaagaacggcagggaaagcgggaacgccgacagatccgtccgcaagaagaacagcggggaaagcgggaacgccggcagatccgtccttaagaagagcggcgggaaaggctcagggaaatcctgcagaacagaagccggtcagatcggcagatggaattgtcagaaagcaaggcggtcatccgaacggaaaatcaaaggcgatgtcaaaaaagaaaaagaaacaaaaacgggcagcatttaattttgcttccggaggagtgcttattatagcggcgtgcgtgtttattttttcgttgtatcagcttatcacgatgctgattccgtattactccggcggggaagagtacgataagattaaaaacattgccattacggcggatgaagaagggaaaggttttactgttgattttgacgctttgctgaaagaaaacgaagacacggttgcatggattcgctttgatgagccggcggtgatcaattatcccgttgtaaagagcgcggataataatgagtatctgacaaagacgtttacggcaaatgacaataagcttggtgcgatttttgtagatatgagaaacagtaatgatttttcagacaaaaacacgtttatctacggtcatcatcttaacgtcggaggagaaatgttttcggagcttcttaaatacgaaaatgaatctttctgtaagaagcatccaaacttctacatatatacaccggatggaaaggttagaacatataaggtgttctcagctggagttgtgaaagatacggcggataattataagcttgattatgctacggatgcggattatgaggcgtatttgaagctttgcgaggaatcctcgaattataaggtagaagacgtggaattgacggcgcagtcgcagattgtcagtctgtcaacgtgtacaaatgtccgcgatgacgaacgttttcttgtacagggagttctgactgcggtagattgatgacgaagaaaggaaattatatggcagacagatttgatataggcgatatcattacgatgaagaagcctcatccgtgcgggagcaaggagtgggaagtgcttcgggtcggagctgatttcagattgaagtgcgtaggctgcggacatcagatcatggttgcccgcaaattagtcgaaaaaaacacgagacaaatcgtaaaaaggacttgaaactaaaaaagacttatggtatcatcaataattgtgacatactgtcggattgaaaccgatatgtatcataattccttgttcctgtaatgaaaacaggagccagagaccataaggaggtataagaacatgaataagtatgaattagctgttgttgtgagcgcaaaactcgaagacgaagcaagagcgaacgtaatcgagaaagtgaaagctcttatcacacgtttcggcggtaacgtaacagacgtggatgagtggggcaaaagaagattcgcttatgaaatccagaaaatgacagaaggattttactacttcgtacacttcgaagctgaaagtacagttccgggagaagtggagcagcgtatccgcatcatggacaacgtactcagatatttatgcgtgaaacaggaagcataagcggaaagaggtatatatgaataaggcagttttagtgggacggttgactagagatcctgaagtcagatattcacagggagataatacaacggcagttgcaagatatacagttgccgttgaccgtagatttaaaagagacggcgaaccgacagcggattttattccgtgcgttgtattcggccgctcggcagagtttgcggaaaaatattttcgtcagggcatgcgggtttctgtttccggtcgtattcagacaggaagctacacgaataaagacggtatgaaagtatacacaacagaagtgatcgtggaagagcaggagttcgcagagagcagagcagagagcgaagccaacagaggtatgtatcagcagtctgcaccgagtccggcgccgagcgctccggcaggagacggatttatgaatatcccggatggtattgatgaggagctgccgttcaattaggaaaggagaatcatcatggcttacgaaaagggaagcagaccggaaggcggatttaagagaagaggtccggctcgcagaagaaaaaaagtctgcgtattctgtggaaaagaaaataacgagatcaattacaaggatgtagcaaaattaaagaaatatgtttctgaaagaggaaaaattcttccgagaagaatcacaggaaactgtgcaaaacatcagagagctcttacagtagcaatcaaaagagcaagacatatcgctttgatgccatacgttcaggactaatcaagaatataaggctgattcttaggggaaactctttgagtcagccttttttgatactgatatgatactattcgtaatgatataacctttcgagtttttccgcaacttctgaatgcttagaggggaaaagatgggagtatacgtttagtgtggttgacacgttctcgtgtcccaggcgttcagataccaaaatagcagaaaaaccacgttcaatcaatagcgaggcgtgagaaatgccggagatcgtgaacgcggatctgtttcactccggcttttttgaaaatgatcgaagataattgacatattttatttaattaactataatatatttaacaagggagccgatagctagtgcacacctagccgccggcaaaataaaacctataaagatagcgccttagtttaccagacaggggcgctattttttgtgtctaaaaatcgtaacaacaagggttatgactgcacaaagcataattacaaacgtgaacaagtcagagtatgtaaccatattaccagctcctttcaatgtgtccggcaactggtatagcacctcatcggctccctgggtaagtatattattgtcaatgtacggtttcgctcatttttgagcaggttgcactgcacgattttgtgtaatggctattcggcttctcccaattctgggaaaactcatttaccggcgtactttaaggtacggtggttattttgtatacttttctaaatgggtaagttcttctactctttttgcggcctctttctttccggtttcatttagttttttacaattttccaatacagtccgttcttcttctgtgtctggtacaagatgagtcagaccatattccgagagtttctcttttaattcatccctagatataatttttccggcaagcaaacggtttaccggaatatctaaggcatcggctattttttgaagcgtttctattttagggttttgattaccggactcatattttcttatatttgagtcagcgataccacataattcgccgagtttcttctgtgtcagtcctttttcggtgcggtattttcgtatcatatcgcctgtataggttggcatatctattcacctcttttcatttaaaaacagaatgccatatttgactcgaaatgtacagagtgaaaacaatctaaaaaagaagtttacagattgaaaaacatctgaaaacaatctgaaaagtgaggtgatataaagatgaaacttgacagacaaaagtatgagcttgcgagagcaagggcgtgcatgggacaaaaggatctcgtagcagctggaatcccgaaaggaacattgccgtggatcagctcccggataggttacctgctgtcattcgcttaagatatgagagcgggttgacctatctgctgggcgaagttccaggctttccggtgataccaaaatgatactagaaaaatgtaaagagtggaaaatctgcacaatttcaaggcaaaacaccgctaaaaacagcgaataatcatgcatgtaactggtaaaaagtacatagccgatgccgtacgttcaggactaatcaagaatataaggctgattcttaggggaaactctttgagtcagccttttttgtaacagtcaattactttttggggaagtcgcctgggattttccttttctatttataatatagcgtataggtagggaattaaggtttttgatactaaaataataggtgattgcaataatttgaagaaaaaagtatagtagaataaaattcaaaaagatgttataataagacattgtagcgaaacaaagttttttggtaatctaatgatgcacattgcatgtgtcctaaagggtgcggatgaggtagtatcactatgaaaaagaagaaaatgcgcttaaaaggaaaactcaggctgtatatgaactggccgcttatcatgacgtttttactcgttgcgatgaatatatgggttttaatggtagaccggaaagcagcgtttatcatgtttatgtttatcctgatttatctggcgattgcgggaggattgtatttttataacagatcgcttattttagcggatttgattcaattttccacgcagtataaggggattgaaaatacgctgttaaaggaacttgcggttccttatgcgatcgctcttgaggatggacgtattctttggaaaaatgatgcgttttcaaaattaacgcaaagttcaagaaaagaaaaatatctgtacaggatgataccggctcttacgacaagtgtttttcctaaagacgacatggaacatgttgagatggaggtggagtactgtgacagacactatcaggcagaattgcgcagagtatcgcttcacggcttcagcgacaaggaaaaattgttacagattcccgaggaagaggagtttttcgtagcggtatccatgcaggatgtaacagaattgaatgcgtatatccgcgaaaatgaagagcagcggatgatcgcagggctgatctacatcgataattacgacgaggtgatggagagcgttgaagaggtacgacagtcgcttctggttgctctgatcgatcgaaagatcaataaatatatcggcgatgtggacggtattgtaaagaaaatggagaaggacaaatattttattgttcttcgcaaatctgcttacaaaaaaatagcggaagaccgtttttcgcttcttgaagaagtaaagcaggttaatatcggaaatgcccgctcggcaacgttaagtatcggacttggtctgaatacggcgacatatgcgcttagttaccagtatgcgcgtgtggcgatcgaccttgcccttgcgcgcggaggcgaccaggcggtgataaaagactgcagcggaatcacttattttggcggtaagaaagaacagactgctaaaaacacccgtgtaaaagcccgtgtaaaagcagaggctttaagagagtttatcgtgacgaaagacagagttcttgtcatgggtcataagattgcggatccggattcgttcggcgcttgtatgggaatttacagagcggcggtcagccttgagaagaaagctcatattatcgtgaatacggtgacagagtcggttcggccgctttataatgagattgtggaaagtccggcgtatgaggatgatatctttctgacttcagatgaagctatggattatattacggataatacgatggtgatcgtagtcgatacaaataagccgcagatgacagaatgtcccgaacttttgaggcgttccagaatgactgccgttttagatcatcaccgtcagagcagtacggtaatcgcaaatgcagtcttatcttatgtagaaccgtattcttcatctacatgtgaaatggtagccgaagtgcttcaatatatctctgacagtatcaaaatcccggctgtcgaggcggagtgcatgtacgcgggaattatgatcgacacaaggaactttatgaacaggacgggagtgcgtacgtttgaagcggcggcattccttcgccgctgcggtgcggatatcacccgggtaagaaagatgttcagggacgatatggaatcatacagagcgaaagcagaggcgatgagggaggctgaggtttataagaatcagtttgcgatcgcagtctgcccgggcgatattgaaagtccgacggttcttgcggcgcagaccgcaaacgagcttcttgatatcagtgggatcaacgcgtcgtttgtattgacggtttatcaggaaaagatttatatgagtgcgcgttcgatcgacgaggtaaatgtgcagattattgccgaaaagctgggaggcggaggtcatattaattctgcgggagcgcagtttgaccatacgaatatggaagaggcgatcagcacattgaaagaaacgatagacgatatgattgagaaaggagatatatagatgaaagttattttattggaaaatgtaaaatctctcgggaaaaaaggggagatcgttaatgtgaacgacggatacgcaaggaattttatcttgccgaaaaaactgggcgtggaagcaacgggaaaaaatctgaatgatctgaaacttcagaaaaataacgagaaaaaagtggctcaggaaaatcttgacgctgcgaaagaacttgcagcggaattatcggcaggcaaagtcgagcttgcgatcaaagtcggcgaaggcggaagaacgttcggttctgtttccagcaaagaaatcgcggtagcggtcaaagatcagatgcagttagatattgataagaaaaaaatccagttgaaagagtcgatcaagtcgcttggtacgcatatcgtgacagtaaaacttcatcctgaagtttcggcagagttgaaagttgttgtaaaagaagaagcataaggagttctcatggaaaatatagaagctgccatgaagcggataccgccccatagtacagaagccgagcaggctgtacttggggcgatgctgatgaataaagatgcgattacggtcacatcggagattttggccggacaggatttttatcagacggcatatgggatcttattcgacgctatgacagatctgtttaaatcggggcgtccggtagatttgatcacgcttcaggaatatttaaaaacaaaagacgtgcctccggaagtaagcagtatggaatttgcaagagatcttctcgtaggaactcagacatctgccaacgtaaaatattatgcggaaatcgtaaaagaaaaatcggttttacgcagtttgatcaaacttaacgaagagacggcgaatgcgtgttatcttgaaaacgagcctcttgatgaactgcttgaacgaacagagaagcgagtgtttgaacttgcggaaaacgggaattcccaggaatacgttccgataaagcaggtcgtattaaacgcgctggatgtgatcgaaaaggcgtctaagacgaaaggaaatgtcaccggaataccgacagggttcatcgaccttgattacaaactgtccggtctgcaaagatcagaccttgttcttatagcggcgcgtccgtctatgggaaaaacggcgttcgtgctcaatattgcgcagcatgtagcgtttcggcaaaatcttgcggtagcgatcttcagtcttgagatgtcaaaggaacagcttgtaaaccgtctgttttcactggaatcgcatgttgacgcacaggtgctgagaaacggaaacctgacagatacggattgggagaaactgatcgagggagcaggcacgatcggaagctctcgtatgatcatagacgatacgtcgggtatcagtatttcggagatgcgctcaaaatgtcgtaaatacaaattggagcagggacttgatctgatcatcatcgactatttgcagttgatgagcggaagcggcggacgtaaaaatgaaagccgccagcaggaaatttcggagatttcacgatcgttgaaaggacttgccagagaattgaacgtaccggtgatcgcattgtctcagttgagccgtgcggttgagcagagaacggataaaagaccgatgctttccgaccttcgtgaatcgggagcaatcgagcaggatgccgacgtatgtatgtttatttaccgtgatgattattataatccggatacggaggataagaatattgcggagatcattatcgcaaaacagaggaacggtcccatcggaaccgtccgtcttgcgtggatgccgcagtatacccgtttcggaaatgaactgcgtcagcagcagtgattatgtaaatatgctttttaatttcatgatcgcgcctgatttagaggattcttttcgcgcggtctgctgtctgcggatgagcatgtccagtttgcggaaatgttcttcctgacggcgttcttttgcctcaagtataaaatccatttcatgaatgacgtcagtggtgatcgtactgctgatgtcattttttaatatggagttgttttcattcagcgcttcgcggaaaacatcgcctacgagagcacgcatttgatcgatcgtattaagaggaagaagaatatctcctgtttctgaagtgactgtctgaagttgagttttttctttttcgggagtttttaacttagattttttttcttttaattcgggaatgagtggttttaagtcttttaagagcattccttcgtttttgagttttttgatacagcagaagagctgaatgtcatctttggtgtagtatcgatgtcccatttccgttcgcccgatcgtcaggtcgagttcttcttcccaatatcttaatacatgtgattcgacattgacctgttttgcggcttcggaaatcataaatctgacttcacccattaatatgtgaacctcctcattttgcttttgaggttattatagcatagaccatgacttcagaacgaaaaaatcgttcgtcaagttcctacaaaaaaacaccgctccacataggagcggtgcttctcttttgtgatcactttgcgatttatattactcagctgagatagcgcctgtcggacacgcagcttcacaagctccgcagtctacacaagcatcagcgtcgatctcgtatttgccatcgccttcagagatagcgcctacaggacattcagcttcgcaagaaccacagcttacgcattcatcactaataacgtgtgccatagtatgtatcctccttttttgaatttaaaaagagaaacaaagaaaggtagttctctttattatcactattttaatacaatgagtttgaatatacaagtgatttgtatgttctaaattaagaacctaaacccggtcgaattcttctgtgatctcttttgaaggtgcttttgtgagcaggcttacaatgacgatcataaggcatgatacgctgaaagccgggagcagctcataaatgttccatacaccgccgagaggacgtacgaggtatttccagatgaataccatagctccgcctgaaatcattccggcaagtgcgccctgccagtttgagcgtctccagaagagggcaaataatacgacaggaccgaatacggcgccaaaacctgcccatgcaaaggaaacgatgccgaataccgaactgttcggatcacgggcaataaaagcggcgattaccgcgatggcaagcaaggtgaagcgagctgcgttcattgcttttttcttgtctcccgttttggcaactctgtcgccgaaaaggtcggaagatacggcggaggatgcagccaaaagctgtgagtctgccgtggacattgtagaggcaagaatgccggcaaggatcgttcccgcaagtaaggcaggaagaataccgtgtttacttaacaagtcggcgatctgcacaatgatcgtttcagaatcggaacctgtcagagtttttaaagcgcctacatcgctcattgccagaccgatcacaccgatcaaaaccgcaactgcaagggaaatgacaacccagattgtcgcaacgcgtctggagagcgtgagtttttcttcgtcctcgatagccatgaagcgaagcaggatatgaggcataccgaagtaaccgagcccccatgcgatcatggaaataatattgatgatcggataaggctgttcgacacctgcaacaggatcgtatgtagtcatcatcgtcaaatatcccggaagcgactgtgcgttctcaactacggcagggatacctccggcaatattgatgccgaatataaagacgatgatcagggcaacagacatgataatactctgaatgaagtctgttgttgaggcggcaagaaatccgccaagcgccgtataccctacgatgacgatcgcacttatgatcatagcggcaacataattaaccccgaacaggctggaaaacagttttccgcatgcggcgaatccggaggctgtgtacggtatgaaaaatataacgataaaaatcgctccgatagattgaaggatcttacgctgatctctgtatcggttactgaaaaaagaaggaagcgtgatcgaattgccggctacgagagtgtagcggcggatccgttttgctacgatcctccagtttatgtacgttccgatggcgagtccgatggcagtccatccggcgtcggcaatacctgtcagataggccagaccgggaagccccatcagaagccagctgctcatatcggaggcttcggcgctcattgccgtcacaagaggtccgagcttacgccctccaagataaaaatcggtcgtatcatggttgttcttggaacaacggtagccgacatagagcatggcgccaagataaacaataatggcgatcataatacaaatgtgttctgttgtcatgtttgtcactcattcctttcgcaaaatgtgcaatatattgtaaaattgtaccataataaggggatttcttcaagaaataaaagtttagtaaaaattcacatttattttgtatgatatggtgtattataaaaggataaaagcggagggataaattataatgaagagaaaaattacagcagcggcggcatttgcattgtgtgtggcaatgggagtctgcgcatgcagtccgtctgaaaaggaagatacatttacgggaaaggaaaaggaagagcttgcgtggcagccgaatcttgaccggatttcccctgaagtatatgcagatatcagtaatcttgacctgaagccggggacgtatatatcagtcatcggaaagagagagggaacggcttactggagcgaagtgcaggccggagttgagcaggcggcggaagacattaataagcatctgggatataaaggggaggacaagataaaagttctttataacgctccggcagacagtgagaatattgacgaacaggtgaatatccttgacgaggagctggcgcgatatccggatgtgatcgctgttgcaagcgtagcggaagatgcgtcggctgttcagttcgatcttgcggcagaaaacggaattgcagtcgtggcatttgattcgaggaacaattatcagggaattcagtgcacctgcatgacggataatgtggcggcggcaaaagaaggggctcggaaaatgagcgaggcgatcgaagaaaaaggagagattctgttgatcgcacaggattctgtttcgggaacggcaaaagagcgaacaaaggcagtgacagaagaaattacggcaaattatccgaatgtgaaggttgtagagacgatctatatggatcagtttgacgatcttaagatgcaggctgcagcggacgaactcggggtgacgaaagagcagcttgccgagtggacggtggaatcgtccggtcagactccggcagatgaaggggaagaagcgatgtcggaagaggtgcgcacgaaactggaagatattcgcgctgtcgcggacgggatgacagatgcggatgtggttgcccgttatatggaaaaatacccgaacctgaagggctgttttgcggtaaatgccgatgcggttttactggcaatggatgcttttgagacagcagaaaatgaagaagatatcgtgttgatgggatttgatgccggaaaggaacagatcgcggcattgaaaaacggaacgatagatggtcttattgtgcaaaatccgttcggcatgggatatgcgacagttgtggcggcggcgcgggctgcgcttgagatcggaaatgaggcaaccgtcgatacaggatatgtttgggtggataaagaaaatatggacgacccggacgtgaaggggatgctttacgaatagtcttcgtcaggcgtaagcggatgctttacaaatagttttcgtcaggcgtaagcgaggaaactctgttttccattagcgggtaaagagttacccgctccgactgagtgaaaagataaattcagtgccgactccttcggtacttactacattaatatgctcgtcatgagcttgaataatttcttttacgatggacaggccaaggcctgtcccttttttatctttgccgcgggaaaggtctgatttgtaaaaacgctcccatattttagtctgctcttgccgcgggattccgattccgtgatcttttacggaaataaatactttttcgttcttttcactaacctctacagtaatcaaagaatcgttttcgctgaatttaattgcattatcgatcaagttatagaggacttgctggatcttacgtttgtctgccaaaacaaaaacagcatcaggcatgagaagcagttcgatggaaatatgtttttgggtacaggcagattcaaaagatgcggcggtacttttcagaacttcctgtatgtcaaaatctgacttgttaagaagaagttcttttgtatcgaattcatttaatgtcagcagatctcgcgtgaggtcggtgagacgctctgtttcaaacaaaataatatttaaatattttccgtacaattcaggcgggatcgttccgtcggccattgcctcaacatatccttttatggacgtgagaggagaacgaaaatcatgagagacatttgcgacaatttttttttgatagtcatccatatctttcagtctgactgccatgtaattcagtgaagcagagagatatccgagttcatcatgagtgtgtaccggaatctcatagtcaagatttccgatagcgtattgttttgccgcttcggaaatctgcctgagcggacgatggatgaaaaactgcacgccgaggagaaagataagagaaagtgcgaaaatgactgctgtggagatgtatacctgagtcatgatcggagcgcatctctcttcgatggcagagacgggactgtggatcagaaggtatccctttgtagaaaaaccttgtgtcacaggcgccataacggtgatcatatcttcgtcaaaatatccgtgatatgtacctgtaatatagcggtttccgccgatttcggcagggttgaagtctttgatcctatcaggacatacagtgtcttctaaactggaagaggtaagtgttcttccggtactgtctacgaaccagatagaagcgttgaagtacagtctcattgcagacaactgtgactggacgttatagatggaagaatcgccggagaagtaagatgggagataatcattggcaacaaaagtagcttctctgtaaagcgtatgagaagtgtcttcggtaagcttatctgtcacaagctgctctgtaagcgttgcagttgagaatagacataaaaatccaaatatgatataaagtgcaataaatttaatgtgcagagtgcttctcatacgcggtagtctcctgtttatctgttattttgtctcaaatttatagccgatgccccatacggttcctaatttccaatgaggatgatctttaagtttttcccggagacgtttgatatggacgtcgacagtgcgggtgtcaccgagatattcataaccccatatacggtcaaggagctgctcccttgtaaatacctgattcggagatgaggcgagacagtataaaagctccagttcttttggcggcatttcaacagtgtttccgtcacagagaacagaataatttgtcaggttgatggtcagtccttcatactcgacacactttggcttttccgcctgggacggttcgttttttatcggatgataacggcgaagaacggcgcgcacacgcgcaatcatttcttttgaatcaaaaggctttaagatataatcgtccgcaccgagttccagaccgagtactttgtcgaatatttcccctttcgccgaaagcataataatcggcacgcctgattttgccctgatctcccggcatacttgatagccgtcgatgcccggaagcataaggtcaagaagaatcagattcggttcgtatgtttcaaatgtgctcaaggcgtcttctccgttaaatactatttttgtgtcaaaacactcttttgtaagatagagagagataagttctgcgatattttcatcatcgtcaacgattagtattctttgttttccgatcatatttttcctccgttttatgggtgaacccgttatccgagctcaacgattgtgactccggcatcgccttctccgaactcggcaaggcggtatgattttacatgtttttgtcttctgagatattcgtggattccttttcttaaagctccggttccttttccgtgaactacgcgtacgctgtttagatgcgagagcagggcgtcatctaaatatttatccagttcggcgaccgcttcgtctactgtttttccgagcagattgatctcaggacttacagaaagtgacttgctcatcttgatcttgctttttgccgtacggttcatccgcttcggtgcgtaaggcgatacttcttcgataatttccaaatcggaaatattgacttgtgaccgaaggattcccatctgaactgtgacgttgcctcttgcatcggggagagagccgatggtgccggtcagattcatacttaatacttttacagattctccgagtttgaaatcagacggtttgtaagtctttttcggtttgtttgttttcagtgaagcagaagcggaagtatctttgatctttttgcgcagacgctcccgttctttttccatttcagcggcggagatattctcctttccgaatttgtgaaaattgcggatcgtctcgtcggcaacttctttcgcttctcttagtattgcatttgctttttcatttgcttcacggatgatgcggtcacgttgttcttcgagcttttcctgtttttgcacagcctgccgttttaaagtttcggcctcttttttataagcggcaatttcagcctgttctttttcgatcgtgcgtctgcttgcctcaagatcgcttaggagatcttcaaaagagacgtcttgttcactcagacgtttttttgcatcgtcgataatatagccgggaagtccgagctttccggaaatcgcaaaagcattacttttacccggaataccgatgagaagccggtaagtcggccggagactttccacatcgaattcacagcaggcattttcaacgcccggggtagaaagggcatagattttcagctcgctgtaatgggttgttgccatagtgcgtatgtttcgcttatggagatgcgataaaatagcaatggcaagggccgctccttctgtcgggtcggttcctgcgcctaattcgtcgaaaagaacgagagaacgatcgtcgacctttttcaaaaaggaaacaatatttgtcatatgtgaagaaaatgtactcagactttgttctatgctctgctcatctccgatatcggcgtaaacctgtcggaatacggcgatttccgaacggtcgcctgccggaatatgaagtccggcctgccccatgagggtgagaagtccgaccgtttttaaagagacggtctttccgcctgtattaggtccggtgatgatgagaagagaaaattcatcgccgagagatacggtgatcgggacaactttcttctggtcgagaagagggtggcgtccttcccggatacggatacgtccttcttcatttagaatcggacgacttgcgcgcatagtaagagcaagagcgcctcttgcaaaaatgaaatccagatcggtgagagatcggtagtctgttcggatctcttcgatatattgtgcggcctcttcgcttaaagaagcaagaatctttcggatctcatcctgttcttgtacatataattcttttaagtcattgttcagttttacaatagccataggttcaataaataatgtagaaccggatgcggactggtcatggatcagcccttgtacctgactgcggtattcggctttgacagggatacaatagcggtcgccgcgcattgtgatcagagcatcctgcaggtacgttcttaaagaaccgtttacaagacctgaaagtgttgtgtgaacacggtcgttgagattatttatgctccttcggatatgctttagcgcactgcttgcgtcatcactgatttcatcttcggaaatgatgcatctttcaatttcatttgaaagaggtgtgagcggctcaagtccgtcaaaataaatatcaagacagtcggcaagatcttcctgcgtgtcatgccgtccgtatgacttggcccgcgcagtgtttgaaagaagacggcagatgcggagaagttccgctgtatttagagcgcctccgatctcaagtcgtttgagagattcttccacaggagctgcgtcgccgaaagaaatccgcccctttttaatgatccttgtaaaagcggcggcggtctgttcctgaagcaaatcgatcttcgtaagatccgttaccggtttcagccgtcggcaaagttgttttccgcggaaagaacttgcctcattttccaacatggaaataattttatcaaattcaagttttattaatgttttgttattcataaatcttcacctgtctgtaatgtttgtatcctcattctactctattatccgtataaagaaaaggactttcaggaagtaagaaaaaccttttcatagaggattgaatcaggtatactagaatttggaggaaaataagtccatgccgagtgataaagaacaaaaaaaatcgcccgaagaagaggcggaagagaagaaatattcttttttacaagaaaagataaaagggaaacagggcagcagggaaacgcttataaaacaatttatccgaattgcgatctatggtctgatattggggatgtttgcctgcttaggtttttttgcgcttaaaccgtggatgcagcaatggtttgcgggaaatgcaaagactgtgatgatccccgaagatgaacaggcagcggaagattctgagaaaaatcaagagggaaaagaagatcctgcgctcgatgcggaaagttatgaagagatgaccgccgggttgaatgaacgtgtaaaagaggcgagaaaaagtattgtttctgtatcttctgtatctgaaaaggcagactgggacggagagatgacaggaattttgcagagtgttacaggtgttatcgccggagataacggtcgggaatttttgattatcgccgacagttcgatctgcacaggcgcttctgcatggagagtgacaatttccgatggaaaaagcttcgatgcagcgctgaaaaaggtcgataataacagaaagatagcagtgttcggcatcgggaaacatgtcgtagatgaggatgacagcggattgatcaaagtagccgttttaggtaattcaaagaaagtggcgcagggagatgcagtgatcgctctcggaaatatatttggatatgcagacggaatgtcttacggcgttgtcagcgcatcgaattataaggcgacatttttcgacggagaatgcgcagtgatcgcgacagacattccggcagaggaacaaggaacaggcatgttgtttaacatggatggcgaagtggtagggatgatttcttcatccgtatggaacgacacaggaaaaaatgttgtgaatgcatatggaatttcagatttgaagccgattatagaattgctcatcaatgggaaaagcgttccatatatcggaatttacggaacaacggtgacggagcagcttgcagaagaacataaaatgccgtcaggtatttatgtggcagatgttgatccggattcaccggcgatggcggcgggaatacaaatcggagatattatatgtgaagcatcgggagaagagataaaggatattgccgcataccaaaacattgtgataggctcgtctgtaggagaaacgatggagtttgtcggaaaacggctcggttcagacggatatgtcaatataaaattttctgtcgtgaccacagaaaaagaagaagttaaataaagaagcgggaatgagaaaataagaaaagaagaagtttggtaagaagcaggaatgagaaaataggaaaagaagaagttcagtaaaaagcgggaatgagaaaataagaaaagaagaagttcagtaagaagcaggaatgagaaaataagaaaagaagaagttcagtaagaagcaggaatgagaaaataagaaaagaagaagttcagtaaaaaagcaggaatgaaaaaataagaaaacagattaaaagaaatagaacatagagaaataaagaaaaaatagaaagaggaatagcgagacatgagatatatcagtgggttacatgaaggagaaacaatcagaaatatttatctgtgtaagggaaaacgttcggctgaaacaagaaacggaaaaccatatgacaacgtgcttttgcaggataagacaggaacgcttgacggaaaagtatgggacccgaattcgcaggggattgcggactatgatgaaaaagattttatagaagtatatggagaagtgatcaattataacggaaatctgcagattaatataaaacagatccgcaaagccggtgaagaggaatacaacccggcagattacatgcctaccacagagaaaagcgttgacgggatgtatgaacagctgacagagtttatccgtcacatttccaatccgtatctgaaaagtctgttagaatatttctttgtgaacgatcaggaatttattaaaaaattccggtcacattctgcagcgaaaacggtacaccacggattttcgggaggactgctggaacatacgttgagcgtacttcggatgtgcgaatattttgccggatcatatggaattttaaacaaagatcttctgttgacagcggcaatgtgccatgacatcggaaaaacaagggaactttcgtcatttccggacaatgattatacagatgaaggacagttgatagggcatattgtgatcggagtggaaatgctcgacgaggcaatcaggacaataccggattttccggttcgccttgcaaatgaattgaaacactgtattatcgcccaccacggagagttggaatacggttctccgaaaaaaccggcgcttgcggaggcggtagcgttgaatcttgcggataatgcagatgcaaaaatgcagactttgacggaaatatttaaagggaaaacaggtacagactggttaggatttaaccgattgttcgattctaatttgcgcagaacgtcaggagcgtaaacagaaaaagccgattgtaggcggcggatagatcgtaactatacggtgtttccggtggggaaatatgtgcgcagatgcggatgtgcaaaaaatgcaggaaaacagaaagaaaagggaagatatgtgtatgcagaaaaatgatactgtagttgttgaaatcacggatatcggtgtcaacggagaaggaatcggaaagatagacggatatacgctgttcataaaagacgctgtaataggagatgttgcagaagttaaagtgatcaaggctaagaaaaattacggatatgcccgattgataaacgtgcttgaaccgtcaaacagccgggttgaacctaagtgtcctttcgcaagaaaatgcgggggttgtcagattcaggaaatgtcctatgaaaagcagcttgagtttaaagaaagaaaagtcaggggaaatcttgaacggatcggcggtttttcatctgaacttttggaatgtacaaaagagccgatcattgggatggaaactccgttttattatagaaataaggcgcagtttccgtttggaacagacaaagaaggaaatcccgtaacaggattttacgcaggccgtacacatgacattatagcaaatacaaactgcattctcggtgcagcggtaaatgaacatattttagagagcattcttgattttatgaaaaaatataagatccgttcctatgatgaaaaaacaggaacgggtctgtttcgtcatgtgctgcttcgttatggatttacgacaaaagaaatcatggtgtgttttgttgtgaataaagataaagcggataaaagcggagaatggtttccgcatcagaaagagttggtggaagagcttgctaaaattgacggaatgacgagtataacggcaagtcccaacacaaagcgaacaaacgtaattatgggagatacgtttgaggtgctttgggggcaaggatatattacagactatatcggctcagtgaaatatcagatttctcctttgtcgttttatcaagtaaacccggtacagacggaaaaattatactctcaggcgcttgaatatgcaggcttaaaaggagatgaaacggtttgggatttgtactgcggtatcggaacaatttctttgtttcttgcgcagaaggcaaaacaggtttacggcgtggaaatcgtgccccctgcgattgatgatgcaagagaaaacgcactgttaaacggaatagaaaacgcacagttttttgtgggaaaatctgaagaaatccttccgaaatactataaagattatgaagaacagcacggaggagaaaaggcacacgcggatgtgatcgtcgtagatccgcctcggaaagggtgcgacgctgaattgttggaaacgattcttaagatgcagccggagaggattgtttatgtaagctgcgattccgcaacattggcaagagatctgaaaatattgtgcgaaggggcacaggaagacgaaaaaacagcagggtatcagattgagaaatggagagcggttgatcaatttccgatgacgacacatgtggagactattgtgttgatacaaaagaaaaactcgtagaaatcctttattttaggcactttgcgaaacattttacctttacttcagagggcaaaaattcacgcaataaacacctaaaaaactattttgatgtttcagtggtaatagatatcgggtatgggaacacaaacgaaaaataaaggttttttgaaatatatttatctatgtagtgtccaccttgctacaaaaatgtaggcgacattcatttgtataagggcagataagcgtatcattagaaatagtggtacgcttatttttatacttctattacacatttgagtaccctgaccgtttttctatataatgaaatcaagaacggaggtgctgacaatgagagaaataaaataccacgcatatctggatagtgaggaaagaacaattcttttacatagccttgtggaattgaaaaatcaacttattcagcaaggcagatatacagactgtgttgacgagctgattgtcaaagtcataaacgcccctgtgaagaaactaaaagtattggtgtaggaggttgtgatgtatgacaaagattttgccgagcttgtgaaaattgcagcggagaaattaaaagaagataccgtttataaaatgctcacacgcagcgaggattatcaaaaagaaagcgacgaaagggataaggcggaacgaaactatgaacaacttgatttgacaatggaacagagaaaggtctgtgatgtttttttagattacagagataggcagagcttggaatactctgattattcctatttgacgaacagctcttcaactcttgtttcgcggttagatatttgcttgaaaaagcaaataccacagagcaagcgcttaatctgttaatgcagttacctattgcatcaaattataatattttgattgcagacaaaagaggtaaaatggtggtagttgaatgtacgccgaatataaagaaaatcggtgaagcaaaaagcgttgacgatggttacttggtatgtacggttaatagttttatttcagacaaacttaagccttatgattttgctaagggagatgattatcattcctatacaagatattctgttgttatggataattgcattaacaatgtaaaaaacaatgaccctgttgttgaaactcaaaaactgttaaaaggtgaatatggttttatgtgtcaatacgatgatgagccagactttgaaacaatatggagttctatatttgatttgtcaaatttaatgatttatcgtgcagaaggtgaccccagaaggaagaaatttataaccgataaaagattgcacaatatcgtaataggaagaaaagatgctgaaaaatgaatggatacgctgtcctgtttgcggtagtaaaactcgtgataggcttagagaggatacagtattgaaaaactatcccctctactgtccgaaatgtaagcaggacactttggtaaatgcaaaggaactatatataaccgtcattaaagagccagacgcacagacgcagagccaatgaaattgtgagtaaccacgatcatttgctctgtgttttcaatgaaacctcgtctaaaatcttgacagtgtaaagattttagaatataatatagacactgtaaagattggaggttgtgtatggaaaagaagccttatcatcataaaaatttgaaaaatgatttgatagaaaaaggaattgaattggtaaataagaatggaataaatcaactttctctccgtaaggtggcacaagcttgtggtgtaagtcacgctgcaccatatagtcatttttctaacaaggaagaattgcttcaagaaatgcaattacatattacgaaaaagtttacagaagtactcgaaaatacagtttcccaatatagagggacacctatttttttattggaatttggcaaagcatatatttccttttttataagccatccgcaatattttaactttctttttcagcaaggaaatatacaaattgatttgaatattgatagtggtagagaaagtaattatcagccctttgcgatttacaaagaacaggtgttgaaattacttgccgatacaaatatgacacaaagcaaaaaagaagatttgatagttgcattatttgcttatgtgcaaggtcttacgactcttgcaacgatggagaatgttcattacgcatacaaatgggaagataaactgacagatttaattggaatatttagttgtgagttttaggagaatttatggttggaatttatttaagtggtacgggtaatacaaaatattgcattgaaaagttggtatctcttattcattcatctgcaaaagctattcctatggaaagccctgaagctatttcagcaattcaacaaaacgaagagatttacatagggtatcctacacagttttctaatgctccatatatggtgcgtgactttattaaaaagaatgctgacatctggaaaaataagaaaatactgtgcattgcgacaatgggggcttttagtggtgatggtgcgggctgcacgacaagaatgttaaaaagatacggggcaactattttgggtggaatacatattcatatgccagactctgtttgtgatagcaagttattaaaaaagacaatggatgaaaatcgttgtattatagcacaggcagatagaaaaatcgaggaagtggctttgcagattataaatggagattatccacaagaaggtattacgctagtttcacatatcatcggattattgggacaaaggctttggttttataaaaaaacaaaaggttattccaataagttaaagattaacaataattgcattggttgcggaaaatgtgtttctatatgcccaatgaaaaatcttattttacgaaataagaaagttgtgtcgaatgatcgctgtacaatgtgttatcgctgtattagcttatgcccccaaaaggcaataactcttttaggaaatgaagttgtagaacaatatagaatagaggattatagataatttatgaaatcagaatggataatgtgtccaatatgtggcaataaaacccgtgacaaaatcagggaagatacagaattgaaaaacttccccctttattgtccgaaatgtaaacaggaaagtttaattgatgcaaagaacttgcaaataactgtcatcaaagagccagacgcaaagacgcagagccgatgaagttgagaaatgtttcacagttcatcggctctgttactacttttatgcttgattttattgtctgtcacaggggatagaagttgttttcattttctgttcggcaatagttaaacttttatgcaaagggattgccataaatactgtaataagtgcagagagaacatcggcaatcggctgtgcgtataaaataccgtttaatccccatataaatggaaaaattaagataacgggaatgaagcagataccttgtcggcaagccccaagaataaacccttcttttccttttccaagagcaaggaataaagaggaatataccgtatagtatccaaacagcataaatgtaataccgtttattcttaaagaggaagccccaatgtgaatcatttctgtgtttccggttgtaaactgtgaaacaatagtcgtagaaaacagactgaataataaccctacgattacacagaaaatagttgaccataagatggaaattttgattgcagtacgcagacgatcaaattttttcgccccataactataacctgcaatcggttgaaagcctttgataaaaccaaatactgttaagctgcccatagatataagacgagtaacaacacccattcctgctatggctgaatcgccgtaattacctgcggcattgtttattagagagatagaaatacttgtcaataattgaaatacaagtgtcggaacgccaattttgaaaatttcagataaaatttcgttagaaaaagtacagtcctttattctaaactgaaaagcacttttttgtctgaaaatataaaatagatacacaagagtagatactacctgagaaattgctgtggcaatagcagctcctgcaacaccaaaattaaaagtgtatataaataatggatctaaaccgatattgaggattgcacctaacaacaaggcacacattgtagtttttgcagctccttcacttgtcacgatattgttcattgtgacattaaaaacattgaaaatgcaggaaacaatgtaaatactggcataggtagctgcataaggaaggacactttctgttgcacctaaaagtcttagaatgggtttcaaaaagaggattgataaaacaatcataattgcaccaacaacaagactgctatatagtgcagtgcttgccactttgtttgcctgatccttatttctttgtcctaacagtcgagaaatgtaggatgctgccccattaccaaaaagtaatcctaagccaacgactacttgaccgagtggatacacaaccgagatggcagccatttgactttcgcctaatccgcctacgaaataggcgtcaacgagattgtataaggcgttgatgagcataccaatcattgttggaatacccatagctaaaagggcttttgggattggagcattgcccaataactccaattttctgttttgattgtccatagtgttctttctcctttcacttgacaaatagaataaaatatactactataaattatagtagttgaaacgcaaatggtattctactataatttatagtagttgtcaagagagtaaaggaggaaattgatatggcgaccattgacttaattgttttgggaatgttaaagaaagaacctctgagtgcgtatgaccttcaaaagttggtagagtaccgcaatatttcaaaatgggtaaaaattagtaccccgtccatttataaaaaggttatccagttggaggaaaaaggatatatttcaagtcatattgaaagagagggcaaaatgccagaaaaatcagtgtattctttaactgaaaaagggaaacggcagtttgaaaaattgatgcttgaaatatcctgtaagccgataaacatttttttagattttaatgctgtcattgtaaatctggacagtatgcccagagaaagacagcaagaatgtctggataatattgagagcagtatggaggtattgaaaaaatatctggaagaaaatattgctttgaaaaaaagtaaagaagatattcctgttacgggtatggcagttttacagcaacaatacacattggcagaggcaatagaggagtggattgcttcattaaaaaaagaaatcaattcgtaaaagtgcatggtaggaacaaaagagatgctgttattttttagtttggattgtaatgagattgtaagaagtggttgctatactgaacttacaaaataaaaaatacaaatttggaggttttcaatatggcaatacttgaaacaaaagatttacgaaagatatacggaagcggagaaaacgaagtccatgctttggatggggtatccatttccgtagaggaaggcgaatttgttgctgttatcggtacatcaggcagcggtaaatccactctcttaaatatgattggtgggttagaccgccctacttctggtagtgttactatccgaggaaaagaacttttgaaaatgaaggacgaggaattgacaattttccgccgcagaaatatcggttttgtatttcagaattacaatctgcttcctgttctcaatgtttatgagaatattgtgtaccctattgagatcgacggtggcaagaccgatacaagatttgtaaaagagattatccatactcttggcttagaacaaaagcttaaaaatatgccgaataatctttcaggcggtcagcaacagagggttgcgattgcccgtgcccttgcgacaaagcctgccattatccttgcggatgtaaactgaaccccatgtgcttactgtacatagagtgtacacagtaggattacatgacaatataggtacatgatacacaagtaatgagaaaaaatgtgtatggagtaggaagaaagtattaatatctggtatgagggaagagagccttgtagcagtttttttattgtcaataatagacaggtttacaggaggtattttggtggtatgtgtgaatagctttctcgtggaaaacaaggtagtgttgtggttgaaaaggaaaggagaagcataaaatgagt

SEQ ID NO: 7639 - DNA, 126146 bp, Unknown
  gut microbiota DNA sequence
atttcgattctgacaggttcttcagccgccacttcttctctttcgattgctttataaagatccggataagcatcttttccatccacttcaaaatcaagataaaacgcctgatgattgattcctgcacatgtataacgaacctgcttttcttctgctccgatccattttgcaagcatttccgccgttccctgaacactgtgacataatcctgtaatattcatgtcagacatcgactgcagataacttacgagcattgccatcggattcgtataattgagaactaccgcgttcggacatacctcttcacagtctcttataatatcgagaagcaccggagccgttctcaaaaaacggaaaataccggacgggccacgcgtatctcctacacaaatatctacattatatttcttcggaatctcgatatcatgacgccatacttccacacctccctgcaaaatcgtgatcagaacgccatccgcatctttcaatgcttctttccggttctgcgttccttttactactgccggatattttccggcatctacgattttctgtactccttttaccgcatattcaagacgtttcggatcaatgtccatcaacataagttccgcatcccgaaatgcctcgaacgtaagaatgtctcttacaagatcttttgtaaaatccaaagatcctgctcctataaatgtaaattttttcatgttgcacctccgtttactaaacaatctgtctttgtttatctagataataatatttgttttatttattttcaagtaattttaacaaattattttatttttgtctggtttttatagttattttaacctattttgtttactaaactttattttttgttgataatttacataaaatttaggtttacattctctattttttgtgatactatgtttactaaacaaggagggatattatggctacaattagagaagtcgcaaaagcggcaaacgtttccattactactgtttccaaaattctttctaacgatcccgattttcgggcaagtcaggaaacaagagaacgcgttctgaaaacagcagaggaacttcattatcagtatacaggaaaaaaaagtcagctccacatcggctgcatcatgtctcttacttatagttactccgatccttatttcaatgatattctgggagggatccaatcttactgcgcatctcacaatgcgtttatttccctgatcgtaagctattcccagctgcataatatgactcccggactcaaaaagcagctttcggaactggacggactgatcattacggaaattccgcccgaaactcttgaatttattacaacgctcaataaaaaaatcgtatttgtcgacaactatattgacggatactgcaatataggatacaacaccgtatatgcaaaccaactgatcttcgaccacattatcaaatgcggttacaaaaagatcgcctacatcggcggcgcttccaactcatccgccccatccgacttcgactcctgctgccgcatgatgatcttccgtgaaacgcttcgggcaaataatattccttacgatcccgaactgatctataactgcgactgggattcaaaagtatgtgcggcacaggtaaaggaactgctctcaaagcatcccgaaaccgaagtgatcttcgccggttcggattctctggcaagcgccatcctttctcagcttaaaaagctgaacttaaaatgtcctcaggacatcggtgtcgtcggctttaatgacatctccctttccaagaatttttcgcctgccctgacaaccgtccggcttccttctgccgaaatgggaaaactggcggcagaagtgttgattcgtcagatcaaaagcaactccgtattaaaacagcagatccttctccctgtagaattaaaagtacgggagtccactcgaaaaatccgataaaaactatccaaaacgccaaaagtgcagtttcctttccacttcccggaaaccgcactttttctttttatatcttccatcgccgaaagagccaaaaggcagaaccgtttctcggttctgcctttttttaaccaattttcaatttaaacttctgaatctctttttcactggatacacgctcgatcatagcgccgagccctctaagtttctcttcaaaccgctcatatcctctctgaatataaacgatatcatccacgatcgtaatgccttccgccgcaagacccgcaatgcaaagcgctgctcccgcgcgaagatccggcgcgctcacacgagcagccgaaaaccgctcaacgccttcaatcgtcgcagaattgccttccacttttacctgtgctcccatacgggccagttcaccgagatatttgaaacgattctcaaaaatactttccgtgatcgtactcgttccttttgccaaagcgagcgccaccccgatctgaggctgcatatccgtcggatatcccggatacggaagcgtcttcacctgggtacacctcagacgcttctttgcaacaacgcgaaccgcatcgtcaaactcttccacttcgcatccgatatccactaatttagagatcgtcgcatcaagatgcttcggaattacgttcaataccgttacgtctccttttgtcgccgcagccgcaaacataaatgttcccgcttcgatctgatccggtatgatggaatactccgtcttatgaagcgatctcacgccgcgaatcttgatcacgtcagtacctgcgcctctgatattcgcgcccatgctgtttaaaaagtttgccacatcaacaacatgcggctctttcgccacgttttccatgatcgtaagaccttcggacatagcagccgccatcatcacattgatcgttgccccgactgtcacaacatcaaaatacaaatgcgttccacgaagtttctccgcctctgcgacaatcttgccgtgttcaatatcaacgtccgctccaagagcccgaaatcctttcaaatgctgatcgatcggtctgcttccgatattgcatcctcccggcagcgcgacttccgcccttttatatttcccgagaagagctcccagcaaatagtaagacgctctgatcttcttaatgtaatcatactctatattaaaatcgccgatcgtacttccgttgatctttactgtatgacgatcgatcctctgcaccatcgcgccgattccctcgatcgcttccaacatcacattcacatcattcacatcaggaagattatcgatctgaacagtctcatccgtcatgattgcagccgccaaaattgcaagcgccgcatttttcgcgccgccgatctccacttctccgacaagcggatttccgccttttatgatatattgttccatatcacacctctgtttagattttattatcatacttgtactttcccgtacgttttttctatatctcttttctatcttatattctttataatatcttttcagtctgccgtttttattctaccacatatccggctttttttaaatcccaacttttgtcaacgtatcattctagtgttgttcactgtacattgtcaagtttttttacttcttccaggacattttctatcgtatcttcgatctcgcatccgtcttcacagatcgtaatatccgcatatttttcaaagaacttcacgcgctcttcataaagctgccgaaacgtctgtccgtcgcgcagaacaactccgcgctttttcggattgcggattctcttttttattgtctgataagacgctttcaaatatacgaccgttccgatatttttataatgtttcatcgcctcttcgcaataaatcacacttccgcccggggaaatgaccgcgttttccgcatcgacgtctgcattcaccctgttttcgatctcaataaacccatcttctcccacttcggctataatctcacacaaaagtttcttctcctgctcctggatcaacagatctgtatcgataaactgcattccgagacgcttcgccacaacgatgccgaccgtactctttcctactgcgggcatccctataaaaatcaaattttttttcatatgtattctccgccttattttattccccacctaatatacattactatatcttatttattttatcacatttcatcttaatagtaaatcaagagagcttctttgaaaatttctgtaaaatatacataaaattcaagcaaatatttcatgtaattttcaactaaaacatattttttgccaaacagttccgcttcgcctcacaaaacttgcataaaacagttccgcttatttaaaaaatctgcgacaacatcttctgtggtcacaacggcgtttgtataactcctgaaacagcattacctccacaagatccctcagattctccatagttattgcttcatcttcggataaatcttcctccttctcatcctcttcccggcaaatatgttcatgccgtctgatattgtcacacacccgcgtgcacatcagcttcaactgcagtttatcaggatatgcgtcgtacaccatactgttttcgtattccatacggtcgcattcttcttctacatacggaagaatccgtttcggaatcttcggatacatacttttcaaatattcaagatccattctctcgatccgctcgtcatcaaaagaaaagggcatcggataagccatataataaggcagtttttcgttcatcgcactcactcccgaactgatattatatgtgtactatatgttcattccccgaaaatgtgactgccaaaaacgcgccgcttcctatacggcaaacagcccgctttacagtgcggcaactgtctgccttcccgcaaaacggactgttcttttctatatgctgtgtttaatcgctctcacgcaaaatcctctgcacttcaagccgcgtctccccgactccgataatatcgtctctttggatctccatcggccggtcgatacggacaccgtttaaatatgtaccgtttctcgaatcctcgtcttttacatataatttgtcattcttatgtatgattacacaatgaagcttggagatccttccgtcagaagtgagcggaagatatctctcatacatgcttccgtcctttcctctgccgatccctacgctgtcgcaaaatgtaaagctatatttttcccaactgtcaatatcttccagaatgatcttccagcggcgtttcttacgtttcgggcgctgatcctttgcatacgcttgcgcctctcgttctcgttttgaacgcgtgcggacttccgcctcatactcatcttcatattcatcccgacgtttttttcttcctcttccttctgcccgcgccaactccgctttgctctgtttgattcccgaaaacgatacaaacagcatcgcggcacagcccgacacaagtaaagctactataatccaataccacataatttcctctcctttaaaaattaatactactatatttttataattcgggcaagtaaaatgtcggtttttgtctaacagttcagccatacagatatccaagaagcacaaaacatgcttgcatgtttttgcaagtggatatctgtatgtgctaagcgcctattcatgagtaaaacagtggcgccagccacaataagcacgcagtgcggttttacgaatggcgcgggctgaactgttacgatagttcatccatacagatatccacttttaccgcacttcaggtcgactctcccgtgacaaaccgctttcgcctgtggtatagttatctgacagatgatttttaggaggtactactatgagcattatccgaccatttaaaggaatccgccctcgcgcagacttagcttctgccatagccgcccttccttatgatgtatacaacagcgaggaagcaagagaaatcgtggctgccgaaccgaagtcttttcttcagatcgaccgagccgagacgcttcttccaaaaggcacaaatccatacagcgaagcagtatataaaacagcatctgaaacactgaaccgtatgatcgatgaaggttcttttcttcaggacaaagaaccttgttactacttatacgcgcttacaatgaacggaagaacacagacagggcttgtaggctgcgcttcgatcgacgattattgcaacaatgtgatcttaaaacacgaaaatacactggaagcaaaagagcaggacagaatccgtcacatcgacgcatgcagcgcccagaccggaccgatctttctcgcttaccgcgccgacaaaaaactaggagagatcatcaaaaacgtccgattaacacctgaagtctacgacttcacctctgacgacgggataagacacgaggtgtggtgtatagataaaatgtcaacgattgttgacatttctaagatttttgaggcgattccacatctgtacattgcagacggacatcaccgcgcagcttctgctgtcaaagtcggactgaaacgcagagcagaagatctccatttttcaggaacagaagaatacaattattttctttctgtcctcttccccgcggacgaactggcgatctacgactacaatcgagttgttacggatatgaacgggtatacatttgaacaatttcttgatacaataaagagcaggttcgatgtggctttggccggcgtagaagcagtccgcccgcagaaaaaaggcgaattcggaatgtatgccgacggaaactggtatcgtgtaaacgcaaaagcagaccttttctccggcgatccggtaaaagatctggatgtttccgttttacaggatcacatcctttccccggttctgggcatcagcgatcccagaacagattcccgcatccgttttatcggcggaatccggggacttgacgcgctgaaagacgccgcagatcagacaggcgggatcgcatttgcaatgtatcccacttctatgactgaattgatgggcgttgcggacgccgggcttctcatgcctccgaaatcaacatggtttgaaccaaaactgcgaagcggccttttcattcaccgcttttaaaatacagtaataaaataactacaaggagatgttattcatggaaagaaatgaactctgttggtgcggcagcggcaaaaaatacaaaaaatgccatatgccgatcgaagaaaaaattcttctgcattcagaacgcggcgagattgttccgacacgggcaatcctcaaaacggctgaacagatcgaaaagatcaaagaaagcgccagattaaataccgctgtactcgatgaagtcgcaaagcacatccgcatcggaatgagcactgccgagatcgacgacatcgtatatacgttcacgaaagaacacgggggaatccccgcgccgcttaattatcagggatttccgaaaagtgtctgcacttcgctcaacaacgaaatatgccacggtatcccggataaaaatatcattcttcaggacggcgatataatcaacgttgacgtctctacaatcttaaacggctacttttccgacgcctcccgtatgtttaagctcggaacggtttccgaaagagccgaaaaaatcgtccgcgtaacagaggaatgcgtcaacctcggacttgcggccgcaaaaccgtggggacatctcggtgatatcgcgcatgcgatcaacactcatgcccgggaaaacggctattctgtcgtagaagagatcggcggacacggaatcggacttgaattccacgaagatccgtttgtcagctatgtcactccaaaaggaagtgaaatgcttctcgttcccggtatgatcttcacgatcgaaccgatgatcaatgaaggcagtcccgacttcttcgttgatgaggataacggttggactgtatacacgatcgacgacggactgtcatcccagatcgaatacatggtacttgtcacaaatgacggcgtagaagttttgacgaaatagtaaataccgcagaacagtagtcttcttttcttctgttctgcggttcttttattttctcgccgcaaacatcctgcctgcgaaaacaagcagcaagatccctgcgataatcataacaacatactctttcacccattgcggcattccctgattcttttcatcatcgaacgcctcacccccattttcttccgccacttcatacggaatccgttctccgcgtactaaaagcctgtgtgtattcactccgtaaggcgtacaagtcagaagcgtcacataatctttatcgtgatatgtctgcagttgttccaattcttccggcttaataactctcacctgatctaccttgtaggcgagcgttttatcaaggatatggagaaaaaaacgatctcccttttccaattcatctaaccttgtaaataattccgcgcttggaagacctctgtgcgcgctgatgaccggatgccggttcactccgccgatcggaagagcggtcacgtcgacatgtcccgcgcctttttccaaaacttcttcacttgtgccatgatagatcggaagatcgactttgatcttcgggatcttcagataccccattacgccgtctttgtttacattcagcacactttcataattatcgggaagcgcatatcctgttcccggaataaacggatcatgaacgggatcaccgagaagagtctcgttgtattcttctgccagttcccactgtcttgccatcttgtctttatcaatttgttctacagtctgagcgtactcttctatgacttctttttgctcacgctgcgccagatagttgcttaacgccggataaatgaaaatcccgacgcccgccgcaaataaaagcagggacgtcaggaatatgaccggtgttaatatctgcccgcgtttattgtgccgttttcggctttttcttttttcgcgcatacagacaaacccttttctttctgtctttttctttctctatttgtttttctgccttttctctgtctgttttccgttcggaacttttttcttttcttcctgaaacttcctatcttctgcttctgcggatcgcatatgtaagaagcattaccgctcctgccatgatcataattccgccgatcgtaaagactgccgttccgatgcctcctgtaatcggaaggttgaaattacttttgccgtttgtaagaacgaagttcaactgccatgttttttgtgtatcaacagatgccgagtttgctttcacattcgttccttctgcttttgactcatccagcgtaccgtttacagcgtctttttcagacagcgtgatcgtcgtctcaggatttctcggcaaagtataacctgacggcgctttcgtctctgtcaatgtatatgttccaagatcaagacctgcgataagcatttctccatttccatctgtcgtcagttttgcatctccgtctgctgccggataatacatctttccgcttttcgcaaactttatttctgtatcgccttttttcaaagcaaactccgcaccttgaagcgccgtattctcgtccttgttgtctacctttttaatctttacgccatacgtatataactgacggtccacattgatctttttttcaacgccctgtgtattataagaagcgctgttgtacttcaaatacgctgcgtttttcaagttatccggtgtttcataagcttctgatacaacttttgccttataagttacgataatctgacttgcaccgttgactaccgttttcaaattgccgtaatctttgacgctgtattcaaattttccttctgtttttataaagtgttccgaaagatctgtctgcgcacctgacgggttgattgccactgaatcttcaaccaacgctacaccggatggaagaacatctccgaaaacaaatgtttttacatttgcactatcaggataaaccggaatatcaactgtcagttcgtaagttaccgtatctccgatcgccgtcgtagatatttcttttccgtctgcattttttacagttttcttgatcgtcgggtttgttccctttgcggtaattgtaatatctccgtctacgattgcccattcttttgtatcgtcgctaaacttcggataaatatgtgtaaataccggagaatagatcttgcttccgcctgtcatcagcagaagatatccgcccattgaaagatttccgatcgtcgcttccgtctgaccttcacccggctgaacgcttcctgctgctcccatctgaatcgtatctgccgcgatcgccgacgacatcttatctgcaaattcttttaccttaaccgcatccttatccgtatccattgttataaacgcttctgttacgccgttgccgtccgcttcaatataatctttaaagtttgttctgacccattctgcggcgtttttgttccacacataagcagactctttcggctgctggttgtcaaaatcaaaattcacatcgatcacccggtacgccgatgctgtccatccgctttcatctgccgtaactttgatagaacctttcgactctgcatcgatctgcgcccatgccggcatcgtcatcccgatgaccatgattaccgcaagacagattcccaacacttttttccaaatgccgcttgcctttttttctttcatttttgttttcttgtccattaactttttcctccttattatttatatcccctttttctcatgccgcgtgatcttacagtttttctctttctcgaatcataccaaaaccacaacccggctgccgccgcgatcagaaccgtgcctgcaagatagctgtatccccttccgcctgataacggaaattcggcataagtatagttgatcactttatacggattctcatccgttccttcccccgaaaatgccggaggcctttttacgcttccggttatcttcagttcatgagtctctttctcatatgtgactttccactgacctttcgccgtcacgtatccgctcggagctttcaactccgccagacggtactctgtgccttcttctgccggaagatttaggaattcgactgttccgttttcatccgaaaccgccgttccctgcaatttccaacaatctttatacgcatatccggcgtcgagactaccgttttcatcgtgccggatcagatctttatcatgctttcctccatgagacggatcgctgcagatcagccggtacaaagcgaacttcgcgttcttcaaaggctctccttttcggttttcctttgtaaagcttacgactccgctgtttttttcatttctcacctgaagagtcacattttctttattggagagaggactttccaaacttactccgtaaggaagtacaaactgattttcctctccctcctgtatcgataatttaaaccgaatcggatctgacgcgccgtatccgttcggaggcgtcgtctcttttaaaacgtattctcctgccgcaaggttctcgaaacatgccgccgcgcgaactttttcacgattctgtgcatccattccttccgcgctttcaggatcttccattccctttttatatgcggcaatctcttcgttcgtcagcggtacataataaacgtttttctcagccggatcgcctttcagcgtatataccgtataagacgtatctccccgatgataccttccgctcgaactgtcataattcggatcgcttatactgatctcattttgccacatataaacggccgtccggttttgaacgatattatcttccgtatcataaagcgtaaaacctgcgttttccaaaggcacgtttcgggaactgtctgttttcaagaccgcaacattatgagagccgatatttgtaaacgtaaaattatgacggctttctcccgttccgccctgcgctgtccaaaaccctttcttcgcacattcgcttccgatcgccccttcttcttccggaatgatcgaaatatgcttcttctctgcttttacatctgtatgagaatgattctgttcggtatccgaaagtgggtcatcacttcccaataccgttgatcctgcgtccgcttccaaagtcagaagagcggtttcatctacttcatgtacttcatattgtgcgccaagcgggatattttcatagacagtacttcctgtcaattcccctgcttttacaactacagtctgcggaacgacaacgaccttttccttattgttttcatccgttgttttataatggatatggaacaaataaccccgctcttctccatacgcttttccctgaagttttttcgtaatcttaatttctccgtgagcaggcacttgtttattcgcaaacgtaacttcctgtacgctttctttcattgtaccttccgccgttttatattcgacttccgttccgttcacattatatttctttgttcccaccttcaccttgtggtcatactcatcacctgtgcgtacaccgcctctgtcaggatctgtctgcacgaaattttttgccacgttttgaggataagtataattcccgccgatctcgatattttgcggtatctcattttcctcgtggatcgtatatacagtctctttcggaataccgtacactgctacgcttgcagtctgttttcccgccggaacagttacgtcgatttcctgaacaatactgcttccgctttccgacatgcttcccgatccgagatttccttcaaggctcattccggctacgtcagtataatgaacatgaaatttatatgtatgatcttttttcggatcgatctgatcgacggtttttgtaatgatcagtcctccgctgatcagatcgtttttatacgccacagtcagatggatcccgtttttctgaaggttgtcaggatcgagatagcttctgaaaacaaaagtctcgttcttttccgatacatgtccttctctgtttgaactcggatagtgatacccttttccgtccgcgctctttacatttctgtcgtctgacgccgtatatgttcttacatccgtcactgtattattcaaaatctccggatcattttccaccgttcttgccgtcggatgcagcgcaagaatgttatccgcaatataaccttccgtatacattcccgacgcaccgtcatataccgaattttccaaaatcgaccatgaagtccgaaatactttgtttctcagcggatcgtcttgtgtgatctgcaaataacttccctcacggaatttatcgacaaaagacgctttgtttccatctgtaagctccaacagtcctctcgatctgaccatgaggtcatttccgttgttcacaacatctgtttcctgtatcggattcaaccggaagaacgctccgcttaccggatttaagaccgcctcattatagctaagaggccgctcttttgttcccagcgattcataatctgaaatctgatcgtcgcttgcataaaatccggtcgattggttcggaatgatctttcctttaaaatccatatccgccatatacagacttcctctgtcacgcgcaaaggcgaactgcactttggcgacatttttcatatcaaaatccgatattcccgaattccagtctgccagattcagacgaacgatcgaccactggcctttcggcatcgaattactgtatccataatacgtcatctgactggcaggtctggtgatcacatttccgtgccggtctgtcagtctcgcttttaacgaccacccggtagcgctggaagcatccgagttattataaactgacatttgaagatatgccgcttttgacagatccacactgcctccgttctccgcacagtcgatcgttgtccagtattttcccgaagcaatttcttccgacatctgatactgatcgagatttttgccgctgtctttattcacaagctttatcacatcgctgcgctcaccgataatcgggccgtctgtctctgcgtccggatctgcttctttgagctcactttctccggtcttagaccctctgtatgttccgctgtttttaaaatcgttaaacttaacagcgccttcgttacggagataacctaccgaatcttccacgggaatctgccttccgcttgtcgcctgattcaatattttataagtaaaacttccgatatatcctaatgcttttccgaatacgttctgatttgccgaagcagtgcttacctgattcgtcagatcaagctgattcgttttcgggaaattaaaacggatctttaagttggaaacacccgctccgcgctccgcataaaaaatcgtgatcttatgtatgccttgcgaaagttcttccatatctaaacacggaccgttcgcatcatttttttcataaatattcgcctgtgcatgatgctgatttttattgatcggatatccgtcctctgttgcaccgtctttatttaatccgtacacatctaccgctccggtctcaaagttaatatgaccttccagaggattatgtttccctgccatatcaagtacaagttttccgtcgatatacaataagaaatcatcgtctcccgaaaactcaaattcaatcggcttctcaatatattctcctgccttttctcccggcatacgcacttttccgtcttccgtcagcttaaattccagttccatcttcataccgaagcagaaattcgttttcatcctatccaaccggtaaaacgagttttctttcgttgcgtcgtttttgtcattaaacgggaaaaatccgaattgatcttttcccattgcgacatctctgtcacctgttttcagcgcgtcttccttttctcctacgtctaaataatagcctttatcgggatcttcttttaaccgcagcacatgatcggacttcaaactactgtactcccaatagccgtcatctgcaaggaaaaacggaaatgaaacgttattatacacgtatcccagcgccgagtgaaacgcattgtttccgcgaagaaaactctcgtcaaactgcggaagtttcacacctgcagttgagatttttccatcttccagttgtttatcgacatgcccgtaagcatactttaacgtatttcccgaatgccagtcattcggtccgatctgatttcccgacatattgcccggagaagaattatttagcggattatccccgtctgttacagccggatgcctgatatattttccataataccacgccgccgctttttcatttttcccttggaaatacttggagatgccgtcgttcaatattccgaaactcgtttcatattcgtacggcgatccgtttacttcgctcaatctttttccttgaagttcataatccgaataataatcataaaacgtcgtatttgcgtaatagtattttggatcatacgacttgtttttcgctatcggaatgttctttccctcatctccgtgatcgctcgccttaaagatcgaactccatgttccgttgattttcgactgctcactcgtataacttaaacttttcttctgaagtacgtctgcgaaaaagcatggaaaagcataagtatcgtcaatctcagttatatccgtcttatattttacaactttgccgtctgctctgttttcacatatacgaaattgaatatacttttctttatccgacagtttttcatgtgtaaaaaatgttttataaaaaacttcattttccatatcttcgcttgcctgacccgttcccgaagattccggcagcgcctgatccatctttttccattcggtttccactgcctgcccgtcttccgggttttcgcaaagacgatattccaccgtatccgccgcttctgttttcccgccttctacgccacttgcaacgagcgctcccgacgttccgtacatctgatctttaaacgcgacataccggtcgccgtctgtttcataacttctccaaatacgatgactgtcatccaagttcctcagaatgaaaaagttatcgcctgatgcaatattatataactgataatatactttatcgtcttctttattatcggaaggatgtttgaaaccgcctttttcattaagctctccgtttgaaattgccagaagcgacagttctgtcagagctgatccttttccaaacgcataataagtacataattcatagcgggtctctcttgtaactttctttgatacgatctttccgtttttatctgcgtaagatacccataactcatcccacactttatctgttttcgtatcataatttccgtctttgtcattatcaacatagatcgccagttcatccaagatgttattacttgatgacggatgacctccccagtaggacgtgtgataggacatgtcccagtaaaagcagtctcttgtcttttgcgtaaatacaaaagatcccgatcctctttgctttacctctccggcggcgtctattaccggctctttttttatctcatgataagggtcgttcggatttgcggcctgacgcagattgtatacgatctgagagtctatttctctcgcttctccgtttttattcgttacttccatctcaaacgcaacataagaacagccttccggtattaccgttccgaacagtcccgcttcgtcgacgctgatcattcgatatgtcttcggtatttcctttttccccgcattccccggttcaatcggatcttctttataaaacaatgcgtagactgtatttacatgcagtttctcaaacgttgtcgctccgccgaacgcacttgcctcatacaagttcgggatacttgcaaaatacattgcttcatataccgcgctgtcttccactgttctgtaaacatccgtctctgtcatccgctccccgagagcacagagcgcatgttgcctcccatccagatcataatagatgtgagaacaatattcatcattgcacaagctttcctgctgcgcagatatcatgttctcttcttccgatgatccttcagaaaccgttctatccgatgcattcggactgttcttcgcgtctgtctcatcagacgtctgcccgttttgccgtacagcatcgttttcagacgtctgcccgttttgcccattctcttctaacggatatagggcgctcccatctattccgtcggacagactttctccttccttccccacctctgcggaagggttttctgttgtaatttcacctggttttgccgagacttccataatcggccggatgatcataacgatcaacataagcaccgccaagatttgcgatgctttcagattccccttaaatattctgttttttctccccattatacaccctcgtacttattagtattatacttatctgtacaagttccccaaccttgtacgaatatatccgtattctatcactcgcatataggaattacaaccctgccgcctgatctatttaagttttcctcatttttgtgatatttttctatatttttccacatccgctctttattttccctttttttcgccgctttctttcgtctttttgcacagcatccaaagatatttttcgtattctgctccttctttccccgaaattccaagcgctgccgactccctaacagccttctcgatcatctctcccgccagtctgaccgaatcttctgtacggtctccgcgagcctttccgcctgcaattacggaagcgaacagatctcctgttcccgagtaacttgccccgataaaagaagagatccctgccgttgttttctcacgcgtcaccgtaagatttgcgaccttcctgccgcctgttccggtctcttttccgactgtacactctttcgcagcgtcctgctcctcaaataacacccctgtcacgatcacttccgatacgccactgtccaaaagtctgcctgccgctttcgacacttccgaaaaaagagcttctctgtctcccgtttccgaaatattttgaatcttatcataatcataatccgtcaaaagacaaagttccgtcacattcggcgtcacgatatccgctcttttaacaagctgtttcatctctttctgaaataacccgtcaaaaacagaaaatcgttttccgttatctccgagcaccgggtctacaagaagaaatgtgccttctttgtgaaacagatcgagaaagtgattcacttccccgatctgtctgtggtctgacataaaccctgtaacgatcccgtcaaactgcgcgcctgatttcttccattcttcggtaatcatccccatctgctctgtaagatcctgaaaaaaataactttcaaaccctgtctgtgcactcaaaacggctgtcggaagaggacacggctgcacccccatcgccgacaataccgagattgcggctgtcagcgaacatcttccgaagcctgccagatcatttagaaccgctactttccctgccatgttttctctccctccgaaataggtttcattacgattgcggaatgacgccccatattgatgacgatctctccgttttctacaatgaactcgtcatactctgtcgtatatccttcctcatatgtatacataaacctttccatcctgccttgcttcggaactcccgcaaaccagaccggaactgtcagctcttttaaatctttactgttgtttaagataacaatgatctgctcatcttcctgaaatcttgcgtatgcaagtacgtttctttccgcatagagcagcttgatcgaccctttcctaagcggtttttcctgtttatggattcggatcatctctttatgaaacgcgagcagttctttattctccctgccccacggatatgtgcgcctgttgtccggatctgtaaatccgcatactcccgcctcgtctccgtaataaacggtcggcgctccgacccatgtcatctgaaccgtaaccgcttcacgcataacggcatagttaacgccttcttccgcagctttcgcaccgacatgttcggcgcgtcctacgatgtgattcgtccttgtcaggaaacgggagtgatcgtgattggacagctcattcatcgcgacctgcaaagaaggagtgagcatacttgccataaaatggcgcattccgcctatgaagttgtctgcatttccccacaggtctgttcttcgctcgtcactgtgtttttccattccggtcaaaaaccacgtcaaaggttccataaacgcgtcataattcataacgctgtcccattcgtccccctgcagccattctcccggatcgccgtaatgctctgccaggatcaaagcttcgggatttgcctcttttacttctttgcgaaaacgcttccaaaacatatggttatattcgttgctgcaccctaaatccgccgcaacgtcaagtctccatccatccgcattatacggaggcgaaacccatttctttcctatatccataatatattgctcaagttccggggaatcctcataagaaagtttcggcagcgtatcatgtccccaccatccgtcataacttttattgtaaggccacgcctcttttctttcatcatgaaaacggaaaaacttccggtacggactttccccgctcacatatgccccttttggatattccggctgctgttcatagatccgctccctgtcaatccatttgttaaacgatccgcaatgattaaatacgccgtcgagaatcacacgcatccctcttttgtgcatctcctccacaagccttgcaaacagctcgttgctcgcttcaagattgcggatatcgcctgttcgcttctgatattttgtagcgcctgtattatctttcgctcctttaggaagcgtctctccgccgtccgagacgatctttccataatgtggatcgatataatcataatcctgaatgtcatatttatgatttgacggagaaacgaaaagaggattaaaatatacaacctcaacgccgagatcctgaagataatccagtttatccatgacgccctgaagatctcctccgtaaaaattacggatatccatcgccgccggaactttactccagtctttgatctttacgctcggagcgccgatataaatatattccccgtcctccacgtcatttgtcggatcgccgttacaaaaccgatccacaaaaatctgatacataaccgcgccttttgcccactcgggagtagaaaatcccggaacgatcataaacgcataaaaatcttctctctgatcggaaacgccgcacctgctgaaataacatatctgatctccgctttttacttcaaacagataactgaacggaacatcacttagctgccattctatctcatagaaatcgaattcgccttccgaaacaatcttccacatcggatacgacgaattgccggtcaaaatatggacttcttccacatcgttgtgagccgtgcgaaaccgaatcttgatcttttcgttttccttcggttctgcagggatgacataatcctgcgtaccgtcacagaatagtgcctctctgttcatatattacccctcctccgacactccgtcctcaaacaatgcctcaaactcgcttcgtgtgatcttctctttttcaagcagaagttttgcgcacgcctcaagaacatcatggtattcttcaagaatagaacgggctttggcatagcattcgtcaataatacgttttacttcctcgtcgatcgttcccgcgatcttttctccgtatcctcttgacgtatgcccgaagtcgcgtccgataaacacttcgtcactgtcattgtcgtagttgatcaatccgaggcgttcggacataccgaactttgtaatcattgattttgcgatcgcagtcgcctgtttgatatcctgcgaagcgcctgtcgtaatatcgtcaaatatttcttcttcagctacacgaccgcctaaggaaaccgtaatttcctgaagcatctgcccttttgtattaaacatttcgtctttctccggaagaggcatcgtatatccccctgccccgccggtcggaatgatagacacactgtatacaggtcctacatccggaagaacgtggaacaaaatcgcatgtcccgcctcgtggtaagccgtaatctttctctctttttcagatacgatgcggctctttttctccgctccgatgcctacttttacaaacgcatgacggatatctttctgttggataaacattctgttatcctttgcagctatgatcgcagcttcattcagcaggttttcaagatccgcccctgtaaatcctgccgtcgtctgagcgatctgtttcagatccacatcttccgccaacggtttgtttttcgcatgaactttcaggatctcctctctgccgccgacatccggccggcctacaagtacgtttctgtcgaaacgtcccggtcttaatattgccgggtcaaggatatcttttctgttcgtcgcagccatcacgataattccctcgttgacgccgaatccgtccatctcaacgagaagctgattcaacgtctgctctctttcatcatgaccgccgccaagtccgctgcctcttcgtcttgccacagcgtcgatctcatcaataaaaataatacacggagcatttttcttcgcatcctgaaaaaggtcacgcacgcgagatgcgccgacacctacgaacatttccacaaaatccgaacccgaaatactgaaaaacggcactcccgcctctcctgcaacagcttttgcaagaagtgtttttcctgttcccggaggtccttccaacaaaacgcctttcggaatacgagcgcctacctgcacatattttttcggcgctttcaaaaaatcgacgatctccgcaagttcttctttctcttcctgtagtcccgctacatttgcaaacgtcacctttatctcgtcatgatttgtcatgcgggcgcggctttttccgaagttcatcgcttttgcattcgccccgtttccctgacggttcataagaaagaaaagcagcatgatcccgccaagcgtgatcacggtcggaagaagaacggaagaaagcatcgacgtttccggaattgcggatacctgatataaaacttcgtttttatcaagcagtttctctactttttccacattcgacacattgaccgaacggttctcatctgtatctttcagagcaaacactaccgtacctgtcggaactgccttattctgatcgatatatacttctgttacattttctgcctcaacctgcttaacaaactctgtgtatgtcatctcctgtcgatgcatctgcatccggtttgccatccagagcgcgccaaaaacgatcaccataaatataatgatcgtaaatccattcacacttctgtaatttctgttattatccaaaactgatcctcctgattattccacgccttccactacgccgatatacggaaggtttctatatttttgggcgtaatcaagcccatatcccacaacaaattcatccgggatctcaaatccgcagtaatcaacctttacatctttcactctgcggtccggcttatccaaaagcgtacacaggcgcatacttgccggatttctctttttcagcacatcgatcaggtaatacagtgtattcccggaatcaatgatatcttccacaataagtacttctttattctcgatcgactcatccagatctttcgctatacgaacaactccgctcgaagccgttccgtctccgtaacttccgacacacataaaatccatagaaaccggcacggtaatccgcttagccagctcacacataaaaaatacgccgccctttaacacacagatcaaatgaatttgttttcctgcgtaatcttcactgatctgtcttccgagttccctgatcctctcgtcaactttctcttccgaaatcatctctctgatcgtttctgccatctttttcttcctccgtaatctttatctcaacaatattttttgtcttttctgtcactttgtacgttctgctcatcctgtatcccggtatccacacaatatggcttccgtctgcgacaagaagcatcctgtctctttcttccttcgggatcttctcgttgataaaccatgctttcagtttctgacgtctcccctgatcatcgatcacgagataatcgccgctctgccttgtccgtacgcaaagaccgcatttaattatatcataatcaatccatttcgtgtaacttttttgcgggatttcttctgcctgcaaaatgtctccgttttccacaaaacgcagttccaactttccggcggcgtctgactccggcgccgcttttcccgtttccgccctgctttgtgtttgccttatgatctctatcccgtcatatgtcctcttcgccgcaacgcctcccggcagatcgatctgttttcccacctgccggtcaaacaattccgaaaccgactgaaggtgggcagacgtcagatctttctgtcctccgcgcactttaccgatacatttttgcagaagcagttttctcactgccggaaaactttgaaaaaagctctctttttctatgacaagttctatcggcgattccttctgttcttggtccttttttctcacgctgacgcaggttttccacaactgccgcacgctgtaatcgagatattcacatatttcttccgcctgacgggataacgattccagatgtttcaccgtctgatcgtttacttcgttttccaataccggcagcactttatgccggatccggttgcgtgtataatcgtcctcctcattcgttgcgtcgacgcgccagacgattcctctctcccgcagataagactcgattctgtctcttgtaagtgaaagaagcggtctgatccggttgtccctgacaggcacgatcccgcaaaggccgcgtattcctgttcctcttgctatattaagcagaaccgtctccgcctgatcgtctctgtgatgcgcggttgcgatcttcgttcctccgttttcggcacacatttgttcaaatgcttctcttcgtacttcccttcccgcttcctcacaagattgtttccgtttttcagcgattaattccacttcttttcggaaaacacgacactccactccaagttcgccgcaaagcttctttacatactcctcgtccgcatccgcagccgctccgcgcaggcagtggttcacatggcacacttttacctcgaaaccgaacttttcccgcaaactgcagagcgtcaaaagcaggcataccgaatccgctccgcccgatacgcctgctatcacaacatctccatgttcgatcatatgaaattgtacgatcaattcctctattaatttttctgtttctcttcctgctttttccatcatatgtatactataccaaatccgtgtttttatgtatgaagcgccgcgcaatacacagcttttcactatacgcatactataccgaatccatccgcgcctgtaaagtattcctgtcacatatttcccacattcccacaacgatcaccgtcatatcatcggcaggctctctgcctgtccacgccaggacctgttccaggatatgatgcgccatttctttcggattgactatagcgcttccctgaatgatcgtttcaagcaatatatcctgctctcctaccggaagggcgtcaagaatcccgtccgtaaccatgatcacaaagtctccgtcctcaagttttctccttacagaatcaatctctatatgatggacaaccccgatcggcagactcgtagaacttagatgctccacacagtcttttttcttaataaatgtcgaggaagctcctgcttttacgatctcgcattctcccgaatacagatcaaacacactgagatccacagtcgaataatgaatctcctcccgccctgtcgccagcgttgtattgatcatctgaacggcggctttttccggaaatcccgcggcaagcaattcttccaaaagctcgatcacaagcgtgctctccttacatgccgtctcacctgcgcccatcccgtcagaaagagccgccgccttctttcctcccggcagttccatgagtgtaaaattatctcccgatattttcgcacatcctttcccgatcttggcagtacctgacagcgtatagtacgacgatccctctctgcatacgatcgtcatataacggaatccgactacctgcggacttccctgtgcaaggacaaaacgtcttcccgctgcttctgatacggcctgaacgacttcttttgccgtccctttctctttgcctgtacttcgtactgtcacatgtacttcaaactttccttcgccatttaagaacaaatatgtatacaaaactcgcattccacattttctaagcgcccctgctatcctcttttccatgcgctcatccgtaaaaatacttttttccaattcccgcactgtctgtttcataatatcggcaaaaagatccatctgaaacgcacacccttccctgcttcgcgccagacggtttgtccatatgatcgtttgtctcgcatccctgaaaccttccagcatctcccgcaaaaatctcggagctttctcgcatctttgcatcagttttctctttgtctctacgtttaattcatttccataatgatcgaccgccgagagcacgtcatatcccatctggtacgtatgaacaaagttctctccccagcaccacgcgtttttttcacattttttgcagaccctttctttcacccggtcaaacatcccgtcaatatcggctcccgaaaactcttctttgtgtgcctctaactctaaaaatgtatgggaaagctgtttgagcgaacttgcatatttttcaatctgttctacataaggacttccctgcaaagcctgtccttctttcattgtatatcccctttcttacaatctgactttcccgtcttaatgtaacacggtattttcttaagcggcatcaccgaaaatgccaagagtcatattccggaattacagacagccgtcaatgtcttgaacaggcccggacttcaactcgccgccgtcaataaaaaaactccgggaaatcttccccggagttatctttcgtacatgcctgtctggcttttttgctctgtttgtttttcgtcttatttatttttattcgacggtttaaaaataatctcattcggattcacaagtcctaatttatcttctgccgtctcttttatatactcgtctgtctgaacatacttttcgtattctttcacttcttccgagcgcttctcttcctctttgatctgcgccgccagttcctcttcctgagccttatacgcgttgttctttgcataaagctttaccgcgcccaccgcaagtacgcctgataaaaacacaagaaccgtacaaatcatcaaaacgcttttcttataactgtgcagatgtgccgatcttctgcgtccggcattccttctgtccgccgttcttttcttcttgccgttcatttatctcaccctgttcatctttctttacactccccagtgttaagtaatattgtatcttcttttctgactcatttcaagacttattttctattttctttccttgcttttctgcacgatttttccgttttttccttttttccgcatctttcggcacatagtttcacaatctttctgatccccgcatgccctgccgccgctccgcacagcatcccaaacacaaaaaaccagcggatgctcccgtatgttgtgtcatacattttccgaaaaatatagatgctcgcagcaagccagtaaataaaatcctccagactgaccgcccagccgctgtgaggaacaagcttccgaaaacaaacaagtacatgataagctgccgccgcttcgactcccgccagcgccgcatacagaaagattccggcttctgctccgatcccgggtatcatatcctacttaaacagcttcgtcagaaagctgtccccctgtttcgcctgcggcgttacgcttgaataagcaatactgtcaatattgcccgacagatctacctcgcctttttccacggtcagtctgttgacatgaagatccgtgcctttcaccatgagcatcccctgctctgtttcaagaagtatctcgtttagatcaaaagacagtacgtcaagcacccctgtcaccgtactcgtctttctgttatttacaactaatttatgcgccttcgcaatacgctgttcttccatgaaaactccctcccgcctccgaactttttacagcatggttatatatatgagaggttgttttcatttatgcttttcttttctctttctctacaaataccggaacaattcctctgctttttccttcttcgtcgtatcttccagcttcagcacttccgctttcacttctcttgttccgaaatagatctcgatcacatcgcccggttttacctgcacagatgcttttgccggttttccgttgacggaaacgcgccctgcatcacatgcttcatttgctacagtccgcctcttaataaggcgggatacttttaaaaatttatcaagccgcatttttctctccttcaataatgtccggatccgcctctgttttcagtaaaaacagaagcaacaaggcacttacgatgatacccgtaagtgcctttttatctgcccgttcaaacgaattgattaattgatagcgtctttaagagcttttcctgctttaaatttcggagctttgcaagcctcgatcttcattgtctttcctgtctgcgggtttcttccctctcttgcagctctttcactcacttcaaatgtaccaaagcctacaagctgaaccttctcgccttttttaagttcttcggtaacaacatcaacaaaagctttcagcgctttttcagaatctttttttgaaatgtcagcgctctctgcgattgctgtaatcaattctgtcttgttcataggtaaatcctcctcttaattgtaccacaatacatgttattcattttaaaggggaagattccgaacgcacacggatttccacctttaaatattgttatatcgggtttacacagctttgtcaagatttttcaccatttccattatggcttttcccatttcgtcggattttacatccgcatctgtcagagaagtacctttcacgccgtagtagaatttcacttttggctctgttcccgaaggtcttacgcatacccacgctccgtcaggcagctcatagtaaagtacatttgaattcggaagtcctgtagccgtaacttctccggtctccatatcccgaatcgtatccgcctgataatctctcactttaagtactttatatcctgcgatttctttcggaggctcgcttcttaatgtggcaaggatctgacgaatcttctcgagtccttcgattcctttcattgtgatagactggatgtcgtctttgtaatatccgtaacgctcatacatctcgatcatcgcatcccacaacgtcatcccttttgtgcggtaatatgcggcagcttcacacagagccatcgtagcgacgatcgcatctttatctcttgcatgtgttccgatcagacatccgtaactttcctcaaatccaaacagatactctccttttccttttgtctcgaatccgagaatctgctgtccgatatacttaaatcctgtcagacactcgatcaatccgacattataatgctctgcgatcgcatccgccatattggaagtcacgatcgtcttgataagatatccgtcttcaggcagaccttttaattcttttctctgtccgatctcgtaatccgcaagaaggcatcccgacatatttccggtcagatcatgatatactccgtctttatctttcacacgcacgccgagcctgtccgcatccggatctgtcgcaagaacgatatccgcatcgatctctttcgccagttttaatccgagttcaaacgcctcttcggcttccgggttcggataggaaactgtcgggaagtctccgtccggcagttcctgttcttttacgacatatacgttctcaaaaccaagctctttcaaaatacggcgagccggaatgtttcccgttccgtgaagcggcgtatacacgatcttaagatctttgcccgctgcttcgatcgcatctttatgaagcacctgctttttcagttccgcaatataagcatcgtcaacttccgcgccgatcacttcgtaaagtccggccgctttcgcatcctcttccgtcatcgtcttcattgttgtgtaatcttccacagccttcacttcgtccataattcctttatcgtgcggaggcgtgatctgcgcgccgtcttcccagtatactttatagccgttatactccggcggattatggcttgccgtaatattgatgcctgcgatacatccgagttttctcaccgcataagataactccggcgtcgggcgcagcgattcaaatatatatgctttgatcccgtttgcagccagacaacatgcagcctctttggcaaattccgtggacatatgacgggaatcatacgcaatcgcaacgccttttccctgaccgtcgtttttcatgatatagtttgccagtccctgtgtagctttgcgtactgtataaatattcatacggtttgttcccgcgccgatgatgcctctcagtcctgcagtaccgaactccagatccatgtaaaatcgttcctttatttcattttcatcctctttgatactttcaagctccgctctcgtatcttcatcaaagtatgaattagaaatccattcttcatacctcgccttgtagtccatatttctacctcctaaactaatataaattttatatccgcccctatatgcccgatatgttttattatacaacaattatttataaattcaaaggaaatatccgactaaggaactcatatttctcttctgtctgacggatgcatatctgtagcttttctacattcttttccgagaggtgcgccttattcgaccggtaatagctgcccgcgatctttttaaactttccgggatatgcaagactcagcgccgcaaactctttctccctttccgacaaaggacgtacttcttcatatgcttccaatattttttgtcctgttttttgtttccattgatttttttccattgcttttcttaaaaaataacagaaatcttttatctgtatatccgtatgcatatgttcaaaatcagttacggcaatatcgtctctgagcatgatcagattatgataattataatctccgtgtacgacgctcccttttgatacgctctcttcaaaaagctttctgcagccggaagtttccatcctggcgagaatatcgtccgccgtacggtacattttttcaaaattttccaaaaacaaaatttcaaaatcatttttaacaggtctggaacgaataaatgaacggatcttttttaattccctgttatatcttcgcacctcttccaccggattttttccctgtgcatccgctccgggccggatttttacagccagtttttccatatctttatgcaaaacggcaagttttgccgccgcccgtacaacgtcctgttcctgacgaacgtcgcactctcttccctgataccattttttcagcatataaaaagctccttcccgggaagcggctcgaagttcgccttctttcgtaaagacaggtgtgtcaacttttacatttccacatctttctatttcacttagagcgtcatataaaaaaagggcgcgccgctctgacagttttgtctctttgagcagcatcggcctttctttcgtatcgtaatcgcccgccgcgccaaaaggaacactacgggattgcaagcagtcgccaaagtctccgacacgcccggactttagctcgctgcctatacaaaaaaacgcaccccttatccgccgggtgcttttcacttctatatcatacttttccaaaacttccagttcatattcttctctcataactgccccctgttttctacattatagctctctctaatgtatgaacggcagagggcaattataaccttccttttctttttccgattagacagttttattcctttgagatatttttttctttacatagttgcataatattttcttatcatttttttccggattatctatcacatactccaaaagctcgcttaacatccttcctatctctacgccgggtctcatgccaagattcatcagatcccgtccgcttacagcgagctgcctgagagtaacgcattcatcctttatgatcgcttcctgatagaactttctcatcgccactatattctcaatcttttcccgccttctgtaagaactttgcgctttcgcatctgccatgcgcactgccagataatacggaaacagatcaacgccgatccgattcattgctcggcgcacgtttgccggcgtcgcctctgtgcggtaatcatgaaaacatacgagacgcgtcacttttttgatcgtgtcattatcaaattttaaacgctgcatcacgtccctggcgatcacttcgctcaccagcgcatgtcctttaaaatgatctcttccgttttcatccgttgtttttctcgccggttttcccatatcatgaaacagcatcgtaagacgcagtatcttatcacgctttacatactttaatgcatggagcgtgtgctgtgccacatcatatttatgatggggagtattctgctccactcccgccatagcatcccactccggcagaatgatcctcgtgatcccaagttcatacgcatcttgtatccgttccggatgagccgacacaagaagctttacaagctctgcctgaatgcgctctgcactgatattttccagtgtaggggcaagttccctgaccgcctcagccgtttcctcttctatcgggaaattaagctgagcggaaaaacgcaccgcccgcaaaatgcgaagagcatcttctgaaaaacgttctctcggatctcccacacaccggatcaaatgatggtttaaatcctgcattcctccgaacacatctacaaggcgcacttcatcattatatgccattgcattgatcgtaaaatctctgcggcgcagatcttcctctaatcggtttgtaaacaaaacctctttcggatggcggctgtcttcatacgccccgtctattctgtatgtcgtaacttcataaccgtctcttccaagcagcacggtaaccgttccatgttcaatccccgtatccactgtccgcctgaaaagcttcttcacttcctccgggcgcgcggaagttgtaatatcccagtccttcggtctgcgcgcaaggatcgaatcgcgcacgcagcctcccacagcatacgcttcatagccgtgaagctgcaaattttttataatcatcatcacttttcgcggtaatgctatcttcatgaaaattccacctctgaaataacctttttatctctttacactcatttatgatcatctgatctagttatcatttagactaaatgttccagcaatttggcttccctgctgtgacaacttaatattataacctgctttttctgccggctcaaccattttatgacagattcaagccttttatcgtcataaaacgcaaacgcatcatctaaaataaccggcatcggttcttccaaaagcatttccgacgctgccattcttattgaaaaataaatctgttccaacgttccttcgctcaaccggtccacagatatgcgatccataccgttccatgccgaaattcccgcgcctttttgtatatttacacttcgatattttccgtctgtgatttccgaaaaaatttctgaagcccgggcgtttatcttatgcgaaatcacatcagacgtttcctttgcagtccgcacaagaatctcttctgccattacaagcgcctctctttgctctctcagcctttttccggcgtcgctttctttcacatctccacattgctcccgcacattttgacaacgcagctctttttccttccattccaaacgcagatgctccatctgccactccagctgctgtttttgtttcttctttctctcgtcgtctttatcggaattattataaggcacatcacgggcgtcctctttttttcgctttcctgatttttttcccgcttcataacctcctgccgcaagagcgcacacgccgatcacaaaagcaaaaacgccgatccatgcaaacggtgcggaaggcactgccgactgttccgccataaatctgctccataaaagtcctgccgcgccggtaaaaagacctccaagccctgccgcaataaaatatttacttctgctctccttcgtcccttcatcagatctcttattaaaatcagactctttttctttttcctgattttttatcgttttctcaagcagctcccattcttgttttctctcttcatactctctttggatctcatccatatcctgctccaaatactcgcattcctgaagcattttctgtattttccgttcttctttatccgcttcttcccggatgaaccgatctgtcttttttcttttttctctcaatatctgcactgcgccgcttagatcaagttctgttccccccgtctcataataattcgccgcataattttccagcgcatcggacaaagcctcccccggtctgcttttcaactgtccgaccgaaaccgtactgtcaaacaactccgcagtcaatccgcccagaagcatttccaaatccccatgctccaccgacaattcttctccgtcatcctcacagatcagagccgccgacttagaatttttaacccctgttccgaatgtacgttcaagacgaaaatgtctccctccgcagtcaaaccgcatgacaccggcatacctgccgccgctgcgcggctcatactttgtaaaatcatctttcgccgccgctcttcctcttccccgctccaaaccaaacagcatcgctttcacaaacgcatgaagcgtcgtctttccaaactcattttctccgctgatgacctgtactccatccctaaaataaaaatgtttctccgacaattttccgaaatttttaacataaagttctctgattaccattttctctatcccctgtttcccgtcaaaagcgcttccacgccttcacaaagcgcacaatactcaacacttccctcttcacaacctgcaaatttctcgatatatctgccaagaagagtctccttgttctctgcataaagcttttcaaaatcatatgccggaattgtctcgtccaaaatctccaacacgcatccttcctccgccaaatgattcacttcaaaggcaatatcgggatctctttttcccgcaagagtaattttgtaaatattttcatttccatactcatttataagtcgctttaccctttttcttatacttccttccgtatcgcttctttctacttcgacagaactgtggatatactctctccccgcaaacggtatccactgaatcgccgcttttccgtctttgagctccccttttacatatccatgctgcccgacgtcgttttggtcgatcggttcaagcgctcccgcataaatcatcttatctttttgcaaagcctgcggtttatgaatatgtcccagggcgatatatgaaaatccggaacgactcagcttctttttatcaaacggaatatgcctgtcatcacctccgtgagccaacagaatttcattcttttcaatgcctgctgcagccacatcgtcataaagcggctgacaaatttcccgttcatagtaactgagtccatacaccgctgtttccaattccggaaaatcgacatattccaatttcttcccgaacaaaggatatacattatcattccactcaaatgaacgataattagaatccttctgcagatgatcatgattgcccgctatgagcacaactttagtagctgtcagttctgaaaaaagataattgacctcttttagctctcttacaagaggctgcctgtggaaaagatctccggcaataagaagaaggtcggttctctcatcttcacataccccaagtattttctcaaatgactcccacaattctcttcctctgctttgactatatacagccgcctccggctgcgctccgagatgtacgtctgctatatgaataaatttcacgcccgctcccctttcaacaatgctgttttctgccggctgccacgaacccgggcaggcccggactttcgctcgccgctattgcaataaaaggacgccacacaactgtcgcgccctcatgatatactttataattttattctatatttatttcgatgtatttttttacgtcttacaccgcaaaacgcaattacagttcacagttatttactgttctcgggaacggaatcacatcacggatattcgacattcccgtcaaatacatcacgcatctttcaaatcctaatccgaaacctgcatgacgcgtagaaccgtattttctaagatcaagataaaagccataatctttttcatcaagaccaagctcgttcatgcgggccaggagtttctcatagtcgtcttctctctgacttcctccgatgatttccccgatacccggaacaagacaatcaactgccgcaaccgtcttgccgtcatcattttgtttcatgtaaaacgctttgatttctttcgggtaatctgtaacaaatacaggacgcttatacacctgctctgtcaaataacgttcatgctctgtctgaagatcacatccccaggaaaccttatactcaaacttatcgttgttcttctccagtatctcgatcgcctctgtgtaagtaacacgggcgaaatcagaattcgcaacattattcagtctctccagaagtcctttatcaacgaaagaattaaagaaattcatctcttccggcgcgttttcaagaacataattgatgacatatttcagcatagactctgccagatccatgtcgtcttcaagatctgcaaacgcaatctccggttcgatcatccaaaactctgccgcatgacgggttgtgtttgaattctccgcgcggaatgtcgggccgaatgtataaatacttctaaacgcctgcgcatatgtctctccgttcaactgaccgcttaccgtaaggctcgtctcttttccgaagaaatcttttgtataatctactgtaccatcctcattcttcgggatctgatccatatcaagagtcgtaacacgaaacatctcgcccgcgccttcacagtcgcttcctgtgatcagcggcgtatgtacatacacaaaccctctctcctgaaagaacttatgaatcgcatacgctgccagagaacgcacacggaatacagcctgaaatgtattcgttctcggacgcagatgagaaatcgttctcaaatactcaaacgtatgacgtttcttctgcagcggataatccgaagccgacgctccctcgatctgcacttcatccgcctgaatctcaaacggctgttttgcctgcggagtagcgacaagcgttcctttcacaataatcgcagctccgacgttcagtttagaaacttccgcaaagttctccatctcatcatgatatacaatctgaagcggctcaaaataagaaccgtcatttactacaatgaaaccaaatgtctttgaatctctgagactgcgaacccagcctcctatcgttacttttttgccaagatatgattctctgtctttaaataattcccgaatcgttgtcaattccatatcagataactccttcaatcaaatttcaccgacgctttcgcggcaataacagttctattataacactttattttccatatgtcctgcaagccactcaaataaatcgtcatatacctgttcccggtctgattcgtttaaaatctcgtgacggtcgccggtatagagctgcaaagatacgtctcttatccctgccgccctgtatttttcatatattttacgaacgccttttccgaagtttcccaccggatcttccgaacctgccgcaaacaaaatcggcagattcttcggaatcatatagacgccctcttttctctgcatgctgatcattcccgaaaacatgctgtaatatgcatttaccgtgaaaacaaatgagcagagcgggtcggatacataagcgtccaaatgttctctgtcacttgtgacccagtcggctcttgtcctcgccggtttgaattttcgattaaaatttcccacaactaaatgatccacaaaatgacttctgtaatgccagccgcgcacagccgccatcagcctgcataagcgcttcccgaacacaagcgtcgcctttttatgatcggcaaccgcgcccataatgatcgccccgctcaatcccttgccgtacatctgaatatactgacgcaaaagcgaagaccccatactgtgtccgagcataaaatacggaacgttcggatatttcttcatcgtcctctgccgaagtgtatgaatatcgcctataacgcatgcatttccgtatttttcactgaaaaaaccatattctgatttcgcctgtaccgacttcccgtgtccaaggtgatcattccctacgacatagaaacccttgccgcataaaaattcggcaaattcatcatatcgcttgatatactccaccattccgtggcagatctgcaataccgcttttacctcgccctccggtttccattctatcgtatgaatctctgtattaccgtcttttgatgggaaatagaactcgtctctcatgtcactgatgcttccttacctgtcatctaattttatataatcgcggtatggtgcgagcggcttatacgcaggacgtatgatcttatccacatttttaagctcttccaacctgtgcgcgctccatcctacaatacgcgccgccgcaaaaatcggtgtgtacaatgccggcggaagatcgagcatactgtagacaagtccgctgtaaaaatcgacgtttgcattaacgcccttatacatctttctcttttctccgatgatctcaggcgcaaggtgctctactttttcataaagaccgtattctgcctcatggcctttttccttcgcaagctttttcacaaaccctttgaatatatccgctcgcggatcggagatcgaataaacggcatgtcccataccgtagatcaatcctttcctgtcgaacgcttttttatcaagaagcgcttccagatatgcccggatctgatcttcgtcttcccagtctgtcaaaacagacttcatatcctcgaacatctgagtcactttgatgttcgcgccgccgtgcttcggtcctttcaaagatgccatcgcagccgcgatcgtagaatatgtatccgttcccgatgacgtaacaacgtgagtcgtaaaagtcgagttgtttccgccgccgtgatccatgtgaagcacaagagccatatccaggatctctgcctcaagttttgtatatttacgatcctcgcggagcatcatcaaaatattttccgctgtggacagttccgctttcggcgcatagatatagagatcctctcctctgcggtaattatacgcatgatatccgtataccatcagcatcggaaactgactgatgaggttcagacactgacggagaacgttcggaatactcgtatcatccgctttctcgtcataagaataaagctgcaggatacttctcgtaatgctgttcatcatatcgcggctcggcgctttcatgatgacgtcacgcacgaagttcggaggaagcatacggcgctctgcgatcatattctgaaactcttccaactgtgctttattcggaagttcgccgaacagaagcaagtacgccgtctcctcaaatcccgggtgatccgcctcgaggaatcctctgacaagatctttgatattataacctctgtaatacagattcccctcacacggtacagactttccgtctacgatttttgatgcgcacacatcggaaatgttcgtaagtccggcaagcacgccctttccattcaggtcgcggagacctcttttcacttcatacttcgtgtataattccttctcgatcgcattattctgctcgcacttaagagcaagttcttcaatcttcggagtaatatcaaaaaatatgctgtctatattttttgccatacaacttcctcctttttattttggtatatttgtttattatactaaaaataaagaaattatacaataaactgtctattaaatatttatgaatagacagttcagccatccagatgtccgcgaagcataaaacatgcttgcatgtttttatgagcgggcatctggatgaggtgagcgcccggttatgaggaaaactgtggcggcagccacgataagcacgcagtgcggttttccgaatggcgcaagctgaactgtttttttaagccatccagatgtccgcgaagtataaaacatgcttgcatgtttttatgagcgggcatctggatgagatgagcgcccggttatgaggaaaactgtggcggcagccacgataagcacgcagtgcggttttccgaatggcgcaagctgaactgttttattcagcacgtaatcatttttctctcagatcacaaaaataattcgcaagctgtgcaaactccgcaagtgtcaaagcttcgcctctcacgctcgccccttttccaagtttttctatcgccccttcaatctcctcttttgaaaaatcaatctcaggggagtttttcaagccgttcgccaatgtttttctccgctgattaaaagatgcgcggattacccgaaacatcagcttttcatcccgcacttcgacaggcggatgttcgtgcctttctaaacgtatcaccgccgaccctactttcggtctgggcataaaacagttgggcggaacatttgccacaatatacggtttggcataatactgcaccgcaagagacaatgcgccgtagtcttttgttcccggcccgacctgcatccgatccgccacttctttctgtaccatgaccgtaatactttttatcggaacatgattttcaaacaaccccataatgatcggcgtagtaatataataaggcagatttgcaacaactttgatcggtctgccctcattctcttcttctaccaactttctgatatcaactttgagcacgtcttcgttgatcacacgcacattgtcatagccgtcaagcgtatcttccaaaatcgggatcaaagctctgtcgatctctactgcgattacttttcctgccgcacatgacaaatactgggtcatcgttcctattcccggaccgatctcaagtacgagatcgtctttcccgatctccgccgcacggatgatcttatctaaaacatgtgtatcgatcaaaaaattctgtccgaatttcttttgaaaaataaaattatatttttgaagcaccgcaatcgtattctgcggattgccaagcgttggttctttcatacgtttccttcccaaatctgttttttcagaagttccgtgcggcttatcattctttggctttcccccgcaccttttctttttctctaaaatccgtttttctctaaagtccgtataacttccgtgcgttttcctccgtctgtaacacgacgtcttctgctgctgcgccttttagtgccgcgatctcttccgccacatacggaaggtaaagcgaactgtttcgctttcctctatatggaacaggcgcaaggtacggacagtccgtttccagtacgatcgactccaaaggaatctcctgaacgacctgttttagtttctttgcattcttaaaagttaccactccgccaattccgatataataccccattttcacatactcttttgccatctccgccgagtatgaataacagtgtatcacgccgcgcagtcccgacgcatattctttcataatctccatcgtatctgcggcagcctccctgctgtggataatgaccggtttctctttttttcgcgcaagatcgagctgtctgataaaccattctttttgaagatcatgattttccttatcccaataataatccagaccgatttctccgaccgccttgatcttttctttatcaagaagacgttccatccttgcaaactgagtttcatcaagatttccgacttcgtcgggatgaacgccgatcgccccgtacacaaacggatactcttctgtcagttttacgatcttatcccatgacaggattgtagaacctgcatccattatcatgccgattcccgcatcctgcatcttccccaggatttcctcccgatcctcatcaaactgctcatcatcataatgagcatgtgtatcgattatcatcttttcagaatcctttctctcttatttatcctgacaacactgccggtctttctcgcttgagccttgtacacacacgtttaagagaaatctttcaaactcccgtctgttccacacttccggcgtcggataaagcggatttgcctctttttccgcccattttgcgatctgcttcacatccgtttttcggatcatctccggatattgcggaatctgcatcttcactttcagttcttcgatccatccgataaacgcatccgccttcacactgtcagactcctgcggtgtcgtaagtctgcacacatcacttaattccgccagtttcttacatgccgcgtctccatatgcccgcatcacataaggaagaaaaatcgccattgccagtccatgaggcgttccatacaatccgccgaccgcatggccgatcgcatgaacatatccgactcctcctcttgtaaatgcccgtcctgcataaaacgccgcctgctgcatcttctgtctcgcctcgatatcgcttccgttttcatatactttcagcagattttcatagatcagtctgacagctttcctgcacaattcccgctctgtatcactgttatatttatcatttgtatacgcttccaccgcatgacacaaagcatccatccccgtcatagcggtaacgtccggcggcagtcccagcgtcagttcgggatcgagcaccgcatactttggcataagccgcagatcattgatcgccgccttatggtgcgtcgctgtatccgtgataactgccgatatcgtcgtttccgagccggatcctgccgttgtaggaaccgcaaacaacatcggaatctgcttgacaacccgaaacaacccctgcagctgccttatctgtctgttcggtcttgcgatacgcgctccaaccgctttcgcacagtcaagaggcgctcctccgcccagcgcaagcatacagtcacacccattttccagaaacactttcaccgcatcttccacattttcatcggtaggattttgttctaccttattgtagatgacatacaaaagtccctgttcttccatctcttcaagcactccgtcaagaagccctcgcccgatcagagtaggacctgtaacgataagcgccttttttaaccctctccgtttgatcgccgcaggaaggtggcggaccgctcccgctcccttcatcaatttcggcgtccgccacgggatagtggaaattccggctttcataactgattgaaacattctgcaatacattttcttgacgcttttctttgtcgtcatatatacgcatccccttattaaattcacatcatcatacacgcatcattatcgcgcgcaaatatttatacttaaaataaaactcttttctttctccccattatcttttcacaaaatactcttcataccatacgaggaaagtatagattgtccacacttttctccagttatccgaattgcctcctacatactcgtcaaaaatagcccgtatctcttcaacatgaaagaatttttccgcgatatcgctcgcaaaaagtcttctcacgtccgcattataccgatcatccgccatccagatacgaatcggcacaataaatccgagtttcttgcgaaatgcaatttcttccggaagcacttttgcagccgctgtacgaagagcgactttattctgttcttcatttaccttgtactccgacggcattcttgatgcaatgtcaaaaattcttctgtccgtcagcggcattcttatctcaagtcccgctgccagactcatcttatctacattgagataaatatcgccttcaagccagatctgaatatctacatcagacattttagtcagaggatcaagaccttccgtttcctcgtaaatcccccgcgcaagttcgatcggaagtacgtccggatcgtattttttcaaaatccgcttcttctcatcctctttcatgatatttgtatttccgacataaaatgtctttaaattctccccgtatctttctgcgttgcgatacatattatatccgccgaaaaattcatctgcgccttcacctgaataacagattttcgtatgctttgcggtttctctgcacgcaatggcaaacgcgatcgccgacgcgtctccaagcggctgttccatattgtacatcacatacgggacaacagcgaaatattcctccggagtgatccggcatcgaagattttttcttcccaaaatatcagccgtctgtttcgccagacccgattcgtcaaagcgttcctcgtcatatccgcacgaatctgtcgtctctacatccgacattgccaaaacgtaagacgaatcgacgccgcctgataaaaatgactccgcatactcttcttttgtttttacttccggcatgatctcgcctatcgtcgtatggatctcatctgcccactgctccagtgtacggctattgtccggatgaaactgaggcatccaataacgctctatcgtaagctttccgttctgccatacaagataccggcccggaagcagctttttcagaccgcggaaaaatgtattttcgcccgccacataagtaaggcttaaataaagctgaagcatctcttcgtttaattcttttacaaatcccggctgttccataatctttcggatcgttgttccgtaaagcagttttccgtccgccgtttcgtaataataaaacggttttgttccaaactgatctcttaagcaaaacagtttctcttccgcttcatcccacagggcaaaggcaaacatcccgtgcatgtgatctgccatctcatttccccatgtttcatatgccttcacaaggatctgttcctcacgctcttcccttgtcagatcaagaggaatatccagtctttcgcaaagttcttcccagtttcttatatgacctctgtattcttttacttttatcatctgtttccactcccaactttacgccgcccatattgcaggggcatatcggcttttatcaactcttttgttacacggctattataaacgaaagcctgtcatgttacaagaccggcgcatacactgctttcgtcctttctccttctccttgaagttccacttccggaaagctttgaatgtattgcttaaattgtgaataaccataatctctcactttaaaatccgcgaatttcagtctgatccgattgcccaaagcgctcaatgggattcctgattccccgcttgcttcgatctgatacaaaatatattcttctaccatttcttttctgctcttatcttcattgagcgctacagatacttttgttccctcctgaatgagcattaaacgaggaagcgtttccaaaaatttggacaaaagactataaccatagcggcggacatcaaaatcaggatatagcttgacaagcctgctcccgacttcgccaagtcccgtctctctgtcattgtttttattctccgtaataatcttaacgaccgcttcttccacttgttctttcgtagccgaaatcatttttttcgattcttttccacttacagtatggaaaacggttttttcctccctctcggaaacgcccatcatattatcttccaaaagaagttccagttccgtaaagatctcgcatgccttacgaaacggcaggggcgttttcgcctctcccattccgatcacacgcttcccgctctcccgcagcctgcttgcaagccttgtaaaatcgctgtcgcttgaaacaagacagaacccctcgagttcgctcgcatacagcatatccatagcgtcaatgatcattgccgagtcagttgcattttttccgtaagtataactaaactgctggatcggagtgatagagttctgcaaaagttcttccttccaccccgcgctgttcggacgggtccagtctccgtagatccttttatatgttacatttccatatttcgacagttcatctaagatcggtttaatatattttgcggacacattatccgcatcaattaaaagcgcgaatctttcttccattctctgtatacctccccactcatatttttccacgtaaatgttcccttttcataaaccatatagctgtgggaagaaccttctttcggaatcgaaaccgatcccgggttcagatacatatactcatttccgttctcatccgctattttctcacaggcaggcacatgcgtatgcccgttcagcaaaatgtctccgttcttcagcggaggcatacactgaggattgtgcacatgtccgtgggatgcaaaaaccacgcctgtatcctcaagctgcagtacacaataatctgccatgaccggaaactctaaaaccatctggtctacatcggcttcacagtttcccctcacacagagcagttcctccttgacttcattcaacatccgtatcacttctttcggggcgtagcctttcggcagatcattgcggggcccatgatataaaagatctcctaaaagaaggagtctgtccgctttttctcttcgatacgcctcaagcatctgtccacaatacacagccgaaccatgtatatctgacgcgatcatccacttcatactttttctccacatatttagatttgacagttttcaaactacataaaacattgtccctgtccctttatttttatcattttaacataatttttctatttttgtaaatctgccctcctgacaggctgctatatcacaaacaccgcaaaagacccgagcattttacgaaattttcttttatgcacagccggtcataatctacacaaacggtatgcctgctcaactgccgcttccatatttgcctccgcattttcccgcttcattgccgcttcaagagaaaccgcctctcttaatatcggaaagaatgcatcgatcccctgctcattgcatgctccggcgtcacgcgcagcagccccggcaaatgcaatgaccggttttccatatttcttcgcaatctttgcaatcccgatcggcgcttttcccatagcggtctgtccgtccatacgcccttccccggtaatcacaagatcagcctttgcaatttcctgctccaagcctgtttcttttattacaatctggataccggattccaactgtgcatccataaatgtaagaaatgcaaatcccaaaccgcctgccgcccccgtacccggatacatagaatctgctttcggaatctttttcttcaccaaagacgcataagaaaagagaagacgatctaacctttcggtcatctcttcatccgcgcctttctgcggaccgtacacagcgcttgctcctgtctctccgcacaatacgttcgttacgtcacaggcaatcttgaatttacattccgcaagttcagggatcacgttatcatctgtaatctccgccagttcttccagaccccttgccccaatcggaatctgttccccgttttccttcagcaggccaaaacccaaagcctgaagcattcctgctcccccgtcgtttgtcgcgcttcctccgatcccgacaataaatttcctgcatccgtttcgcacagcgtcttttatcacttctcccacaccgtaagttgtcgtatacaacggatttcgttcttcctctgaaagaagagtcagccctgccgctttcgcaatctcaatgaccgctgttttctcttctgtttttccacctgtattctcgatcacaccatactcgcacacaaccgtttttccgatcggtccggttacagaaactttccgtatcgttccgttcataccggacaccaacgcttccactgtcccctcgcctccgtctgccagcggtctgacatgcacttttgcttcaggatcaactttatgaattccctttgcggcggcttttcccgcctgtaccgaagtcatactccctttaaacgaatcaatcgccgccacaatttccataaatccatccattcctttcactttactcagacagagaacattataaaaatgtttccccgcacttgtttgtcatcatataaataccttcaatgtacacagcgtatcatttctttttttacatttcaataactttgcacgaccgattcctaaagaatgatccggcaacactatcaccatgaaaggatgtgttactattcccactccaaaacgacagtatactactgacgatatttataaattaccagatttcataagagtaactctatttgatggggaaatattgacgaatgattggacaaatctgattatagacgaagaggtctttaagaatctcccttctgaagatcaccacaaaacgtaccgactttctatagtaaaatctgaatagcccttgtatcgctctgatggatatactatattaaagacataaaaggaacaaccgcccacaagggggttgacctcgacaagattgtaatagaatcaccaccctgaaaccggtcaaagtttagagggtggttttctatgccttaaagcactatctgataaacgtaaatacgaatgtcagcaatgccagaatgaacattccaaagtttgggattgatggcactaacgaaaagattcgcctcggaaagttgatgggcaaggacttcataataacgtccttttaggtctaagtttttttgggggcggtacaatttgttgccaacaatgtattgtattgttatctttaataataaaatccggggcagatatgatatcattcaaataatctgtaacttctttatatacttctgggtgtctatccaaaatatgctgaagctgattatctgtaataataacttcatccgttacgatatcttcggttatacaactatatatgcttttattaattctaccaatggtatgcacttttgatacctcttttacattagatgctgacgatcggaaaattaactaacagaatgctggggacggcttgaattccaacgctctccgtgctatactaacccacgttacaaaaacccgaaaaataaggtcttacaagggtttcgccgatttccggcgtaagccaaatacctgcggtatttgactctcgcgacattcgccaaatggatgtgcaagcacctccacatggctcattgtttcgcggaaaatgaatcgtgtgttcgtgaccttccacacgtaaaacaaaactaaaggagaattgaaaaatgaaaacaactcaacaaagcaaagtgcttttcatggcacaggcggcgatgatcgccgcaatctacgtcgtactgactatgctcggcgcatcttttgcattcggagaagtgcagatccgcttttcggaagcgctgacaattctgcccgcaatcacacctgcgggaattcccggagtatttttaggatgtcttatcagcaacatattaggcggagcaatcttgccggatattattttcggaagcatcgccacattgatcggagctttatttacatggcagcttcgcaataaaagcaaatatttagcgccggttcctccgatcatcgcaaacgcgctcatcgttccgtttattttaaaatacggttatgcagttcctcttccgatcccgtttatgatgctgacagtaggtctgggggaagtgatctcctgcggagttctcggaatgatactgtacacagcactgaataaatataaaggggttttatttaaaccttccatatcataaaatattctaaagcatgcggcagttcagcttgcgtcattcgcaaaactcattcgcaaaacgcactccgcgcttattgcggccaaacatctgaagcgctgctaacatacgatacaaaaaatatccgtgagatacgtttttcgcatcccacggatattttttatcacttatatttacctttccggtatgtgccgcgccaatcaacttcctgaggaaagttctccttttatcatctgatgtatccgataaatgtgtttccgcctgcttctgtcatattttccatttcgctcatgccgactgtatatgattctcctgtactcggatctacatatgtgatatccgtcatcgtatatcctgtcaaaagcaccgcatgtgccgattccaatatcgcgatcatcggacacccgcgattgatcacatataacatctgatcgagagaacagcctgtcagatcaagccgctgtgcatgatactgttccatataacgctcacacgcatcaagagaactttctccttcttcacattgaaacttacctgcttctgttgaataaacaagatcccggtttcctttctcccatacatatttttgctcggaagaaattacaactcccgaaacctgctctgccttttgaaccgcataccctgctttgttatagacagccgccagttctcccatgccgtaaacataatatttttcttctttctctttccctttcagctcaatcgtcagcgtttttttgcccggctgatatatcggtttttcattctgtttttgtttctttttcactccgtccgcaaatgtaaaacgcatctgttttcctgtgttttccgatacatatgtttcaaaaacaatcttcgactctttacgttcctcattgttcgtaacatattcctgctttgtggaattatatgtttctccgtcttttataacgcggttaaaagtcagcagattcccgtcgatgagcacatccgtcgtataaatactttgttctgtgaaattatactgcgcagcttctttattcttagagtttctgatctgcacttcgtacatcggtgtgatctcttcgcctgataccgtgatccctgtatcggcaggatttacctttccatatataaaatctccgttgataaacccaagagggcgcaggttttccccatcttccgctttgatcgtataatcctctccgctctttaagttcattatatgaagcgtcgcggacttatctgttttccctccggtctgatacaccataagatgaccgtcatctgaaacggcataccgttcgtcagtaagattctccgcaagcactttcttctcatctttcttcagatcgatccgatataaagttccgtctgcaagaacgtgcaaaagggaagtactctgattataatataccatcttaccaagctcatcttctgcgatggcaaacgatttcgtacttgtaataaatgccttttcctcaatcttattttcagccgcatcataataataaatgccgacgccgacctcgccttcgtggctgccgcgcgccatatacccgtaaacggcaaacgtaatattatttttattatcaatgccgatcacacgcaccgcatgctgatcattctctccccgcgtatctctgccttcctgatctggcatggaaaatacttttgtcagatttccttttttcgactcatacagccataattcaccggcctgcacaaacgcggcggaagtctggtctttattgatctcataggaaatatccttcggaataatgccaagtatgattccgttttcatcaaaatcactttctcttccgtcaaatacttgttccatattccggttatagtcgagcaaatagatcgtatctacgagaaatctcacccggaaaaactctttcacgttatagatgctttccgctccctcttcgtccgtacaggaaactttatattttgcgagtatagaagtatataccgtattactttcttttatatcccactccacatctccgatcacggagggcttcatatctccccattgtatatgcgtaatatctgaatgaatatttaccgtttgatatgtcgtattatcgctcttttcatccggctctaaatatgccgtaagttcctctgtcgcttctttattcaacgcttttgtatgaaaatcttttgcaaatgcaaggcactgatcagtcgtgacttctttcggtcgtacaatgcgggtataatatcccgccgtctttccgttttgagacagcggcgtatcaagcgtcactttcaaaactgcctccggctcttccgatgacaagatccctttcaagtccagttctgcctgcgaagtttctttcactatatccgctttgccttctgcatgtttcttcgttccgtcaagcgaatatacctcatatttaagtttatcgatcttatttccgtatttttctacttttacagtcaatgaaccgtcgcttttaagcggagtgatcgtatcacgtacagcaggtatctccatcttgtttacataaccaaaaagcggattcacttctgtttctccgacataaaaagaaatctcaggcagagatgcagcccccatgtcggcggcctcatccgacacatctttgttgatcacaaggcttgaaataatgaccgcggcacaaaaaacaacgatcaaaatacctgctttcattatttttttcttcattctttgtaattctcccctttatctgccaacaatctccccaacgtcggctctatctgcaaaaaacgttcacatttttcaatcgctgttcccgcgctttttttcgtaactcttttctcatccgctctgaccgcccgaagcaaaatatttttcggagtgtgctccatatcgataaactcaagtacctgcgtatcatatcccgcagcttctaaatattttgctctcaatccgtccgtcacaagcgccgcaaacctctccctcaaaagtccgtaatccatgatcggatccagacatccgtcataacactgcgtcttatccgctttcgcgaattgtccgttcacttcgtgctgacagcacggaaccgataatataactttggcattccaaccgatcgcttttgcaagcgcataatctgtcgccgtatcacatgcatgaagcgtcacgacgacatccacctcgttcactccttcataatccgcaatatctcctacgagaaaatgcagtttctcatacccatatttttttgcaagtccgctacaccggcgaatcacatcttccttcagatcgagtccgatcacatgaatgtcaaaccctttcagttctttcaaataataatacatcgcaaacgtaaggtatgattttccacagccgaagtcgagaattgtcaattcacgtcctttgtcaagctgtggaaggatatcttctataaattcaagaaaacggttgatctggcgaaacttatccgttttcgtccgaacgatcttcccttcttctgtcataactccgagatcatttaaaaacggaacaaaagttccttcttctaatatatagcgtttcttcctgtcatgtgaaagctctgccggaggcgccgcgctttttcggtttttccgcttgatcgaaatttttcctttcttgctcacaagaaccgtatattccgcctgaacagtctcgatctgcatctgccggaaattttccatatgacctgccagtatttccgctgcatctttgcagtttatgttttcatgaaacgcctgcgtcttcgtaaacttttctacctgaaacatgaaatcgccgtttttctcaagaggacggactttcgctttcacgacgccgtccttcgtcctcggattgctgagcaccgcacggataaattctctgtttaaaacttgtttcagcaactcaaaaatttctttcatcttccaacctctgcccgtattcgctttcaatgatctaaccgcgatcctccacaagaaatcccttatttctcaacatatcctcaatcagatccaatgtctcttcactgtcagcttctactttatggtaatgataatccgaagtaatatttttcagcggactcgactttccgttctgaatatcatccataaattccgtcacttttctgcgggatgtaatgttgatctcagcttccatatgcccgtaaactctgtggttgaccatcacattgcgcacgatcccgcccagatcgatgatctctgtcagctcttcttcaacctgcgcatctgtatgcttcactttgaacacacggcttactgctgccggctcattgataatatatcccctgttcgtagagatgatatcatatccggctgcccgtataagcgctatgtcctgcacgatcacctgacggcttacgtcatatgccgccgccaaaactttccccgcaacaggcgtcgtgctgtttctgatctgatctacaatctgttttcttctgtcagagcctgtcatctgacatcctccttaacaggatgcaggtttttcatcgaaatgtcaagtatcggagaagaatgtgttaaagctccgcttgaaatataatcaacgccaagacctgtcagacgtgcaatattctctttcgttacatttcccgaacattccgtttcagctcttccgtcaatgattctgattgcttcctgcatttcttctgtcgtcatattatcaagcatgataatatctgcgcctgcctctacagcctcttttaccatgtcgagagtttccacttcaatctcaatcttgcggacaaacggcgcatattccttcgccatttttacagcctgtgcaactcctcctgccgctccgatgtgattatccttcagcaaaactccgtccgacagattatatctgtgattatatccgccgcctgtcgtaactgcatacttctcaaaaacacgcatattcggcgtcgttttcctcgtatctaaaagtttcgttttcgtaccttccagaagttttgccacagaatgtgtatatgttgcgatcccgctcattctttgcagataattaagagccacacgctcgccggaaagaagcactctgatatcgcccttcacctttcccataagctgtcctgattttacctcatctccgtccttacagtaaagctctgttttcgtattttcatctaaaagttcaaacacccttgaaaatacgtccagtcccgcaataatcccgtcctctttacagatcaggtcaacctctcccggaacagcttctttcatcactgcgtttgtactgacatcttcacttgaaatatcttcttttaatgcctccatgatcaaatgatcggcctgtaatttcattgtaattttattcacgtttccactccttttttcgttctctcccgcctgctttgcggcggtatccgttttttctcttccgatcttctgcgccgccctttttgcgaacacaaggctttccagcaaagaattgcttgccagacgatttgctccgtgaactccgttgcagctcgtctctcctgccgcaaataaccgttccatagaagtctgactatcgctgtccacccagatgcctcccataaaataatgctgagccggaacaaccggaatcggctctttcgtcacatcgtacccttcttctttacaacgtctgtatatattcggaaaatgactcaatatcgactctgttcctatattctccatagacagccacacatgatctgttccgtctttttccatctgttcgcgaatcgcttttgtaacgacatcccgcggaagcaattcatttacaaaacgatttccctctttatcaagcagaacagctccttctccccgcactgattccgaaatcagaaatctccgccccggcttcttagaataaagcgttgtcggatgaatctgaacataatcggtatgttccagtctgattccgtgttttttcgcaatttcaagagcatctcccgtcaaatgcggaaaatttgtggaatgacggtacaatcctccgattccgccgcttgcaacgatcgtatacgctgagcgaactgcccggctcgttccgtcttgttcctgcatgacaacgcctctgcatactccgccttcctctataatatccgtcattgtcgtatattcaaaaatctctacattgtcaagctctttcacccgcgccaaaagttttcccgtaatttcttttcctgtaatatcctcatgaaataaaatcctcggacttgaatgcgccccttctcttgtatactcatatgtacgagaaatatcactgtcaccgatgacatcatcactatgctctgtcctgcgttcaaattcaacgccgtacccgatcagttccctgatgatctcctgcgaactgcggatcataatatcgaccgattcttttcggttctcataatgccccgcacgcatcgtatcttcaaaataactgtcataatcactttcatcgcgcaaaacgcagattccgccctgtgccaaaaatgaatcgctgctctccagatccgctttggtaatcatcataattttaaaatcacgcggcagattcaatgccgcaaataatcctgcgactcctgttccgacaatgaccacatcgacctgatcttgtttttcttttattttttccatatccacttcccttagcgcccctaatcttaccttactattccttaattatatctttcattttcacctgttattttgccagatcaagcatcttttccaacggtttctttgattcggcacgaagagcttcgtccatctgaacttcattttcacctgttctcaaaacatgagcgatcttttccagagtgatcattttcatatcttcacagaccggttctgtttttgtaaaatagaactttttattcggatatcttttttcaagctcatatctcacaccgttttccgtgcagatgataaattcctcagcgtcgctctttcccacacgatcaataatgccggacgtgcttccgatataatccgaaagatcaagaagcgacttcggacattcaggatgcgtcagcacttccgcttccggatgctccgctttcgcctgccttaattcctctatttttaccgtctcgtgaatcggacaatatccttcgttgtatacaaaattcttctccggcgtctgctccgccacaaaatgcgccagatttctatccggaataaagaaaatgtttttgttaggaagtgcctttacaatccgaaccgcatttgccgaagttacgcatacatccgataatcttttcagttctgccgttgaattaatatagcagacaaccgcaagatcatcatacttcttccgcatcgcacggatcgtctcctcatctgccatatgcgccatcgcacagtccgcttttgcatccggcataagaaccgtcttctgaggattcagcactttcgcactttcgcccataaacgaaacgccgcagaacacaatcgtctgctcctccaactctactgccaccttgctcaggtaaaaagaatcgccgatataatctgcaatttcctgaacttccggtcttacataataatgcgccagtatgaccgcgtttttttccttcttcaactgttcgatctcttctctaatcgtcattcgtataccctttcccgcatgaaatccatacgcctttgtttctgtcgtgatgctcattataacacttgagtttacaaatgacaagacagttgtgccgctcgccttttgcaaaaaagaatcccgaaaaacattagtctttcgggatctctcaagaggcgcagaccggatttgaaccggtgaatcagggtgttgcagacccacgccttaccacttggctactgcgccttattcatatatatatactacacatagtaaaataatatgcatagttttatcattcttttcgcaacaatacttctgttgtccgaatgataaatgaccccgacgggaatcgaacccgtgttaccgccgtgaaagggcgatgtcttaaccgcttgaccacggggccattgttttctagttctgtagcagaaccgtttttaatattatcatataacttttataattgcaagtctttttttcttattctgtcaattttttttactaaaattttttacagttttttacgattttttaaagctcattttttatagcttttttgaaaacatttcttacgttccatattctattgttttatctttaatctacactgcaaaactgccggcaggataaatcccgccggcagaaaaatctgtattttactttttataactgatcaccgttcgtcaatcaaaacaaccgtttcattaagaacgttttctgcgtgatctaagagttacagcaactgcagcgcctgctataccaagacatgcaatccacagcgctatgtttgttgtatcacctgtctgaactgctccgcctttgttcggctgctgtggctcatcttttattttctcaaaacgagcctcaatcttaataccgttcagttcttttgtgattggtgtgtcgaagtcaaacttcttatctcccacaaaccatccgaggaatttgtatccctcttttgtcgggtctgccggttttgtcagtttttctccgtcttttactttgacttcttttccgttaagtgtcactgtccattctttttcacccggtgtcggtgtgtcgatcttctcaaaacgagcttcgatcttaataccgttcagttcttctgtgatcggtgtatcgaagttaaactccttatctcctacaaaccatccgaggaatttgtatccctcttttgtcggatctgccggtttcgtcagtttttctccgtcttttactttcacttcgtttccgtcaagtgtcactgtccaaaatttctcttccggtgtcggtgtgtcgatcttctcaaaacgagcttcgatcttaataccgttcagttcttctgtgattggtgtatcgaagttaaactctttatctcctacaaaccatccgaggaatttgtatccctcttttgtcggatctgccggtttcgtcagtttctctccgtcttttacttttacttcttttccgtcaagtgtcactgtccaaactttctcttccggtgtcggagcatctgtttttgaaaggaacatctctataatgccgaccttagcatctgaccactcaattttcacatcaagaagcactgtctcattcggaagaacaaactcattcactgtcttgcccagtgttccgacaggtttccatgtatctgcttctgctaatgttctcacacttacagttgcatttgaaatcgaatctgctctctgaacaatcttaatcttattgcggtcattcttctctgatacatgataaacaaggtttccgctcttttctgccggaacaaatgatgtcgcaagattcatatctgacatataagagaattttccgttttgtgtatcgagacatgagctttcatatgtcggatcgttttcgctcggaacatacgctccgtcattgatctcaagctcgctgaagcgaacccacttgtcagaaccgacttttgttcttgttacctcgaatttcaggtaacgtgcatctttgttaatgtttgttgcttcttttgtattataagaagtttcatgattcggaagcaccgctccgatctcgtcagtatcattcgcttctccgttatttggtccatcctgtgaaccgagagtcatgatttcttcccatgtctctccgtctgtagatacagagaatttaccatgtctgatatagtcatgctcgctatcctcgcagacagctttgaacttatcgaagtggattgtctgtccgagatcgtatacgaaccaaacgccttcgttctgtgatgtctgataaacagcctctgttgctctgtttccgtcgaacgctttctcaggatctgtgatcgtataatttccgctttttgaatgcagtgatttttctttgaactctaccgtatttacaacgaattgtttcaaattgaatttcacatcatcattcgtcttgttgatcagtctgatatatcttgcatctcccggtttctttgcatcatatgttgtccactcatatgcattgagagatgtttcaagggtaagcttgtctgcattttcaagattcttctgaatatctttaatctcatgaatgcggtctaattttaagccgatatactgatctttctttaaagtaatatcattcttagcttcgatttcagcgctttcatccaacagatttgctctgtattctttgtaagcgtctacgtttgtgtaaactttcgagttaaaccatactttagagtcaacgtcaaattctctgatcgcaaaccagtttttctgtgtcgcattattcttgatacgaacatactgtgcctgaatatctttgtcagatacatcgatctctatcgtgcgtttgttttcaaatgttgcaatctttgtccatttctgaccgtcaaccgaccactccagatcacagttctgcatataatctgcatgtgtatcattattaccctggacaatcttgatctttccaagtgtgatcttctcggacagcttcactccgaaataatcacctgcgatcatagagtcaccgtttgtaggatctccctgtcttacattgtaatgtacgcttgtgccttcatcaccgtcgattgcattattttcgtttccattattgtaaacagtccaaccttctgttgtacggatcacttcttttgtaaacgtatctgccgctccgggctgcaagtctactttgaactcacgcatagaaggccatttaccagatcctcccactctcgagcactcataacgaaccgccgtaacgttctcgatttcaagtcctgccacatcaactttcgcagcatatggtccgtattcttttccgttttctaattctttccactcatcagaaccttctgcctgatatttcagttttgcgtatccgaatgtatcgtccggtttctcttttcctgcgccgttttcgatatgtacgccgtaaatagtcgtcggtttgctgaagttcacctgataatactgtccgacaccttctgctccgttgtaccatgcatacgtaccgctgttgccgtcaataatatctgccggttttccgctctgccatgtctgaaagcttgcctctgccgtaattttcaacggtctttcaacatcgcctgccacataatcgttcatcggatctgacaatgccgcttccaatgtttttgccagagggatcaaatgggtcgatcccggagttacaactgccggagacgcattgtacatctcttttgtatatgtctgggatgtcgcataacttcccgaacctgccatatacagatcaaacgcgctctgcatatcatttttctgcattgcatcctgtgcctgtgcaaaagaacggattgccgtacagagatctttcaaagagtttgtaaacggaaggatttccgctttcattgcctcgtttttgctctttgcatggaaaccgtcgcaagcttcaatgattgttgtcatctctgccacaagctgcgttgttgttgcttcttctacgtttcctgctgcaagctgtgttttataagtattgatcagaccctgaatttcttctgactccggcaatacaagtccatgtccgttcggttccgggttagacatatgtttcgcaagtgtatgaagctcttcagatgcattttcatcaatatacgcaaatgaatccgcccagctcttatccatattaaatcctgcgatattccagctataatccgcaactgcgaagatcgccggtttcgatacttctgattcctgcatcgggtttgtcaccgctcccgcaagatcttccggatttacatctgttttaagctgcacacctttacccatcataagacgtccgtgattaatgtcgtttacaggccagttgagccagaatagcggggcacgacgtttctgaccgtctgtcgttctatgagttctgaagtgatcaagcgttacctgctcgatcggtttacatactgcttctcctgtccagaagatcttgatatcttccgggaatcctttgtcatactcgttcagctctgcataattgccgcctgtaccgcctgactgccatgaatggttatatcctgccggacagaatactgtgtcatatacatcgcctttcttttttgcccactcggatacttttgtcatcatgttgatcacgatcgttctcggaaggcttccgacgtcgtcgccgagtactccgaactgacgcacgcctgcatcgtacaactgatcaaatttgcgcagaagcgcctgaatctcctgatctgcctgcgcctgattaaatcctcccataaacgggtgggctgtccaaacgaaacggcacttagaatcgtttccgacttttaccatttccttgatctttgccagttcttcttccggatataaatcacgccattttcctttgtgatactcatcgtctttcggagcaaagatataagacgtcatcttataatctccgccgaatctcataagagacattctgtcctcattcgaccacggaagtccgtaatatccttcgataaatccacggatatttacatctgcataatctctcatctcaaagttgcggatcgtagttccgtccatctgattgaagatatgcttcaaagatgtgatgccgtaaaataccgcatctgtatctaatccgaggattacgatctcacccttattagatgcgaggaaataggaaccgtgatggtcaaacaaagatttatctactgtgtaatgctccttcacatatttatctacatatccatcggagccgtagatacctgcaaggatattcgtcttgccgtcaactcttgcattggtaacagcagcgctctcactcttgcctttgatcgaaagaacttctgtcattcgattctttgtcacatcatcaacaccgttttcgtaaacaatattcacttctccgatgtcgaatcccccatcctgataagtcatctcatggggagtcgggtagatctgatattccacccctgaaacttctgcagtctgcactgcgtcagcttcctctgcctgtacggtcaacgccgacggtgcagccgatgtaagtacaactgccgccgcaagcagacctgcccacaagcctcttactgttttcattctctttctcatacatttccctctttttctagttactatagttgcccactattcctattttcttatgatatcgcactttacatttcagttatttgcactttttagcaaccgatttgtaatttatgatagttttcgcctattgcccggacttcttttgtgcaatatgtttattctattttctttattttgtttatactgcacaattatctcttttctctccgctttctttgcagtttatatagcaaaaacgttgttatagatcatgaaaaaccggagacattctttcataagtacaaaactgcgtataacctgcttttctcagcatttccttcgtttcttctatataagcgcccaagtgttccggtttatgactgtcgctccctattgtgacgatctttccgccaagctctctgtaccgttttaaaatttccgcagaaggcgtcgtgtcagaaaggccgtaccgatatgacgatgtattcacttccagacctttcccatccgctatgacaacttgcaaaatctcttcgacgatcggtttgatcttttcaaacggatagacgcccttttcatcataacgggcgatcagatccatatgcccaagcacgctgtaatccttgtattcccgaacgaccgacagcatttcctcataatacttttcattatattccttctgcgttttcccatttcaatgatccgaagttgttttcttctatcattttatcacaaagcgaaccgttttttccattctaacatttttatatacgtttcctttccacacgccgtaaagctgtaaacttgcctgctgcggcgcagacgtcctccctgaaggttctgcgcgatcagaaaccggaatatccgataatgcagaaaaggatcgccgctcacacggcaatcctttttaagtatcaattttttattttgatcttttctgcgtatctttgtttatccgttcttttttctcgtgatcatgaccactgcgcctgccgcaagtgcaagtacaaacgggaagaacggcgctgtttcgtctcctgtcttcggaggtgtctttccatcctcctgcggtgtctgaccgccgtcttttgtaaccgttactttcacagtgtcagttactttcactgcgtccgctccgcttccctgtgtcgctgtcactgtcagcttcgctgttcctttaccgactgcctttacattgccgtcagcatctaccgttgcaacttttttatcggaagaagcccatgcaaatgttacattttctgccttttccggtgtgatcttcgctgttgcctttgttgtctcgccgactttcagatctgctttcttaactgacgctttcacgcctgtaagtaccaccggtttctccggttccggatctgttccgccgtcttttattaccgttacatccacagtagctgtttttgttaccgcgctgtctccgcttccctgtgtcgctgtcacagtcagcgttgcttttccttctgcaaccgccttaacgtttccgtccttatctactgtcgcaatcttgtcatcggaagaagtccatgcaagctctacgccttctgcaccttccggcatgatcgttgctgttgcctttgttgtctcgccgactttcagttctgccttttcaactgacgctttcacgcctgtaagtaccggtttctccggttccggatctgttccgccgtcttttattaccgttacatccacagtagctgtttttgttaccgcgccgtctccgcttccctgtgtcgccgttacagtcagcgttgccgttccttctgcaaccgccttaacgtttccgtccttatctactgttgcaatcttatcatcggaagacgtccatgcaagctctacgccttctgcaccttccggcataatcgttgctgttgcctttgttgtctcgccgactttcagttctgccttttcaactgacgctgtcacgcctgtaagtaccggtttctccggctcttccggtctgtccggacggatgatcgctccgccgtctttcgcaccgtaagcctcgaactcgacgatatgatcagacgtaccctgattattttctcttccgtttacatagacacggatgtagcgagctgttacaggttcactgttttctgcgttccacatctcttttcctgctgccgtctcgacataaaactcatctttgcccgcgccctgtttatgtacattgtctttatcggagttatataccgttgtcgttttgtctgccgcaaagttctcgtctgtacttaactggatcactgtcggtccgtattttcttgagccatcccagtatcttgtcatatggatcttcgtcagatcatactcgtctccgagatcgaactgcacgtaacgggaatggttctggctgtcgctcgtatctgtcagctccagataattcgccgtactcttcacgccgtcgtttaccatattaaacggtctgtccggtttctctgccactgccgtattagcagttgcatcataagcggtaacttttactttcggattgttctttgcaagaacaacattatcttctgtatcgatcagatctttcacttcatcatatgcaagcgatctgtcgagaactgtaatataagaaacttcgtcttttgtcagaccctgcgcaaatatcgtttcgccttttgtgatctccggatttgctttatcttcgctgtatgttgaagcaaccacttttccgtcaaggtaaagtttgatcattccgttaatttcttttacagcagagaattgatgctctttaccgtcagccgcaattcctttcgtctcgcttgtgtagctgtcgtttgttttatcaaccgtcttctgatcatattttgatgtgatcttcatatcgttaaactcaaacgtcagatatccttcgccgtcaataccgactttataagcgcctttctgctctgcaagtaccacatttttcgacgcagtcttgatcttacctgttacagtaaatccgccgtgtccgtcgacagagtatttcgcttttgtcgatacagttccgtctttcagatcatcgctgatcactcctgttatgatgccgtctttaaacgcatcattctgcgcgcttacttttgaagtatttccgacagtatctgttacgccgtctacacttacgctcactgtccgggcatctttcagttccttatccaaagtcagtttcactgtacgtctgtcggctttcagttctgcctttgtcacttcgtatccgtctaccttaaacattcccgcttccggcgtacggatcgtctcgtcaaattcaacttctgcttcttttccgtttccttctacagaaaggattttcgcaggagtttcatctttctcaccaaactgcaggatcaaaacttccttcggattaagcgtgtatgtcacttccttgccatatgtaagcggttcatctgtctggtgtctctgatctcctacgacaacctttccgtaaacagttccgagatcttctccgacgccgatcagtctgtcataagttactttataactttgtgcttcattcttcggatttctgatcgagagaattccctcttttccgttccagcaggaatatccgtaaacatttccgtcattcggttttccgccgaacatctgtgatttctgaagaatgtcgaaattgtcttcgatccattttgccgcttccgcgttgatctgccatttattgtcatcaaacatggagtaactataataatactcccagaatgccgttcctctcgttccgagcatatacaggtgatttctcatctcatcatctgtatatttgatatccggtctatgataagcatcgtttgcagtcaatccgtaaaccgggtcatggttataaaaatatttgttcggaagctgccactctctttcatttaagaagttataataagcgttgtcacggtatgtaagcatcgcttcttcatccgttgcattaaagctatccgtataacctgtatctcccgtattctgcatccatacgctgttcacccactgaacgtgccacggactcgggtttgtgtaagaagtcatattaagccaaaggtcttttcccgctctgttgtcacgcatatcttcaaaaatatccgtccatctctcgtatgtctctgaaatcgtataaagcggattacctgtcacataatattcggactgctctgtcgatggatttaagagcattccatccagtttccagtagttgatatcaaacttatcctgatactcgcagaaaacatctttattcaatttcgtcagatatctcgcatcagaaatattaatatctccacccgattgattatttacagaacccaaaccattacttgcaatccaattcgcaatcgttctttctgttccatatccgcctcttggtccaagccacagtccgaagttggacgcaagctgattcacctgcagactggagttgtaaagctcattcggaaacttattattaaaatcccagaaggagctgtaattcgtccatccatcgtctacaacataagaatcaagaggagctatcccgtactgtgtgaatcctttctcaatctcgaagaaactcttctgaataatctcgtccgtgatctccttcatgttgtcgtaccatgagttgtactgctgacggaactccgtatctattgcgatcgtctcgatatattcatagaaatcgctctgtgtcacgctgtaatctctgcttcgggcagctcctacgacagcgtcccacgtcgtcatctttccgttttcgtttccttcgttatactcaaacttatcatcggatttcaatgattttccatagtagtaacggataaaggaattagaacctttaattttgttctctgtctccgggaactcacatccccagtacatcgcacctacatagtacggctgtccaagctccagataatcgcctttcattccgcccatgtcaggattgtccgccatagtgtcactgatcgtccagtattcattctgtttcagatcagtctgtgcgatgttcatattttccagatcgatataatcgatcttcgctttttctgcctgcccttccccaacagaaatatcgaggtgttttctcatgaaagaatctccgtctttcatcgtgatcacttctttgatcgtgtaatctacacctcttactctcttcggctcaaacgtaaacgtcagcgttttcactccgtccttttctgtcagttgaggttcgccctgcactttcatttcgctcgtcttaagctgtgtcgcgttatccactacagggaacgtcgctgtatcttcaaaaaagtcaaattccgaacagcaggctacgtctttgcttacatttgaatctgacgggtcatgacagtcaacaaactcgatacgcacacattttgccgtaaccttctctttcaaatttacatatgtttcttttttattatcaaaagaaccttctgcaaccggctgtgcatctgttgcctgttttaacgcatcaatactgtctcctgtatagattttataactttttacatgtccgctcactgtcggatttccttgagcatctactctctgctggtagcgaagagactggaacgacttctctgcaccaaaatcgacataaatattatgcggatatttccgttcggcatctgtgccttcgttatatttagaatgataataagtatcattctttccatcaaacatcttatccgctccgccattcgctccttcattagtcgcaacgctgtccgcctctgctgtccaaccattggtatctaattttttcttaggcgctacgaatccgctgtcttccccttcggaattattgtcaagcgtgttgattataaactcttcactgcccgcctgcggtgtgaacacagtcggagccgttccggtacgatagtttgtaatctcttttgttgacaatactttgtccgcgctcaaactgaacgttctttttaaatattcatttccgaaaacataagagccgtcagtcttttcaagcgttacgacaccgcttttcttctcaggtatctgaccctgctctgccgcagtatcttccgcatgaactgtctgagccataaacggaagggctccgccggttgtcagcgataccgcgagaaccgcagccattcccttatggaacattctctttttcataaacttctctccttctttttaaaatgtaatgtacgaatgtgctcaccacattactcccatcatcttataaatgatagcattaccccccccccaataatatttacactttttatcacttcttttgtatttttttctttttatctatgctttttgtataatatggctattttagctttatttttattgatttttttcacatatacaccatctgattgatttgccaaaggaaaatatctttcattttatacaaaagatgcctaaccgcaaatgcggccggcatcttcataaaacctgtcttatattaatgaatcatactattctttgtccgtaatttctccgtgaatttcctgaagtgatttcacttctttgcttccatgtttcttcactgcaagaattccgtttgcggcagctttcgcagcagccattgtcgtcatatacggaactttctttttgatcgcagcttttctcaaatagctgtcgtcattcttactttcttttcctgacggtgtattcacgatcatgtcaacttttccgttcgtgatcacatcaagcatattcggacggccttcctgaagcttattgatcttctctgcttcgattccgttctctttaagcaggctgcaagtatggtctgacgcaatgatcttgaatcccgcttttgcaaaatcagccgcaacttccacaacttccggcttatcacgattgcttacagagatcagcaccgtaccttcaagcggaagctttgtctgtgttgcttcctgagccttataaaatgcttcgccgaaagatttggacaatccgagcacttctccggtcgatctcatctccggtccgagcagcgggtctacttccgggaacatattgaacgggaataccgcttcttttactccgtagtacggaatgttctgctcttttaacgccggaaccggtgaaggtcttcctgtcagttcacttgtcacaatgtcgatggcaagcggaaccatgcggatattacatactttcgatacaagcggcactgttcttgacgcacgagggttcgcctccaatacgtacacttttccgttttcgatcgcatactgcatgttcataagacctttcacatgcatctcttctgcgatttttctcgtatattctttgatcgtctttacattttcttccgaaatatttttagaaggaataatacatgccgaatctccggaatgtactcccgcaagctcgatatgttccataaccgccggaacaaacgcatgtgtgccgtcgctgatcgcgtctgcttcacattctgttgcatgtccgaggaaacggtcgatcaaaatcggacggtcaggtgtcacaccgactgctgctttcatatatcctaccatgctttccgcatcatatacaacttccatgccacggccgccaagtacataagacggacgcaccataaccggataaccgatcttctcggcaatttcaagagcatcgtccaccgtaacagccattcccgactcaggcatcggaatctcaagcttatccatcatttcacggaacagatcgcggtcttccgccagatcgataacagacggagccgtacctaagatcttcacgccgtttctttccagatctgccgcaaggttcagcggagtctgtcctccgaactgcgcgatcactccgaccggtttttccttcttataaatgctcagtacgtcttccagtgtaagcggctcaaaatacagtttatcagatgtgtcatagtctgtagataccgtttcagggttacagttgacaatgatcgtctcgaaaccaagctttttcaaagcaagagacgcatgtacacagcaatagtcaaactcgattccctgtccgatacggttcggtcccccgcctaagatcatgatcttcggtttctcttcactgatcgggtttttgtccgttccgttatatgtcgaatagtaatatgctctgtcctgcgttccgcttacatgaacgccttcccacgtttcctcaacgccgaggctgattctcttattgcggatctcatcctcatccacttcaagaatctggcttaaatatttatcagagaatccgtcttttttcgccgcgataagagcattgtcttccggcaaacctcccttaaacgcaagcagagcctcttcctcttccaccagctctttcatctgctcaaggaaatagtgttttacttttgtcagttcatggatctcttctacagaagctccttttctcagcgcttcgtagataacaaagtaacgctcgcttgtcgcataccgcaaactcttgagaagctcttcttttgtttttccgtcaaaatctttcgcatgaccgagtccgtatcttcctgtctccaaagaacgaatcgctttctggaacgcttctttgaagttcttaccgatgctcattacttcgcctaccgcacgcatctgtgttccaagcttgtcttccacacctttgaatttctcaaatgcccagcgcgcgaacttgatcacaacataatctccgtcaggaacgtatttatccaatgtaccgtactttccgcacggaatatctttcagcgtcatgcctgtcgcaagcattgcggatacaagcgcgatcgggaatcctgtcgctttcgatgcaagcgccgaagaacgagacgttctcgggttgatctcgataatgatatctctgtctgtcttcggatcatgcgcccactgtacgttacagccgccgatcaccttaacagaatctactactttatgagatttttcctgcagacgctgctgaacttcttctgagatcgtaagcatcggagcggagcagaaagaatctcctgtatgaacgccgagcggatcgatattttcgataaagcatacagtgatcatattgccctctgcgtcgcggacaacttcaagttccagctcttcccatcccaagatagattcttctacaagaacctgacctacaagacttgcctgaagacctctggcgcatactgttttcaattcatctacattatatacaagaccgccgcctgcgccgcccatcgtataagcaggacgaagaactaccggatatccaagcttctccgcaatcgcaagagcctcgtctacagaatatgcaacctcgcttcgagccatctctataccgagctgatccatcgtgtgcttaaattcgattctgtcttctcctcgctcgatcgcatcgacctgtacgccgataacttctacgttatatttctccaaaacgcccgcctgcgccagttctgagcataaattaagaccggactgtccaccgagattcggcagtaatgcatcaggtctttctttttttatgatttgttctattctgtcaacattcaaaggttcaatataagtaacgtcagcaatctccggatccgtcatgattgtcgccgggtttgaattcaccaatacaatctcgtatcctaaatttctcaatgctttacaagcctgtgttccggaataatcgaattcacaagcctgtccgataatgatcgggccggagccgatgataagtaccttgtggatatcatttctttttgccatctttcttcctcctgtattgtcccatgttctcatttcattttctcaatcgaatattatacaataaattaagttttccgacaatccttaattttcacttttctctctatattttcctatatttttatcctgtattctcatcggcttttcattttttacattttttccgacttccggctttttaacttttcatatttctataagttttcacagctttaactgtccggttttttacatttttacagtttttcatcctacttccgctttgatttttttacattttcacggtttactactgctgcagcctgcttaaaacagaatatcctatcgttcctttcggcatatctactccgaagttctctgctacagtcgcccctatcaccgcaaacgtctctgcttccggaagcggacctcccgcctgcattcttttgctgtatgcaaggaaaggaacatactctctcgtatgatccgttcccttgtatgtcggatcattcccgtgatctgcggtcaggatcaatagatcatcctgcgaaagacattccagcaaaacgccgagtttctcatcaaacttttcgatctctttgccatacccttctacatttctccgatgcccccataatgcgtcaaaatcaacaaggtttacaaaacacagtcccgtaaattcctctttgcacacatcgatcgtctgttccatcccatgaacggaactttccgaatgatatgttttcgtaatcccttccccgcagaaaatgtcatgaatctttcccacgccgatcacatcattccccgcatctttcagagcatttaaaacagtgggcgccggcggcttcaacgcgtagtctctccgattgctcgtccttttaaactcaccttttttcattccgatatacggtcttgcgatcacccttcctacgcgccattcatctttcatcgtgatccgccttgcagtctcacagcaccgatacagttcttccagatcgaaagtctcttcatttccgcagatctgcataaccgaatccgccgacgtatacacgatcatagatcctgtacgaatctcttcctcgcccagctcttctataatctcagtaccgctcgcgcttttatttccgatcacctttttcccacactgtttctccagctccttgatcaattctgccggaaatccatgttccgtaaaagtccgaaacggcttttccgttttaatccccatcatctcccagtgtccggtcatcgtatcttttccgttgctcgcttcccgcatccgcatgaagcgcccctcgggagactcgacgcctttcatatctccgccgcactttaagttcagaaacccaagcctgcgaagattcggaatattcaaagtttttgttttctccaaaatatgtccgaacgtatccgcgccttcatctgcgaaccgagccgcatccggcatcgccccgatcccgagagaatcaagaacgattacaaatattcttttatacatttccattatcccatctccctgtacaacactcttatatcttgcccttattcccaataaatcaatactgtatccactttattcttatgaacagtctccccatttataccgcaatttgtaattactatactgatgataatccagatatttctccttttgaagtcttccgataacaatgtaaggcatcacattctgagtccgtgcataactacagattgcttcaaatgtaaagtctcctttttggataaaacttgcataactctccggtgacaaaagtctatctctcgcaaaaagatctgctgccgtctccttatccacatcactcccgtcatctataaatttaatacttttacctatatctccatttacaatatgtcccagttcatgaaataaagaaaaccaaaaaatatccgcaaacgctccccttatcgtcaaaaccatttgatacaccccatcgctccgccgaaaaatatacccttgcacaggcgctcctctaaaatttttcacaacagaaaaatctatgccatattctcccaatacagttttcaaatgattttgaaaatccacattcttctgacacataacattttttattttacctatcaattcgtttatatgctctacttcaaactttgttgaaacattttgattattctccaaaatttgacacaaacgaatccatgcccccaacacatttctatttaccgataagtttccggacatccgaaatgctcccccgggaattatttcatttaaatttaccaaattactaatctgcagaattttacgaagagaaagtatcgaatcatctttattttcacgactaggcatcatgcctctttctctaaagtatttcacaatttcttttaagtcttccctcacgatacgctcttcttccgtaatcgtctgtaattcatttgcttccaaaagttccgcctcatagttcgcctgaagattcagccaaaaagactttggtactccgattgcatactctaatcctctggcaaagtttgcagatatccctttctttccggcaataacattgcttacgtaagccggagaaacgcctgcactcgacgccagttcactctgtgtgattccacgttcttccaagacgtctgcaatcgtttctcccgggtgaattattaaatcacgggatataccaattttctttgctgccatgataatcactcactccttccacttctatttccgtacaaatcataaccgtatcctgttcggcattcggctcgataatcaatcttacatttgccgctacatgcaacgaatatcgaatactttcgcatccttctaactgttcaggctttcctaatctcaatttcaaaaaatctccaaaacattccgccgcttttagtctgtccatatgcttttttattgttttcacccactcaaaaggcagtttcttttgcatctttttataatctttaaagtatttttcaacttttccattcgcatatgttatttccactcaatacatcaccctcacattaaccttttggttaatttattatgtcatgttttctttttcttgtcaatcgttcctacagatactccgacccaaacccaaacggcaaaagttcttccaaccgaaggattctatacttttccctgcctgatgccaatatcaccttgaacttcttcggatcgcaaaattctgccataacctgacggcacactccgcaaggaggcgtacatactgtttctgaaatatcttttccaccgatgatgcaaattgcgcgaaacttcctttctccttcgctcaccgccttaaaaaacgcagttctctccgcacaatttgtcggtgaaaatgcagaattttctatattgcatccggtatagatcctgccgctttcagccaaaagagctgcgcctactttaaatcccgagtagggactgtatgaatacgccagttgtgcagtcgctgtctcaattaactttgcgatcattccctgcgataattccatttcacaagttccttccgccgggttttcttcttccgttttcacgatttttacaatgcggctcgttccgagtctgtctgccccaagctccagaaacttttccgcgtcttccatcgaggaaatgccgcccgccgctttcatcttcacgttaccgccgacatgatccgcaaacaggctgatatcgtcaaaagtcgcgcctgcttttgaaaaacctgtggacgttttaatataatccgctcccgaacgagtgacgatctcacacattttcactttttcttcatctgtcaaaagacatgtttctatgatcactttaagaactttactgccgcacgcatttttcagaatgcggatttcttcttcgatctgatcgtattttctgtctttcagccatccgatattgataaccatatcgatctcatccgctccgtttgcgatcgcatcttttgtctcaaattcctttacggcagtcgtctcgtaaccgttcggaaaaccgatcacagtacaaatcggaactcttccgcctacatattccgccgcttgcttcacataacttggaggaatacagactgacgccgtatcatatttcaccgcatcatcacatacctgacgaatctcatcccacacagcttcctgcgacagcaatgtgtgatccacatgccgtaaaatttctttttcattcatatccttcatttgaccgtttatttcctctctttattttccgcatttattttctttcacttatttttcccgctttttcccctcatttcttttctcgcgtttattttctttcatttatttttcccgcttatctcccccattcatttttccgtttttcttttctcccgctcttttcttctcgttgtcattttctttatatgcattctactctttttttccgttcttcggaaatcaatctgcggatcgcgtccactgccacccggatcgccatgtccgtatcgtgcactaccgggttctcaagtcctgctttctcacgttcctgattcgcgatcacaagaaaacacgagccgacccgcaccccaaggctgctcgccacaacaaacagagccgccgattccatttccgaggcaagacagccgagttgtttccacgcctcccacttatgaagcagatcgtagcctaccggctttctctccggttcatgctgaccgtaaaacgaatctttgcactgtacaactcccgtatggaacggatatccttttgatttaacagctttcacaagcgcattcgtcactgtcagatcgggcactgccggaaattcgatcggcgcatactccctgctcgttccttccatcctgattgcccctgttgacacaacgatatctccgcttttcacatctgtctgcattccgccgcaagttccgatcctgataaacgtatccgcaccgcacctacaaagttcttccattgcaatagctgccgacggtcctcctattcccgtagatgtaacgcttaccttcacttgatcgagcgttcctgtatatgtcacatactctctgttatctgcaatcaacaccgggttatctaaatattgcgcgatcttcacacatcttttcggatctccgggcataatgacgtacttcccgatttccccttttgcagtttgtatatgatactgtctgttcggatcttccgaataatttttcatctgctgttcctcctcactttgccggtaaaaacaaaaccgccgcaaaacagacaggctatttcaaaaaatcccccatctactttgcggcagtttgctctgcattttttaccttttatataatagtgaaccgcccaccggttaaatccaatggggttccggtttcaagtcagaagctgcctgacatcttaatactcaaacactgccacaccataggccggaagcgggtatgcgatcgaatacgcctgaccgtcgcattcctttttcaccggtttgtaagtaagcggacgtttttccccttttcctccgtacttttcctcatcactgttcaaaacaagcttcagcgttttcctcgtcggaacgccgactctgtaatcttctctttccacaggagtaaagttgcagacgaaaagcaaattcttttctttattcttggaatgtcttacaaagctgtaaatacttctgaaaatatcatccgcattgatccactcaaatcccgccggatcattgtccatttcataaagagctttattgtttttatacaaatgaagcagatcccgataccagttctgaatatctctgtgctcaggttcggcgagcaggaaccaatcgatctctctcttttcgctccattctctaagctgtgcaaattcctgacccatgaacagaagtttctttcccggatggcccatcataaacgcatagcctgcttttaggttggcaaatttatcgaacccaagtcccggcattttattgatcatcgaacacttcagatgaacaacttcgtcatgcgacaacacaagaatataattttcactgtatgcatactgcatcgcaaacgtcatcatatgatgtgcatttttacggaaatacggatcaagtttcatgtactccgtaaaatcgtgcatccatcccatattccatttcaggctgaaaccaaggccgtcgtcttcgggcgatcctgtcaccttcggccatgccgtcgattcttccgcgatcatcacagcgcctttgttccgtcccagaacaaccgaattcaaatgtttaaagaaatcgatcgcctcaagattctcgttgcctccgtatttgttcgcgacccactgtccgtcctgttttccgtaatcaagatagagcatcgacgcaacagcatccacacggagcccgtccacatggaaatgttcgatccagaataatgcgtttgcaatcaggaagttgcgcacttccgcttttccgtaatcaaatactttcgttccccaatccggatgttctccgagtctgggatctgcatactcgaatgtcggagttccgtcaaaatcagcaagcccgtgagcatctttcggaaaatgcgccggaacccagtcaagaatcactcctatattgtttttatgcagaaggtcaaccagatatgcaaaatcttcaggacttccgtatcttgaagtcggcgcataatatcccgtaacctgatatccccacgaaccgtcaaacggatgctctgcaatgcccatcagttctacatgagtgtatcccatctcttttacatattttacgatcgcctcggcgaactctctgtatgtgtagaatccttcatcttcccttcccgggtgacgcatccacgaacccatatgaacttcatagatcgacatcggattcttcttatgattccatgtcttccgcgctttcatccatgcgtcatccgtccatcttatacgggaaagatccgtaatacgagacgccgttcccggacgaagctccgcataatttgcaaacggatccgccttataaagaagctcgcctttctgcgtctcaatacagaacttataaagctgtccttctttcgcttccggtacaaacttcacataaatacctagaggctcctgacgctccattctgtctctttccaaattccagtcattaaattccccgactacagacacattcttcgcattcggcgcccataccgcgaaataaacgccctccgttttgtcgttcactactttatgtgcgcctaattttttatagatctcgtaatggtttccctgaccaaacaggtaatgatccaattctcctatctcataggcatgttcattcgctttcatacttgccgcatccgccgcagtgtttttcgccggactgttcgccctgttccggcttgcgccgcctgacgcctttttcaccgcactgcccgccataccgccggctgcatgattcacgatgcctttgcctgcactttttgccgcgtttctgcccgcaccttttctccttgccataaaagcccacctcgccgtttcctcataataaaatatcgaagcgtttctgcccgcttccgtgatagtttcattatacttgattccgtccaaaaaataaagagaaacagacagctctttcccgcccgtttctcttgtattttgtctatttatgcacacattttaaattatagtctattatcgtgcttctttatatattaaaatctttttcagaaagaataatacggtctgactcgtctgtatttcttccaaaaactttccgcatcaatttcttcgcggacgccttctgagaatgacggatcgcgtcatccataacttctttcacttccgcaaccgtcacaaaatgatcttccctctgcagagaatcaattttactatacagcgcaagaattcccatctcgtcaatgtgatatccgttttctttcgcatacgtctgaccgaacgtaacaagctcatcgttgatgaaaatcggcacttccagtcttgatgtgaattttttcctgaattctctgttcgatgacaacagtctgtcaagcggctttctctgctcttccaagacgatcagcatctcgcctgtatcctgctccatcgctttattaagacgcgcaactgtcttttcattcattttggacgctttctcaatgatcagagcgccgccgtaaagtttttcgacaatatcgctgatcttcttcttattcagagaatctcctgtcacgatcgcgaccttgccctgacggatgtctctttgcttctggatcgctttcacgacgtcaacggcaagaaccgtttttccgttgcctttatttccaatgataagcaagttgcccgttctcgaagtcccttttctgttcgtacagttcttatcctgctcaagcacatcgacaagctgttcgctcattccgcgcaccggaacaaagtaagaaaacagtttcttctgttcctctgtaagtccggctctcgttccgataccgctttgcatctcaaggtcatatcttccatgtacgacaaaaccggtatccattgacaatgcatccgagatctcatcgagcggaagcggcgcagtcttacctgtcgcaatcagcttcgcagtctctttacggctaagcggtgtcgtcgccgacataatgtcgatcggctcgtcatcatcaggaatctctctgtcgtcatcctctcccgaataatcaggatttactgtgaactcatcctcaatgtcctgaatctcttccgcgtcatcttccccgaagaaatactcgtcatctgcgtttccttccgcctcttcgatcacttcatccgcttcttcgtagtaatcttcttccggttcttcaatcacttcttctgactcttcatagtaatcttcttccggctcttcgatcacttcttctgactcttcatagtaatcttcttccggttcttcgatcacttcctctgattcttcatagtaatcttcctccggttcttcgatcacttcttctgattcttcatagtaatcttcttccggctcttcgatcacttcgtctgcttcttcgtagtaatcttcctccggttcttcgatcacttcctctgattcttcatagtaatcttcttccggctcttcgatcacttcgtctgcttcctcatagtagtcttcttcaaagtaatcgtcatccaaatcttcctcgaactcctcgtcgaaatcttcgtcaaagtcatcatcaaaatcatcgtcgattctaagatcctccgcaacctgacccatgttttcgcttggttcttcttttctcttaagatatactcctgtaggttctttcttttcttcttccggcgggataattccctcaatttcatcaatcatacgttgaatatccggcggtaaaatcggtgttgttttcttattcgtctccatagtatccccttttgctgtatcccctgctgaatctataacttcttcttgttccgattcggatgctccttctgcatccgtcccctcttcaaccggctcatcctctcctgcattttcttcaaatcccgaaaggatatcttccaaactgatctgacctgtaatctgatcgtcctcttttatttcagcggccgcttccgcttgcgctgcctcctccgcttgtgcggcttcttctgcttgtgccgcctcttccgctcttgcggcttcttctgcttgtgccgccttttctgctcttgcggcttcttccgctttctcctcttcttctgcctgtaatgcggcgcggcgtttttcctctttcaaacgacttaccatgtctatatctgcaaccgactcaatctctccgatcgcctgctccagatccgcaagatcttcttcatcctcgatctcatcttttcttaccggacggaatttgatctgggatgtatttcccatatccttttctttgccgaattccgactcctcttcatcctcaaagtcaaaatccatcgctcctgtttccgtcaaatcgaactccgactcttcttcgtcttcaaaatcaaagtccatcgctcccgtttccgtcaagtcaaactccggctctccttcatcttcaaagtcaaagtccatcgctcccgtttccgtcaagtcaaactccggctcttcttcattctcaaagtcgaaatccatcgctcccgtttccgttaaatcaaactccggctcttcttcatcttcaaagtcaaagtccatcgctcccgtttccgtcaaatcagattccgactcttcttcatcttcaaaattaaaatccatcggagctgtctcgtcttggaaatcatctgccgtcaattcttccaactccggatgaagaagttttctcaatgcaacgtctaacggcatcgtatctcccagtttctttttagcaggctgcctttcttcttccggctctgcggttgtctccagcacatccggtccttttattccttccggtacgcgctcctccggctcatcgactccttctgcttcggaaacatccgtcggcagatatgcgtcttctgtctgcccggcatcttccgcatctatcggcacctgctcgtcctgttcaacatgatcctctgcatcctccgccggtgaatccgcttctaacgccttgatctcgtcggcttcccacgcttccgtatctacttccaccgggtcgttcggcaaagtgatctctcttactccttctgagatcgtttccggcatcatgtccggaacaagttcctccattcccttcggaactcgtgcgttcacctgctgttcggcagcgaaatcagcatcggcaacttcggagtcggcagccataagttcagctcccggcaaaccgttttcttcttcctcctgctcggattcatctgcctctgcataagaaaaaatatcaggaatctcctctgtctcctcggacgtccttgcataacgcttatcgtacttttcctgctgggaaggagtcagtggtttgtactgcatcttcagttccatcgccttatagacatactgcccctcgctgaaccaaagaatcaaatcgtcacactcttccagacattctgatgtcataccggcttcctgatacagcttcgccagttcatatgcccactcttcaatatattcggatttcttatattcttcaagagcttcgatctgctgctcgatcggcgccctctgcgcgcggagaatcttatatcttaaaatgtactgattcgggtctttcggcgcgatctgcataaactcatcgtaaaaatcgatcgcctcatcgacatttcccgtcttaagagccaatccgcacagacggctgataatcttacggcttccttccgcccgctgatatgcaagcgtcaaaatgtcatatcccttctgatattctccggttttttcataaatttcactgacgtttgacaacatcactgcattgcgcacgcgcctccagtcaatttcatctgcgatcgccgccgctctgctgtacgcgccgctctccataagttcgagcatccgttcagtctttgatttatattcgtatttatccaccgcattcacctcattaaaaaatagttttgtacagggcagtgtctttccttctatgtttctttacatactatatctttcaatattttatcatatgcatttcgcaatgtcaaaaaaatgcaccctcaattaacattgaagatgcatttttataatctatttaattttttcatattctctttatttttaaatcggaggcaaatattagattctgttcctgtaagacctctgccattgttatttgatctgcggtcgatttattaagacctgcttattaaatcttccctccttcaattaacaaattcgagttcataacagtatccttatcacatatcacttacgttccttgtttccggtaccaccacacatattaaacccgatatgcacgaatgataatctactcaatgtttctttacacatcttttgaaattctgctatatgtggtatctatattcaatatgtctgcaaatgttaaatctttctgatctctatccggacttccaactctccgatcaattctttcgttatttttattccggatcatctatccttgagcaaaggtctcttctccacaggaacttacacttgccgtaccactaacatattgatgattcactgaaatcacgctgtccattggtctttccctcctgctatccgtttatttttaatctaatcgggcaactgatacgatgccttcttagttaaatatccttttgagatgcttttgtttttattttgttgtatctcttttggatgtctttataatatcacctgagttttattttgtcaatacatttttataaaaaactttaaataattacattttacttttatattgtatgaattttctgacaatgttgctgtctctgcaaaaaagaataaggcgtccgttaccgaacgccctattccataaaagcttaaatgtttactgccttaatcaaaagacaagttttcactatgctctttttcttctaaccgctacataagcaattaccgacattcccgcaagtacaagccacagagctacatgtgccgtatctcctgtctgtacgcttccgccctgtgacggagttgacggagtctgcggatcattcttcggcggagtctgtgtcttcgtcaaaccttctgccgctgaattcaactgtgccaaagcagcttttacctgatctgctgttgcagcctcgttatccaagattgccttagcagatttcagagcgttttcaaacttcgcccagctctctgctgtgtaaccgtcgttcttcttatctttgtacttgtcgtaagctgcctgaagctcgctcttatcaacagacggttttccggaaagcttcaatgctacgcgagcgtctcttaacgcattaagcgctgcgtctaccgctgcctgatcactgttgctgttgtcttccacgattgcttttgccgctttcagcgcatctgcatattctttccaagaatctgctgtatagtctgcctctttcagatctttatactcttcgatcaaagctttcaatgcatctgtgtttccacgctgtacaagcgctgtaaccgcatcgttcaacgcttttgctgctgcatcgatctccgtctgatctttgctgtctttcagtaccttttctgcatctgaaagaactgttttcattgctttgtaagaatctgttgtgtacaagttcgcatcagccgctttcgctgcatcgattgctgcttttaacgcctctttattgatctgctctacttttactaatgctgtatgagcatcttctaacgctttcttcgctgcgtctaccgctgcctgatcaagattgctgttgtctttcacaactttttctgccgctgtcaacgcatctgtgtacgctttccaggaatctgttgtgtagtctgcctctttcagaccttctgctttatattctgcgatcaaagctttcaacgcatctgtgtttccacgttctacaagcgcagcaaccgcatcattcaaatcttttgctttcgcatcgattgccgcctgatccttaccgtttgtcagaagttcttctgcttctgcaagaactttttccattgcattgtaagaagctgttgtatatgcgttttcgtcttttgcttttgccgcatctactgctgcctgcagtttgctcttatcaagctgcggatctaccggagcttttacgagagcttcttttgccgctttcaatgcgtctttcgccgcatctacttctgcctgtgtcttattgctgttgtctgccacgattccatttgcagcttcaagagcttcttcgtatttcacccatgtctcatgtgtgtaatccgcttctttcagttctttgtactcttcaataagagctttcaatgcatctgtgtttccgcgttttgccaatgctgcatgtgcatcttctaacactttcttcgctgcatctaccgccgcctgatcgctgttgctgttatctgttacgattgcgtttgccgcattcagagcagtctcataagcgctccatgtagatgttgtatgatcctctgctttcaaattctcttttgcgtactgatcgatcaaagctttcagatctgttacatctccgcgagcaacaagtcctttcacagcttcagttaattctgcaaccattgcgtcgatcgcatcttttgtaccgtttacaagaagctgttttgcttctgcaattttagcttttaccggctctgcgcttgttactgtacttgtttcaactttcttctctgcgtctgcgattgctgttctcagagtggatgcgtctacaagtttaccttctgcgccttccagtttcgttatcatagcagttacttcgtcctgtgtctgtgctcctgtcgccacaagatcgtaaccttctttcacgagcgctttgaatgctgccgcactgtctgtcgttgctttggatgtgtctactgctgacaatacagtcaatctttcgatcaatgctgtaatatctacgcccggtttctcttctttctccggttttgttccgaatacttcaagctctacaacatggtttgttgttgtgtcgttgttcgctcttccgtacatataaacacgaacaaactgtgcttttgttcctgccggcaacgtccatgatttgccctttgcagtttctgtatagtctgtgtcaaaattactctgaccttctttgtttaatttatgaacgttcccttcatctgcattgtagacgattgtagcttttccttctttgaagtctgtttctttttctgctacagctactactgtatcgccatatgttctaccatcaccccagtaacgatacagtgacaaggaattcacatcacatacatcccctaaatcaacctgcatataagaggattcgcgtctgttgtccgcaccaaactcagcataattatttgtgttcttagttccatctacagccatagtcatcggtctgtcgccgccttttgctgcatctgtatcatctttcgtccattttgctgttacgtttgcatctttggcgatgttctttgcttctactttttctccgtaaattgcaagatcagctactgtaatgaatttattttcattcgctgattgccagtgataggaagaaattccgctgatgcgtacatatctcgcttcctgtgccgcgaatgtgatctcctcagggaagaatgactcatcgtttgtatttgtaatcttgcttgaaagatcaagtccgttttctcctgttaccggagtccatgtcgtaccgtctttactaatctctacgatcagctttttaatattacctgtacatgcccagtaattctgtgctccattgaagtatcgcggtgtgtaatcaacctgatccaacttatatgtagctcccaaatcgactttcagccatgcgttatcgctgtttacagtgccattttctactttctgacttgtccagaatgttgttttgtctccgtccaagatcttgtctttgcttccttcacttgtcgcggaaactgtgatcatactatctgtaagttcaagtttcggaagtccttccggctctcccatcttagctacttcatcatatccgtatgcgatatcgtacacagatgccgctgtcacgccttcacctgctgtgatggcagcttttttcactgtatggaatctgttatctgcgttgtaagcagatccttccagtgttccgtctacataaagcttcagcataccgttgttttctttcacacctactactttatgctctgctccgtcattgattaccttgccggaaaccgctgtagcgccgttcagtgtgaaggatgcttttccttctgccgttactttcaactcatactgagcatcctgttttacgagagacttctctttaccgtctgtagttactgttgcagctactgtgaatccgttgttggaattcagagatttatctgctgctgcaagttctcctgctgtaacgcttccgttttcaacgatcacgttatctttgtgatatacaacagatgcagcttctgttgctttgttgccggacatatctttaatatcctgcggagttacttttactgttgcttcgtttgccggagcttctgctaattcgatatgatatgttgtatcgtctgcactcttcttaacggaagcaacttttccattttctaccttaaagaggtttcctgatactttctcatcgaacttcactgtgatttctttcgcaccgtctgtcataattctgtcgatcttcggcgctgttgtgtctttctgagctgaaacgcgtaagatacgcacttcgttcggtttcaggttcactgtatattctttgccgtactctaatgtacctgtctgagcagattcatctgaaagaagatagctgtgctctaagtagtagtttaatgtgcctgcattttctgcaacacccattgtacggtcaaatgtgaacttgatcgtcttatctgcgcttgcagacgggttacggagtgagataattccgtctgttccgtcgaagcatgagaatccgtatgcttctgcctgcgcttcgtttgagtcaaaattatttaattttgtaacatctggttttccgccgatcatcttggagtttttgagcatatggtagtttgcctctgcccactcaaggaattctcctgtaatctcgtattttccgtctgtcataatactgtcagagtagtacagctcccagaatgctgttccacgagtagaaagcatgtacagatagttctggaaatcttcatctgtagcggtattaaccgtcattcctgttccttcttttccgtaaatcggatcatggttgtaaaggttctggagcgggaactggaactgatgattcttcaggaaatcatagtaacaagcgtcacggtatgtgatctgcttgttcatctttgtcgttccaaaagatgcgtctctttgatccgctgtacactgaagccatacggagtccgcccactgtaaataccacggactcgggtttacataacatgtaagggaaatccaaagattattaatattgtcttctttttcactcttacgaactgtttccatcagatcgatccatgcttcccacagatcagtcacatgatacatctgatgataaccgcctgtcatatggtggtttgactcgctgtataccggaacaccgtctgctccgcctgcattattaaaatggttgtactgagcattgtctgcgaatccatcccatttccagtagttgacatcccattttttctgccattcaactgccatttttgtaaagttatctacatatgtgcggtcagccacgtcgatagagccgccggctttacttcctttttttgctgtctgaataatatctgctaatgtactatagaagttatatccgcctctcggtccaacccatactccgaagttacttccaaacttcttaacaagttcgctggatggtgccagttctttcgggaatttctcattaaacgtccagaaacctttgttgttaattgttgctccggattgttcgtgcgaaccttcgcttattgatccattattatatgcattccatccatcgtctactacataggaatcaagaggactgacttccgctttattcaactcgcggtcaatctcaatgaaggaattcagaatattctcatcactgatcttcatcatgttatcgaaccatgagttatactgtgtacggaactctgacggagttgcgattgacttgatgtactcgaagaagtctgcctgaataacttcctgctctgtacttcttgccgcacctgcaactgtctgccatgtcacatacttatcgtctgttgtcaactgattatcttctttcagtctgctgaacgtcttaccactgtaataacgcataaatcctgttccgtttacgatctctgtatccgctgccgggaactcacatccgaagaacattccctgaatgtagatcggctgtccgaggttcgctttgaactcttccatctgaacaacgccgccttgacctctcggaattgtccactgtgcatcggactctgccactttcagagactcaaggtcgatatagtcgatctcagcatctgccatcttgtcatccggcacgtcgatctcaaggaatttacgcatgaagtgatcgccttcgtacattacgattacttcgtcgattgaatactctacgtttttgtgagtgtacggtttgaaagaaaatgttactttcttacctgttttctctttaccgttgatcgttgccgttgtatcttcgactttgactgcctcattgccgtctttcagctctaaatcgcttgtctcaaatgcacggtcatccgtatctaccggagctttatctgcgtggagattaaattctgctccgccggcaaatctttccccattgtttgaagatgttgctacgaacttaatctgtttcgcagtacatgcttctttcaagtttacatagatcgggttcgtaccattatattcaaattcgccttctgcgatcggctctccccaatcttcggattcataatcaagtttgttttctgctgttgatgcgtacagcttgtaccccttaatatttccgtttgtgttttctccttcttttctcggtgtataagagaaagactggaatgtcacatcttttccgaatgtgattactacattatgcggatagtcctgatcaccttgtccagtcccccccccataatttgaatgccagatactctctgttcttccatctaacaagttagatgccggtccatctgagtctccgctcgcattctggtagctgtctgccgttgctgtccagccgtcacggttgattgcctctaaggtaatcgatcctttttgctctttcgttgtcttaacaacgaattcttcacttccttcttgcggagtgaaggttgttccttctccaccagttcttttgttcacaatttcagtcgtggacaattttttgtccgctgttgaaaatgttcttttgatggcatcgtttccgattgtaacagtattatctttctgctcaacggttactttaccatacggaactgcagtttcattttctgccgctccggcaactgatgttgtggagaagacgctcgtcacaaccatagctgctgcgagcgctgcactgaaaaatttctttttcataatattctctcctttccccgtgaaattgttatgtttttcacagtctgcatctattttatgataacatattccctgtcatttcggtacatccaatatccttttcgtgatatttacttaatttgtgtcaatttaatcaatgtttttttaagattttatcggtttttcttaagaattcttctttttattttccgcaatttattaagacgactataatatcctgtttatgtcaggaaataaagggaatcctgtaaataacacttaaaggagttgcattatatatgaagaaactcatttatccggcagcgcttattctgctttttattatattgacaacgacaattctgcctgccgacgccgtctacggatcgaatacggactggttttcccagcatgccgctcttgcggaaacgatccgtgacgcctgcgtggaacagcacacgcttcttcccgactggatcgatctcggaagcggaagcagcggatatcagttttcttattatggatttttaagacctgatattctgatcggatgtctgtttccgcagattcctatggtttacatcctgatcggctatatgcttgcactttatctcgcttccgttcttttatgttatatgtggctgcaaagcgaggatatttccccgttcttttccttcatcggaagcgttttatttttgactgcgggatgtcttttccatatgcatcgtcagatcatgtttgtcaattatctgccgtttttgatccttgcttttttgtgcgtgaagaaacgtaagtttcgctttctccctctttgtatgcttctgatctgcctgcacagcttctattttgcgatcgccgcatttgccgcgatcggctggtactggctgagaacggaaaaagagacattttggaaagattcgtttttcaaaaaatatatcccttccgccgttctttccgtatgcatggcggcggcgctccttctgccgacaggacttgtactgatggagcacagacgaagcggcggcggattttctcttttgaaaatattagagcttttcggaccgaatatctctatgaacggcatcttgtttaacgaatacggactggggcttacattgatctgcttttacacgatacttgccggattaaataaaaaaaatcctgccaaaaaagaattctttcctgacagcgttttatttttatctttcggattgttcggtatcttttcttacattttaaacggaacgctctacgccagaccgaagatacttattccgtttctgccgctgttcatcctgcactgcgtacgttacttaaaatcagcgcacaccgaaacagaccgcgtttcatcgtatccgctctatccgtttgccgtaatgcttccgcttggtctgctctggttcagtcaagttcagtttccgtggattttgatcgaacttggtattctgtttttattttgcctgatacaaagacggaaacaaaaccttattttgcaaatgtttaaaaatccccgcatttttgcccgggtagaattactcgtctatctgctcatactgatcgccccggtcggtatgtatattacaactgccagaaaggaaaactgggtaaagaaagcagatgtttcggcaaaagaaacttacacaaaactcgcggaaattccgatggatccgctctatcattttgacagcctgaccgaaccgcttgcaaacggaaaccgcgccccagaagcgaaaataacaagaagttctatgtattcttctgtgacaaacagcgcttactccgacttgtattatgacgtgctgaatacaccgatccgaatcaataaccggatcgcgctgcttacttccgataatccgttcatgcttcatcttcttggcgttcggtatatcgagacagaaaaagatcatattcccgccgggtatacgcctctgtattcttcggcaaaagacacggtggtcgcagagaataaacacgtgcttccgaatgtttattttacatcggatacaatctctgaaaaagagtttgaccgtttcaatcaaatcgaacagttggaagcgatttcccgcaaaaccataatagaaaacacttccactgatacggacagcgacgtttacctccccggaaagtttatcactccttttgccccgaaactgtcggcagacggcaaacttcccgatagtttgactatcaaaaagactgccgataagcatgacataatctcaaaatgtcaacaatcgttgacattttatgttgaaaatacaggttttggcaacattttgttgctttctttccaggtggataataaaacgatcgatcctgttgtcatcgacattaacaacatacgcaataagctttcgggactatttgcgccttacccaaacggaaacaatacgtttcactatcagttttcagcggacagtgactcgggtatgacaaaactaaaggttacttttccaaagggtcatttcactgtcagcaacgtacagtggcatttatgtaataaacatattttcgacgacaagaacacaattacaaaagcggtctgtgacagcagaaccgaacgcagcgccttcctttcaggcacgactgttttttccggaagcatccatgcagaaagcaacggggttctcgcgtctgcgattccgcggcaaaacggacttgagctttacatcgacggcagacgcacagatattatccgcgtaaataaagcttttgcaggagcacatatcgaaaaggggactcataagatcgaatttcgattttctcctcccggaaaacaaatcggctgtatcatcagcctgatatctctgttgtgctatttaagttacctgatttttacatttggagtctttacttcaagaaaaacacaaaatattacaacggctcaccataaaaacgcgctgtaagaaattcactataatcattataagaaagagggaactgactttgaaacgaatttacttaagcaaagaactgctcacttacatcattaccggaggaatcacaaccggagttaattacatgttatacggactttttctattttttcacgttccgtatattgcatctaacagtatcgcatggacaggcgcggttatcgccgcctatgttctgaacagaaaatgggtctttcggtcaaacagacggattcccgaagagtttttctcctttgctgctctacgatttatcacactgctcgtcgaaaacgttctgctttggcttgccgtcgatcaattatcactttctttgatcggctcaaaattaatcgtaagcgtcgtaaccgtgatcggaaactatgcgctctgcaaataccgcgttttcaaaactgccgctcatgggcaggatcaaaatatgatcagaaaggagctgctgccatatgacaatcaaaaataatcctgctgacgatgtgatcagcattatcgttccgtgttttaatgaggagagcgttctccccgctttttacagcgcggtttcagacgccgcatcctcgatcgaaggcgctgtctgcgaatttctttttatagatgacggaagttctgaccgaacggcagagatccttcagcattttacagagaaagacgagcgtgtccgttttcttacattttccagaaacttcggaaaagaagccgccatgtacgccggacttcaaaatgcatcgggagactactgtgtatttatggacgccgatctgcagcatccgcccgctctgcttaaaaacatgtatcacgctgtcaaatacgaaggatacgactgctgtgcaggacttagagaggaccgaaccggagaaaatccgatccgcacgttcttatcccgctctttctatcacttgatcgggaacgcatgtcatctcgatatgggagacggaaaaggtgatttccgaatgatgaacagagctatgacggactctattttggaactcaaagaatacaaccgctatatgaaagggatcttctctttcgttggatttgatacaaaatggattccgtttcacaacactgagcgcgccgcaggaaaaacaaaatggaatttccgctctctgttccgctatgcaatggacggaatgttatcattttcttccgcccccgcttccctgcccggcttcatcggcatgtttctcctgatcgccgccgttgtcacaggacttgtttccgttttcaccggacataaagcaaactggatccttctgcttgtctgcctgatcctcgcgttgaacggcatacagatgatcttcctgtcactgctcggacaatatatgtcgaaagattatatggaaagcaagaaacgaccgatctatattataaaaaagaaaggggggttttaacccctccttttctacgacagctctaagtttcctgtataaagctgataatacgttcctttctgtgacagcaactcatcatgtgttccacgttcgataatacgtccgtgttccagcaccatgatcgcatcgctgtttcggatcgtcgaaagtctgtgggcgattacaaatactgtacgccctttcataaggttatccatacctttttgaacgatactttctgttcttgtgtcaatagacgatgtcgcttcatccaggatcagtaccggcggatcggcaatggcagctcttgcgatcgcaagaagctgacgctgtccttgagacagttcttctccgtctccgctcaagcgcgtctcataacctttcggaagcattctgatgaatccgtctgcatgagccagctctgctgccttataaacttcctcatctgtcgcatccagtttcccgtaacgaatgttttccataatcgttcctgtaaacaaatgtgtatcttgaagaacgataccaagcgatcttcgcagatcagcctttttaatcttgtttatattaatatcatcataacggatctttccgtcctgaacatcatagaaacgattgatcaggtttgtgatcgttgtctttcccgctcccgtcgaaccgacaaaagcaagtttttgtcccggcttcgcgtacagagtcagatcatgaagcaccatgtggtcttccgtatatccgaacgtcatatcataaaatctcacgtcgcctttcagctccgtatatgtcactgtgccgtctgcctgatgcggatgtttccatgcccacaagcctgttctttctttacactccgtaagatttccctgtgcatccttctttgcgtttacaagagtaacatatccttcgtctacttccggctcttcatccatcatattaaaaatacgttccgcacctgcaagagccatgatgattgagttaaactgctgggcaatctgcataaacggctgagtaaagctcttcgtaaactgaagataagacgccatcacgccaagcgtaatgtttccgatgccgagtaccgaaagcgcgccgcccagtacagcagtcaaaacgaactgtaagtttcccatatttccgataaccggacccatgatacttgcaaacgtatgtgcctttgatgaactgacgaacagactttcattcagctgatcgaattcttcttccgaaatccgttcatggttaaatactttcacgacccgctgtcccgtcatacgctcttccacaaatcccgtgatatttgccagatcaagctgctgccgtacaaagtattttccgctgtttcctccgaccattctcgcaacagccgtcatcaccccgatcatcacaacggcgagaactgtcaggatcggacttaaaacaagcatcgcaataaatgtgactacgatcgtaagagccgacataagcacctgcgggatcgactgattgatcatctgacgaagcgtatccgtatcgtttgtataaaggctcatgatcgaaccgtttgtattccggtcaaaataacggatcggcagtttctgcatatgttcaaacatctcgtcgcggacacgtttcagcacgccctgcccgatcacgaccataagtctcgtgtaaatgaaggaggcaattacgccgctcaagaaaatacatgccaatataccaagcgcctgatacagttctgtgtaatccggacttttttgcccgatcagcgggataatataatcatccagcagaaacttcagcgacaatgagaccgagatcgtcgcaatcgaactgacaagaatacagatcagtacgataataaactgtactttatatgttttcgtcacatatccgagtagacgttttgctgtttttaatgtatttttattcaacgacggttttgtcggtttcttttctttactcactgtcctttcctcctttcatctgtgattcatatacttccctgtaaatcgcattcgttttcagcaattcctccgatgttccgattccgctgatctctcctttgtccattacgataataacatccgcatcctctaccgaagaaactctctgcgcaatgatgatccgtgtcgtatccggaatctcttctctgaaagcctgacgaatcagcgcgtctgttttcgtatctaccgcgcttgtcgagtcgtccagaataaggatcttcggctttttcaaaagcgcccttgcaatacaaagtctctgcttctgaccgcctgacacattatttccgccttctacgatcatcgtctcatattgattcggaaactctctgataaatccgtccgcctgcgccagcttacatacgcgttctacttccgcatcacttgcagtttcatcaccccaacggatgttctcatagatacttcctgtaaaaagtacatttttctgaagaacgacagacacctgatcccgcaaagctttcaaattataatcccgcacgtctgttccgccgactttcactgttcccgacgtcacatcatacagtctcgggatcaactgcacgagcgttgacttagcgcttcccgtaccgccgatgattccgacgatctgaccgctctttatatgaaggtttacatctttcaacgaaagattgcctccctctcccgcataactgaagttcacatgttcaaattcgatatctccgtttgtaacttccgtaactgcatccgctttgtcttccatttccggtacttcatccaaaacttcgttgatacgttccgtagacgcttccgcgatcatgatcataacgaatacaaacgacaccatcataagagacgtcagtatctgaagtgcatagacgatcacacttgtcagctctcctgtaagcatatctccgcttatgatactttcgccgccgatcagcaccattgcaagaacgactatatacatagtaaactgcatcgtcggagagttccaggcaacgattttctctgcttttgtaaaaagccggaatacaatacccgagatctttccgaatttttcaacttcatggtcttcccgaacgtacgctttcacgacgcgggctgcgttgacgttttcctgaacgacattattcaattcgtcatattcgtcaaacaccttgataaaatgcgggtgcgctttctttgcgataaagatcaaaagtcctcccaaaaccggaatcgtgatcaacatcataaatgcgatcgcaggactgatcgtcaccgtcatgatcagggacatcacgatcatgatcggcgctcttgcgagcagacggatcgtaaacatatacgccatctgtacattcgtaatgtcggtcgtcagtcttgtcacaagacccggcgttgaaaaatgatcgatattaccgaatgaaaaatcttgtattttataaaaaatatcatgtcttaaatttttagcatatcccgaagacgctaccgccgcaagctgacctgccttcgctccgaaaaaaagcgccacgaccgcaagcagtacgagcaaagcgcccagctttatgatatatgccatatctccgttcatgatccccacatcaataatcttcgccatcaaaagcggaatgagaacttccacaaacacttccgcggctacaagaacaggtgtcagaaacgattgtttcttatactcgcgcactgagcgcagtaattttttatccatcttttctattagctcctctctctactattgatttttgtttacatgctgctttctttcccccgaactgtttccctcccggcacagtttcctttgatcggctttgatcacactgcgccggctgccgccgtcttttgtttttcggtacagcatttttcatcttcaaacaaattggcggaaatcagttccagcgtttctatacaaaccgccattttttcatcaggtatcccctgacggatgattttttccgtacgatcaatgttcatcaatacatgttctctgactttttccgctttctctgtcggcacgatctttttcagccgcgcatcccggtcttctgctttccgcaaaataaatccgtttttttctaaaagctgtaagattcccgtcgctgtggatctccggatctgaaattccgcctcaacatccttctggtaaatatccctgctcattgactgaagcaatatgtaatgaagtacatgcctttgcatatttgtcaaagaatcctcttcctcatgacaattcattctccgcttcagttgatgcgagatccgattgatgatctttcctacgtcacaccgctcttccataatccatcctcttctctttctgatttccgtatccgcatttttcgtattgacttttccttttttacgaagtcgtttgacctctgtattatgcacaaaattataatagttcgggtgctaacaatatagtatatgtagcaaaatttttaatgtcaatccttttttctgtattatttttcaattttctgtattattttataatttatactattttgacgaattttttactattttgcacaataaagtatggcattttcacgaatagaattgtataataaaggggagtaaattataagggaggactcaagcatgaaacaaaataatatgttagccatgatcttggccggtggacgcggttcccgtcttcatgacctgacccagaaagtcgccaaaccggctgtttcatacggcggaaaatatcggattattgattttccactcagcaactgtgccaacagcggaatcgacgttgtaggcgtattgactcagtacgaatccattcttctcaacagctatgtagctgccggaagacgttggggattggacgcgaaagacagcggcgtctatgtactcccgccccgtgaaaaatcagatgccaatcttgatgtttaccgtggaactgccgatgcgatttcacaaaacatagactttatcgacacgtattctccggaatatcttcttattctctccggcgaccatatttacaaaatgaactatgcaaggatgctcgcattccacaaagagagtaaagccgacgcgacaatcgcagtcattgaagttccgatgaaagaagcgagccgattcggtatcatgaacaccgatgaaacaggacgcatcgtagaatttgaagagaagccggaacacccgaagagcaatcttgcttccatgggtatctatatcttcaactggaaactgcttcgcaaaacgcttcttgccgatatgaagaacgcggattccagccacgatttcggaaaagacattatcccggcgcttctcaatgacgagaagaagctctgcgcttacaaatataagggatactggaaagacgtcggaacgatcgactccctctgggaagcaaacatggatcttcttgacaaaaacaatgcacttgacctgaacgatccggcatggaagatttacacagaggacgtaacggctcttccgcagtatatcggcgccgacgctgttgttgaccgcgcttttatcacacaaggctgcgttgtcaacggtaaagttaaaaattctgtcctgtttacaggagcaaaagttgccgaaggagcacaggttatagacagtgttcttatgccgggggcagaagttgccgaaggagctgtcgttacacgcacgctcgttgcagacggtgtcaagatcggtaaaaacgccgttgtcggaagcgctgacagcaagaatatcgaacttgtggcaaaacgtgtaaagggggatgaataatatgaacagagcttttggaattataaattttgccggaaatcatattaaagtagacggtcttcaggattttcgtcctgtcggcgctttctctttcctcggacgttaccgcatcattgattttccgatttctaatatgagcaacagcggaattgacaatatcgaagtatttatcagaagaaaacctcgctcccttacagagcacctcggaacaggccgccattacaacatcaactcaaaacgcggcagtctgaatatcatgtatacagaacacggtcagatcggcgacatttacagtaccgacattaccgcttatatggaaaacatagagtgcctcgaggagatgcctcatgaatacgttgtcatagctccgagttatatggtttacaaagctgattacagcgaatttctcgacgctcatatcgaatccggcgcggacatctctatgatgtatcactcggtcgataacgccaaagacgcttttttgaactgtaacgctttgaatatcaacaaacaaaaaggagttcttgcaatcgaaccgaatcacggaaatgcgaaaaaccgcaacatttccatggatacatatgttatgaaaaaagatctcttcatcgaacttgttcgcaaagcaagcaaaagatcatctatgtacacgtttgccgacattcttgatgaagaatccgaaaatcttgatattcgtgcggtatcccaccgtgggttctttgcgatcattaatgattttaacgcatattatcaggcaaatatgtctcttgtagacctgaataatgccggaagtcttttcgacaaagactggccgatctacacgcacacgaacgattcctgtccgactcagtattttgaaggaagcaaggtgacttcttctgttgtttccaatggatgcctgatcgaaggaacagttgaaaattccatcatcggaagaggatgtgttatcaaatccggcgctattgtaaagaattgtatcatatctgccgatgttgttatcggaaaaggcgttcatgcggaaaatctcgtcgtagataaacatgcgcgtctcatccgcggaaaacgtatcatcgccgctcctgaaaaaccgggatatgtaaaacgaggcgataaactttaagttttaaaataaatgaatgtaaaccttcaagattttccctcttgattattcagggagtacatggtcgaacatgcgtcatgtactccctgcccctttttctggattttctccattttttcctgtataatgatctgtatctgaaactgcttacatacacccgaaaaggagtacgaactataatgttaaaatcttatatcgccttcgatcttgaaacaacagggttagatccgatgaacaatgaaattatagaaataggcgctttaaaagtcagagacggaaaagtcagcgaacgctttatggaatttatcaaaccgcaggaactcatttcgcccgccatcacaggcctaaccggtatatcaaacgatatggtcgcatctgctcgtcctgcccgttctgttatcacagactttattgatttttgcgaagaagatattctcataggtcacaacatcatctttgattacagttttacaaagtgtacggctgcccgtgaaggacttccgtttgaaaaaatgggaatcgatactttaaaaatcgccaaaaaagtgcatcccgaactagaatccaaaagccttagcgctttatgcgaacattataaaatagaaaataaggcagcccaccgcgcttattttgacgcgcttgcaactgccaaattatatcagacgctctcccattattttgaacctgacaatccaaagacgttcaaaccgacacagcttacatataagatcaggaagcctcagcctgccacaccaaaacagcttgctcttcttgaacgtctgacaaaaaataaaaaaacgttttctcataatacagaagcgttctcttgcaatgcagaagcgctctcttataatccggaaacgctttcacgaagcgatgcttccaggctgatcgacagattactgaaagggaattgattcttacattttccacatataatcttcaactatttcaaacggcgcaggtccgattttcagcacagccgaatgaaattccttttgtaagaaatcttttcctttctcgtcaacccacattttctttaattcaaggaattctacatacccgatatagtatttcagatagttggcaggcgaaccgaggatcagcttatagatttcgccgactgcatctttatctgtaatcccgtagtttttaaaaaatgcttccgtatcttcgacgctccacccgtcataatggattccgatatccgcaagggcataaagcgccagtatgatagaggcgtttttctgtaaaagggtcgcctgctctttggaaagccccatcagataataactgcccatttccgcataagtcgcccatccttccacatatccgccgaaatcaagaagacttctgattggatcaggatgcgtactttcataataaatcgtctgataaagatgtcccggatatccttcatgagcaagtgtcgtaaaaagcgtcatatcgtttcccatgcgcgccctgttaatatagatcacgttttgctgtgaattatcgatcgcgggtatcatgtaaaacgcaggacttagatgttcctccattgcctccggaacatactttacttccagctttgtctgaggcggttccggaaacgcagttttcgatccttcttttaactgttccaatatctgctctgcctttttatctgtgatcaccgccgcagcttccttagcttcctttgttgtcagaccgagcacttgctccatcgccgtaagatcttcgtttatctgtctgcgtgtcaaatcttttagttcctctaccgaacgtcttgaaccggttgactgccgggcaagaagttcgtaatattccttccccttcggaaaatatacaagacctttttcatttttacccgatcctttgagctgttccagttcctccgtcatacgctcatacgcaggaaacacataatcggatattgcaagtgcattttcctgtatatagtcacttttttctttctctgtcaatgtatttaattccatcactcgatctgcaaacgtcgaatacaagtaatttccgttccccatttccaaaaaggcgcggcactgcccgatcactgtttccaccgcctgatccggcatgaacaaacccatctctgcctttttcttttcaaatatcatgatctcttcaaaatattcttccgtctgtcttacaagcgccagatatacttccacatcttccttatcataaaaacgatattctgataaaactaccggaagctgtgtctgcactccgcttacaagcccgagcggttcttcatacattgtataatccgcgctctttttcatcagctttaaccgataatttaaaatgtcatatgtaatcttattttgtacgttaagatcatcatagttgaatccaagaagagcctgacgcatattttccgccgccgccttgactgcttccggctctctttcaaactgaccgaatgtagcgtcagttgcttcaatcccatatttttccggcgctttaagcgtataatgcagactcactgtatttgccgacacttctttgcagaatagttccgccgtgtattcttcaaatcttgcatcttcactttgcctttttcctgcgcttttcgcaccttttgctccctgcttactctccattgagcatccgcccactgacgccacagaaaatacaagtattataacgagcaaaagattcaaaattttgaaatatattcgtttcttttgattattatttactttctctttgccgttacatttccatatcggcataataacccccgaatcttcttttactgcatcctatgttatatccggccttaatatacattgctttttcttattttaggaatggatcttcctgccgtacatataatcaaataatccgtacattctgtaaaggaaggtttattatgcagcttctcgtctatatttcaaactatattgttccgttccttatactaagcatcatcgtttacggtctgtccgcaaaggtcaatgtttacgaaacatttatcaaaggagcaaaaagcggtttttttacagtcgttcggatcatgccgacgcttatcggacttatggcggccgtcggaatactccgcgcttccgggttccttgatttcatttccggtctgcttgaaaactttaccggaaggatcggttttcccggcgaactcgttccgcttactatcgtaaaaatgttctcttcgtctgcagcgacaggactcctcctcgatattttcaaacaattcggcacagactcccgtcttggtatgatcgcatcgatctcgctgtcttgtacagagacaatcttctatacgatgagtgtttactttatgactgccggaatcaaaaaatcccgctacacgctcgccggtgcgcttatcgctacattcgcgggacttgccgcaagcgtcctcctcgcataacctgagcagcatctaagtgccggttttatttaaggctttgaatatggttcggtttaagacttgaacgtcggtccgatttaagatttgagtatggctcggcttaagacttgaacgtcggtccgatttaagatttgagtatggctcggcttaagacttgaacgtcggttcggtatttgaacatcggtttttgtttaggattgtagaccgaggcgctttatgctaatatattactataatgtgatcatggaggtgtttttatggcaagtgtgacattagaacacttatcgaaaatttactcaaacggtttcgtctccgtcaatgatgtcagtcttcgtgttgacaacggcgaattcattactcttcacggtcccagcggatgcggaaaatctacgatcctccgcatgatcggcggattagaggatatcacttccggtaagatttatctcagtgatgaattattaaacgatattttgccgcgtgacagacggcttgcgatggcgttccaaaattatacgctttacaagcattttaacgcctacgacaacatggcgctcggtctgcgtctgagggattttccccgcaacattatcgacagccgtgtaaacgatgccgccaaacttctcgggatttcaggagttctggggcagaagatcaaggcgctttctgaaagagacaagcaaaaagtcgctctcggacgcgcgattgtctgccagccgaaagtcctcctcgtagacgaagattttgcgcgtcaagatcctgaacgaagaaaagagatgctttgtgatattctcgaaattaacgaagaacttaaaattaccgtcttatatgtaacaaacgatcctttggaagcccgcacattaggcaaaaagatcgtatttatgaaagacggcaaaataaccgatatcggataacctccggtatcggttattttttagtttccttcaccactttttagtttttcaagatagttataaatttctcttttctgcactcctcgatcttttgcggttttcttcatcgcttcttttttatcgattccctgcgacagataatactccatatgttcttcgatcgacagattactccacttcttttgctcttcctgctcgatctcttcacggctcaatccttcaattacaagaacgcactcccctttcggaagattttcttcataataagaaaccgcttccaaaagagtcgatctatacacagtttcatgccgttttgtcagttcccggcatacgcttacccgcctgtcgccgagccgctctcccagcatcttcaatgttttgataagacggtgcggagcttcatacaaaacgattgtcctctgttccttttccagacaacttaagacagcttcccgctcttttttatctgatggcagaaaagcttcaaacgcaaatcttcttgtcggaagtcccgagatcgtaagtgcagacacacacgccgaagctccgggaacagcagtaaccgtaatcccttcttcataacacatacgtacaagctcttctcccggatcggagatcccgggcgttcccgcgtctgtaataagcgcaatatcttttccttccaaaagcttctctataagcactcttcctttatcaaatttattgtattcatggtagctcgtcatcggcgtttcaatctcaaaataattcaaaagcctaatgctgttacgtgtgtcttccgccgcgataagatctgcctcccgaagcactcgaagaactcgaaatgtaatatcttctaaattcccgatgggcgtcgcacacaaatagagagttcctgccatctttccctcctgtttttctcttcgtctctttttgttttctgttttcttttcttgttgtctatttttttatttctttatttgttttttcatttcttttttatatctttttaattcttatttattttaccttttcatttctttttatttataaatcacaagcggcggttctaccgtgatacgcggctttgccccgcgtacgccttctatcattaccatcgtcggctctttatcaagatacggataaataaactgaatccgtttcggctcaattttataataattcattttaatcataatctccgtcagcctgaatggacggtgtatcatataaaatcttcccttatcctgcaaaaggcgcatactctcccgcaaaatatcatcaagtgaacaaagcacctcatgccgtgcgatcgccttggcgtccgccggattgcgaagtccgtgatctgcgatcatgtacggcggatttgtcgtgatcacatcaaaaaaggccggcttaaatatttccgccgcctctttgatgtcgcctgtcacaatatccactttatcttctaaaccgttatagtctacacttcttcgagccatctctgccatctccggctgaatctccagacctgtaaaatgacgtccctgcgtcttttcagacaacagtatcggtataatcccgttccctgttcccagatcaagagcccgctcccccgcctttattttcacaaaatccgaaagaaaaacagcatctacgccaaaacagaatttcttcggatcctgaatcaattcaagaccgttaagctgcagatcatccagtcgctcgcccggaaaaagaaccgcttctttccccttcttttgtccgctcatatgccgctacctactccttttcaagttccgcaagctgcttcatctcttcttttgtaactttctgtttctttcgtctcggtttaaatttcagctcatccgccatatattctctgatctctttctcatcgttttccaaatttacgattacttttaccaatctgcgcagaacgctcaatgaatggacaactcctgtaagtccgtcttttgtcgtaaccgcatccccgactgacggaagctggctgttaagcatctcatacgtctcttcttcattcgtcagacaacacataagccttccgcacacacctgatatcttcgtcggattcagagacagattctgttctttcgccatcttaatcgacacagcggaaaattcagtcaaatatgtgctgcagcaaagcggccgcccgcagataccgatccccccgcggatcttcgtctcgtcacgcactccgatctgacgaagttcgatccttgtgcgaaatactgcggcaagatcttttacaagctctctaaaatcaattcttccgtctgctgtgaaataaaataatatcttattcccatcaaaagtgtactcaacgtcgattaatttcatttccagtccatgcttacggattttttcaaggcagatcttaaacgcctctttttctttctgtttgtttttatttacaactttctgatcctgctcagtcgcaatcctgatcactgatttcaacggctggatcacatcttcttcggcaacttcttttactccgcttacaactcgcccgaactctacgccgcgggcagtttccacgatcacattgtcgccttgcttaatatcaaactgtccgggagaaaaaaaataaattttcccggcagtacgaaatctgactccgattacttttaccattttgtcaattctcctttatcgtcagcaggagcagttccatcgtcagctcaaaatttacattcgctttcattcttgcctttgccttttcaagagaatcgagaatattttcaatcccctcgtatgagctcttcttcgcccgctcccgaatatatttcatctgatcggaaaacacgacccgatccacacttcttgttgctttatagatcaacacatctctgtaccatatcgcgatcatatcaagataatcgctgatctccatcttatatatcatgcagcgttttaccgcttccatcagatccggaactgtcatctcgtcgatatttctcagcaaatgtacaacttcctctttaatctcattgaaatattcggagtttgccaacatgatcgccttccccatatttccctgagcaaaagcaacgcagacatctgctttataatccggcacttccaactgctccatgagatattttttcacgagctgatctttaatattgcgaagcttcatcataacacatcttgaacggatcgtcggaagaagtgtctccgcattctccgtcagaagcatgataacggcatactccggcggttcttcgattgttttcaaaagcgcgttctgcgcctccacgctcatcatatccgcatctgctataatatagattttatatttgctgctgtacggccggatcataatatcgtcattcacctgcgtacggatatctcctactccgatcgtattcggtttctcatgcatgatccggataatatccggctgatttccgcctgccgcctgcctgcacgaacggcattttccacaggcgtcgccgtcttcatcccggttttcacattgcaggctcatggcaaacaaattcgcaagcagcttcttccctgaacctctctcgccattcaaaatatacgcatgagaaactgcgtccgcagtcactgcgttctgaatgtacttaataatattcttatgtcctactacgtctttaaaaccactcatccatatcacctgcactcttaaaattaattttccaaaatgcctctcagaagacgtttccctttcaagacatactcctattgtactacaattttaaattaaaaggtattacaaaagagtgaaatctcataaaaactgataaaatctatcttatttcttcaatatatctttgtattttattcagacactctgtgaaatcttcattgccaaaccgctctgtaatcccgcttttgataagattttcttccgaaaagtcctcctcgtccgcaagaaaacggcggcacatctccgcatatttcggcttctcctgtctgcgttcccgctcaagcgcgcgggcaagccgcagtccgtcttccacttcgagataaaccggcacgatcgcctcctctccgaaatattcccgcaaagcctgatatgacacgagcgttccgatcaaaagataatctgcggcgcttagatcgatctgcccgtcatccgcagtaaaataagtccatattccgcactttgtgttataagaccgggactctatcaccttcccgtcctccttcatcgcacgaaactgttccggatccacaaaataatattcgacgccgtctttttcgccttctctgatcggacgggtcgtatagggaacaatcaaacgaaactctttatattgctcttttaactttttataaacagtatcctttcccgaagaactctttcccatcacacaataaattttacccatttatcaatacctcaatctttcctttcacctttgttccctcaatccgaaatcccattttttcatactcggacatctcttccgctattttctctgagatccgttctcccggaacgatcagcgggatccccggtggataaatataggcatattctgccgcgacctttccgccgcacattttccattcaacagattcgcatcccttttttaaacgctgtcgtttcgtctcgctcggactatagatatatatattcttctgatgatcccgttctttcttgtccttcaatatatattgatatgtatctgaatcctgcactatatatcgcgccagagaattatttctttcatacttatctctttttgcaagttcgccgtcaatttcttccaatgcagacacaaggcgctccatcccttcgtctgtatctgccggcgaagtcatcaaaacaacgtatgagcctgatgccatctccggttgtagtaaatatttatctttcaaaacgtcatataattgttttcctgtaaacctatttatgtcttcatcgccatgattcccaaccgcagttactatcttcgacctgtcatacttctccgtctcaatcagtttcaacacagaaagcctgcttattctctttcttacagattccagacgcttcacataattgtcaaaaacatctgagcttctctctcccacgaaacgaacacactcgtctattcctgccataagtatatatgacggactgctcgattgaagcatatggacgtactctctgatatccgttctgttagccagctctccattcatatgaagcagcgcagtctgagtcaacgacggaagcgtcttgtgcagactatgaataacgatatctgcccctaaagtattactgttctttggaaaatacggatggaacccgaaatgtgccccatgcgcctcatccatgatcaatggaatgcccttttcatgaacaattccggcaatccgctcaacatccgaaacaacgccttcatacgtcggagatgtaatgacaacaatcttcacattcggattttcctcaagaatccgcttaacttcaccgggatttattgctccgttttcaggataaatataaatcggatgaagttggttcataaagactgcgttatagaccgatttatgacagtttcttgccattaaaatacaatctcccgagtttgtgcttcccataaccgcactcagcagcccgactgtgctcccgttcacaaggtaatgcgtttcctccgcatgatatacgcacgccgcatactcctgcagttccttcagtatcccctccgaatgatgaagatcgtcaaatccgtcgatttctgtgatatccagttcatatggaagttctgatccaatcagcgcagtattccttttatgccccggcatatgaaacggataataacccgtgttcgcatattcctttaattttctatataaatgctccatcatatccctccggtcaccctgtcctctgtacatcggttcttttctcttgtttctttacatcgtcatatcactgctttattctaacacagagctttatgattgactatggctatatacaaaaaagcagcggcatcctctgccgctgctctcatttccaaaatcacgttattttatgattttttctttcttctgatcataacacctgctgccaccgctaaagcaagcgccgccattcccagcgttcccgcaaacgaattatgatctccggtctgcaccgctcccggattctgtggttttacagtcggggtcggctgttccggtttcaccggattttggggtttcacatatgtattaacgaattgcggcgtcctgccgtctccgtataccgcctctgcgatcaaattgccttttccgttgtctgtaaccgtaatcgttacattgtatacggtttcgtcgtatgttacatttttctgcccatcatttttctcagaaattgtgtattcatatacgcccgcccggtcatagatcagcgtctcaaacataacctgtccgtctgcgccgttcttcgcttcaaacacaacgtttccatccttgtctttgagcacgaacgtaaactgtttgtctttcagctccgctcccttataagtcttggaagctccgagcgttaccgacgccggacgagcttcgtagatatttcggaatacgatgccgttcatatcttctccgctcttcgtctctgctttcgcgctcaatgtaccgtcgccgttatctgtcacaatgacagtcaccgtatgctctgccgaatcgtattgtacgcctccggctgtaccttccacctcgcggatcacataattgtatgtgcctgcttctgtgtaatgcagagctccgaaacgaaccgttccgtccgcctcattcactgccgaagccacaacatttccggactcatcgatgagttcaaatgtaaattctccctcgtgcagatcacgtccagtcagctcttttttgatgctgatatgttcattcacactgtaatctgtcggatttacacggtatgtgtttgtaaactcaaatgcgaaatcattctgccatgaggaaacggcgctgatcgttccgtcgccgttgtctgtcacggttactgtaaacgtctttccttccgcagccgccaaatcgttcgtcacgcccgccatgctgccggactctgtcactctataagtataaacttttgtccgaggctcgctgaatctgttcgcctgacctgcttcttgcgcgttcattgttccggcttgatcaacgacgtttccgccgtccgccgaagccgctcctgccgcttctttgtcctgatcttctccgcttgatccggcgttcgatccgccgtttgcttcaatgtctgtttcatctgtttccggcgctttcgttccttctgttccgtctcccgccgtttcttctgacgccgcgttttctgccgcgtctgccgcatcttctgccgccgtcttatcttccgctgtatcggctgccgccgggtcttgtcctgcttccgcattctgatttgtatccgccgggtcttctcctgcttccacatcctgatttgcatttgtctgctcatcctgactttccgctgaaccaaatacattttccatcgtatagacaagttttccgaaatcgatatttcctgccgcatcgttcgtcgtctctgtcacgactttgccgtcttttacaggcatcggcgcaggatttccaagttcatctgttcctgtgatcgtaaatgtatactttcctgctatatccggcgcgttgacggattctttctcatatactttctttccgttcagcgcgatctctgcatttgcagacttgccgtatacattctcaaacggaagcgaatcttttccgtcaggatatttcacttcgatcgccagcgttccgtcgccgcggtctgtaacgatcacctggatcgcaaatgtcgtcgcaatacctgtcactccgccggacgggttgtcttccgtcaccgtatagtcatatgtgtagacatatgccggagcctgagactttttgtctacggatgcgattcctgctttcacatctgccattagtctgtctgtatcgtagcttaccggagcaaacgtaatgcttccgtccgccgcgttcgtacctgtcgcctcggcgtctttgccgacaaccggatttccttttttatcaaatattctaaacgtaaattctccgtctgtcagcggtctgtttgccagcgtctttgtcgcgttgatcttcacgcttccttctccgccaagctcgaccggttcgtcgttgtatgtatttacaaacgatatagtcgcttttttctgaccgacttctcctgttgttacttcctgctcgtccacgatcacttcctgaccgtcttttactttcgtaacccgtgtcgttaccgtcagcgtcgaattgttattatcttttactttgactgttacggttcttacatctgtatcatacgtataagctgtatttgttcccgccgtctccgccgcttcataggtaaacgtcttgcctgcgtctgcctgcgtaaatgtaacgttctttccgtcgagtacgttgatcgtcgtcactgcgcctgcttctgcggcttcattcttatatgtatttgccgcattcgcaagtccgaatttttccgccgcttcttccgcagtcgtgcttccttccgtcgctttcggcgtcactgtaaaggtgaactgatctttttccatatctcttccgttcagcgccttcgtgatctgcagtcctcctgccgccgcataatcaagctgggatttgtactcatttgtaaatgttccgttttcggaggcgatgtttgttacttccaatttaccttccaggttatccgatactgtgatcttcaatgtcgcctcatgtccgtcgatcgtcactcccgtcatctttccatccggaagcggattttctttcactgtgtaacggaattctttcgtccttgttccatcctgtcctgcggcagctccgttcatatcctcatctgtaaaccggatctttccgaaaccaaacagaacagcttctcctgcttttgcactgtcagacgttactgttactgttttcgtaccgtctgccgccgcgtcttccgccgccggcgcgccatcctgcggcgtaatggtaaatgtaaactcgtctgttcctaaccaaccgcgccctgtcagcactttattaaagtatgattttgcgtccgcaggatctgtattgacctctgtgtcttcggcagtataagcattttcaaatacaataccgccttccggaagctgtacttgtgcagttaatgttccatctgtacgatctgtcactacgaccgtaaagtcgaaagacgtctttccttctactgcggttactccgcccggaagtttgtctgttatctctcttgcggtatagctgaccgtccatacatccgaaccgtcatcattttcagattttacggcatatccgtcttttactgcctgatcaagcgactccgtcgtatacgtcagagcgccgtcatttcctgcaaattttactgctccttccgctccttccgcagcttctgtattcgttcctgccgctgcgaaagtttccttgaatccttccggattttctgccgctcttgtcacaatttcaaatcggaactcattcgccttcatatcacgtccggtcagtttcttcgacgcctcgatcttcgccgcgatatcctcgtctcctgtgcctgcgccatatgtattgataaaggtcagattctcactctcgccttcgacaacggctgcttcgagcgttccgtttttcttgtctgtcactttcacaaccacagttctttccgcttcctgatcgtccgtaataccggcgataccgcttggctgctccgtaacattgaacttgaacgttccggcgatcgtaaattggatatctccaaatgccgcctgatgtcctgcagatgcttttgtaatctcaagtccgcctgcattttccggaagcgtgataaatccattctcaatggcttccactgtcgcttcatccgctgccgtcaacgtatagctaaacgtatctgtatcaagccattttcttcctgtcagttccttcgtcactttaagcgcttcgcttccgctaagacttcctgccacgctgtacgtattcgtaaagtttgcttctgcagttgtatttgaagtaatcgtaccgcttgccgcattgccggcgtttccgtttacagttgtggtgtatccgtcaacttctttttcagttaccgtatactgcgcgccagccggaagtccggtaatcactgccttctgtccatgctggaaggaaatctcggtaccgtctgcagcattacctttcttgatttcctctccgctttcgcctgttacggcgtaagcatattctttcgtcaatgccgtacctttggcatccttaagcgctactataaatgtaaactctttctctttgtcgatccctgtgccctgaccttctgtcagtacgatggttttactgatggaaagatttccatctttcggaatctctttccgatcggtatccgtctcatattcaggtccattttcgccgatctggatcgtcgctttgttctcaactactgtctcggcgctttcatttactctagcatcaaatgtaaccgttccgtctgctcctggctgaacatctgcaatcttccatgtcagcatacgtgtctctgcgttatacgatgcatattcgcccgcgctgtcgtctacataatcaagaccttccggaatgctgtctgtaatgataactgtcgccgcttcaatttccgggttcttataggaaatggtataggtcaaaaccttgccgacctgtaattctccgtcgccttctactacagaatctttgcccggaacgttcgtggtaactgtattggtctgatttggatcgttgtctccaatggtaatctctgccgtattttctaccgctgttccgcctgcgctgtcaagcacttttactacaaagcttaccgttccgaaagctcctgcttcctgctcgccaagcgtccaggtgattgtctttgaagtctcttcataaactccattcgtatctgcgcttacatattccgtacctttcggtacaatatctgtgatcttcacctccgctttcgcaggagcgcctgtttcatctactgcattatttacccagtcgatagtataagtcaactgatcgccgacaccgacaatcttgccatttacggacgtggccggctcttctgtgttaataacatccttcgtgtcttccgcctcgtaaatattagtaaatgtcgcgcttcctgcttgacttccatccgcgactttcgctgacaacgttccctccgccgcattataagtcactgcaatgtcatagctaaaggtatgcttgtcatacgtcatattcggatcagcatattccggaactacttccgtaatctctacatgatagtttcctgccgctttgaactgaatatttccgaagcttacagaaccgtctgccgcgtttgccgatgtgattgtatctccaactgctccctccggaagtacaacattgtccatgctgcttgtatcatctgccggtgtaatcttcatttggaaattgaattcacctgccgctaaacctgtgtcacggtttcctttcagaactttcgttacctttccggcaaatgctcccggctcaatggttacgatatccggtgtatagctgtttacgaacggcgctactgctgtagctttactttctgccgaactatattccttactatcgtctcccttggttacggttgttaccgtatacagctctccgtctttctcctgtaccgtaattgcaacggtcgctgatacttgatcatacgtatactttgtatcggtgcctgctgcctcgcgaacggagtattgatatgtcttaccaatgtctgtttcatcaaacttcacgtcactaagcttactcatcaccgcgacatcgtctttgcctggtgcagtattcttaaagctcttatcagtctctgcaagttttgcttctgcttcttctgcagttacactgtcagttgcttcaccggtaattgtgaaatcaaacatatctgctgcaagtgtacgtccattcaatgtctttgtaacattcagtccgccttcatcaccgtaagttgtcgatgcttcaaatttattgatgaagatttgtgaattggtcaccccgtcagcattgatctcttgtgttgccttcaatacagaatcctggtctgttactttaataataatctcatatgtatgagaatcatacgtccatcctgtcggtgcatttgcattggtctcttgaacggtaaacttataagttccggctttcttaaatgtcagcgcattaaagtctacttgctctgttccatcctttggaatcagtttagttgtcgttttctctgagctgtatagatctgccgtcgttccaattccggtcagtgttccactgtcaatcgccgccttcgttacttcatcggctgcgctcagcttgaatgtaaagatctctttcgcattaagcccctttacctccttcactacggatggcgtaaatgttgcatcctgcgttgttgcataagtattcgtaaatattaattcctgtgatccttctgccagcgccgctgttaatgttccgtcatcattatccgtaacattaacgataatcgtaaccgtctctgcattataggcaactcccggaatcttgtctccctctgccggtacaacttcactgactgtgaatttgtaagttcccttctcattaaaggtaatatctccaaagttgaagttgccgtctgcatcagaagttgccgttacactctgcggtaatacaactgtgcctgctgtaattgccgcattcgttgcttcgtcaccgcccgtgatagtgaaccggaagccagataaatctttgtcggttgcttcccatggaccatccatcttctttgttcctgcaagatttgctgatccgtcaagaacaccgcttccggcatagctgttgttgaatgcgagaacagtctgcttttgatctgtttcattgcttgtctcttcgcttatgacactgcctttttcatctgtcacctttgtatgaagcgttaatgttccgtctccatcatctgttacccataattctactgtataaacagtatcatcgtatgtatatcccggtttcttatcattcatttccgatacttcatatttgtatactttacccagattcttcaacgtaaagttcgtatctgtttttaacatggttacagtttgtccatctgccgccgcttcgttgttcttaaatgtaacctctgtctctccctctttaaatccaaagagttctgccgcttcatctgctgtagcagtgtctgtcttaaccgcttttaccttaaattcaaactgctctttcgctaatgcatgacctgtcactgtttttgtaattgcaagtccgcctgccgctccgaggttcagagaagcgccgtattcattaataaatatcgtactataggactgtatatttgcggtcaactgcccatttcccggatcagaaacatcaactattatttttgcctcattcttactataagtcactccgttaatggtttgtcctgcattctcttctgtaacagtgtaggaatactttccgactgtatcatatgtgacctttccgaatccaaacggtacatccgtaccatcttccgttccgcctttctgtgatacagtaacgcttgttacatcattgccttccgtatctttcggcattggagttccatcttctgccgtaagattgaatgtaaacgaatcatcttctttccagtcgcgtccaaccagtcgtttgtggaacaatgctgccgcttctgtgaagtctacttccacgctgtctgcatgatatccgttcgtaaaacctgctactatcgtatctcttccgtctgaactatcatgatgagcttctgctgtcacaccatctccctgcattgtaactttcgtttctgtatgcatcgttccgtcgccgttatctactaccgtaatatcaaagcgatatgtgtcctttgagtatgtaactcccggtaaatttcctgctgcctctgaaagaacgtagctgaacgtctttcctgcatcatcctgtgtaaaggtcacccctgacaatttgtcaaagatccgagatgcaacaccgtctgccgctcctgatgtgtttgtaaattctctgtcagaatctgacaatttagcatccgctgtctcagcatttacagtatcactgtctgccgcctcgattttaaatgtaaattcgcccgctttcagagcacggccggataacgtcttttctacaatcagttccgcgcctgttccgtaagttgcagacgctgtatacagattgacaaatgcagccgcatcagtatctgcgccttcaccgttatagtaagctgtttctgcctttaattctccgttctcatctgtcacaataacccgtactcttgctgtatgtcggtcatataccattccgtttccgttttccggggcattttctactacactaaatacatatgttcccggacgtttgaactcgatactgtcaaaatcaaatgttgcagcctgattattcgtcagtccgttcaccgttttttgcatcgtatcctgagccgtatctccattgaagataatgaaattttctttaagaccggttcttgctgcggtatttgcagcactcaatgtaaaggagaactcttcatccacaagagaatcgcgtccgactaaagtttttcttccctgtaccgctgattctccctcacccggaagtactataggcttcggttcataactgttgttgaatacaacctgatcttcagcaactgctccttctgctttgctgtatgttttttctatgacaatatacgcatcctcgcctgaaccttgtgcctttgccataatagatacggaatatgtttgtgccttataagttataccgtttaaagtataagttccgtctccattattaaccgcagtttccggaatcacttctgcaatttcatacgtccacggtgtatcactgacattctcctctgtaaacaccatgttaccgaatgtaattcctgttccgacgttgactacatggatataaccattttcatccttctctccggtcggcattggcgcctgctctgcgttgtctccggtcgctttgagtttaaattcaaacattccgtttttcaacggattcgctccgctttcatctgcatacactttttttgcaagtatagatgtcgttgcggaatctgcatggaaatcatttacaaataccgctgttttattctcaaccggaatcggcgtatttcctactgacgccccgtcgtcattagccgttttttccatttctgccacagcggataatgttccgtctccattatcggtcaccgttacccgatatgtataggatgccagagaatatataactcccggtattgcacttgccggctgtttctcctgaatttcatattcatatactccgggatgagaaaatgtgatctctccgaagtttcctgatgaatttttttctgttacctcaacgccttttttaccatcagcagctccattcggaagcggagctccttctgttgtcggaatcaattcgattcggaacttatctgcaatatcccaccggtcaaactgtttctcataacttgcgaaatcagtttcggcaagcgtgatttcatctacgtcatatgtattttcaaacacatgttttacagattttcctgaaacgatcgttccagccgcctcttttgcgtccgcctttttatcaactgccgtcagttcaaatcctttcggcagttctttttcggttacggtatattgcgcatctttatccaatccatgaatatacagcgtttcgtcatctttaatctgatacttggcagctccggtcttatcaaattccagttcaaatgcttttccctgaatttcattttgcgcatttcgtacttccgctttgactgtttttcccttcatagacggaatactgatctcaaatgtgaactttttatcttttaatatttcatccgcattcagatttttattcgctgccacgcgggcatctttgctgattgcaagagcgcccggaagctcaagcgcaagccttccgttatttcccagataaacatttaagtaatcgggattattgatattatcccaaatcggatcgatcactacatccgccgtatttgttatgttctctgttttatcatctatcaacgcatcgattcttgtcaatcgtgcagaaccggacttgataaagtattctcccttgtcatttataccgaagttcgcacttgcctgctggaagtttgatcccgtaaaggctaccttgccgtcgatttcttcaacctgacctccgtttaactgcacatacggtctcttataataatacgtctgatccgcactcggctcgttctttactgccattgtacaatctttatctgtataaatcggagtatcttctgtaaaataataaaatgtatttttctttgccggttggaaagaagcagtcgtattgcccaatgtctttccattcggatctatgtattgtccgttataatagtttgaatagaaatacggaactccattctcattatgagcgttcagatattgctgaagcgcctcgtcatctgcatcattcgggtttagtccgtcggcaattctttcccggacctccggcttgatgctgacaccatagaagatacggagcggatatgcctcctgtatatccatcgttttatttccgtcactgtctgtatctaacgtaaagtgacgaagcgggatcaaacctgccggaatctgtactgtaactgtatcaccggttttcaggtctgcccctttcttcacctgaacgataatatcttttacattaccgttcggataaagttctgtatctcctgttgcacttccttcatatttatatgtagtaacaccgttttcagtaaccggttctcctaccggatcgaatatctgatctgcaaagaccaaactcttaaattcatccacctgcatatattcgccgagctgatcggtaaatgtaatatatcctaccttacccggatcatccccttctgtctgtgtcggaaaaccaaatcctgtttccaaatccgatgaaatctcattaaatatattattcaattcatctgcatccgttgccgctttataataatcagaattatctgtgcgttttcctaatgtacaagaatagcgattaggtcgtgtactgcttgtagcagtcgcatccggatagttgctagaaaccgcatgcatatatccgttaaagttaccagcgcttgtatttgtatcgttcggattcgcatcccggaacacgccgatactgtagatcaaagcattcgcatccttcaactcttttgcgttcgtaatggcggcagctgcaacactgttactccagtcactattcgacgtcggctgaccatctgtgaagaaaacgacaactttctgcgccccttctctggttcctccaagctgaaatgctctctgcgcctgattcaatccaaaatctgcgcgagttgctcctgctgcaatcagactattcactgttgaggtcaagtccgaaatatttttcgttgtgtaagactttaattccgttacaatttgtgaacgattataattgttatttataaaatcatttccaatgttgtcactttcatcacttgcaaattttacaagggaaactcgatgctgtaattttatatcatcaatggaatcattcattttagctgtttgttccacaaagttatttactgcattttgcagagcttgcagcttcgtaatatttgttcccaaatctcttctctcgtaaaattggatgtgatttggattggaatcttctgcggatatcttcggctcgaccgtttgtccatttaattcccagtgcgtaaattcccaccaaaacagaattttttgaccttcagaagtaattttgcctccatcctttgtgtaatattcttgatcttctgtttcactaagatttcctgcatatatctcttcatatcgatatcgctcactctcaggcctagttcccatatgcggtgaattttccatagaacctgacgtgtctactaccagtacgatatccaacggtctgctaaccgtctttactgtattcgatgtagatgacaatgccgataatccaactaagaaatcagaatcgccttttttgacacttggtctgcttccgccctcaagctgaatatcctctgtgagtactgttttatctgtccagatacgtccgatgttttctgtcgaatcttttacaacctgattccaagtatccacagtagacggatctgacacagaggtttcatcaaacgctaccgccggagtcggagtcgaatctgaggcatagacttgtcccataccaccgggtatcattccgagcaccatagccccggcaagaaaaatcgccagcgctgaacgcagtttactatttttctttttcctcatagtcactatctttcctttcttgcttatttacagaattatttatattcctattaaccctgcatcaatctatataaaatcaatggagtatttgacatcatttcactaaattcatcactccccttacatattttttctaaataatgcaaaatagctccatcttttcaacagcatataaaatcatacgttaacaaagtgtgaataacttgccattttctcctttttcaagctattatatttttactttttcacattttccgcattaataatccactatatgtgaaaaaccgatctattgtcgaaattttaataatttctacaataaatcggttttactttttctctgtttttagttatcttccctgaatttatacctgttgattcgggcatttgtttcttcagcccatgaatactccgtcatatacccccccccgggtatcaatgccgcttctaacacttttccctgtaccggataatatattttcttctatccacatataataatcacagtccacattggcataattaatccaacaggcagcccgtttcttaacaaatacatctttaatcccatatgtactgaatatcttattcaaatccataaccgccctgcgatacagattttttaccttttcatcgtacaaacgattctcccagagtttgtcaacggcttcttccattgtcacaactccgcctttattgtccacacataacgcaagcagttcttttgcctttttattggaaaatatcacaagttctccattaataaataagtcgaatcggccaaatgtcctaatatatgccggcttcttctgtcgccgactgagaagttttgcatttcccatagtccatgttaaatcttccatagtatacggcctgatcatataaccatccgcttttatccgaagtgcctccaatatatattctgtatgttctataaaaaatacaagaactattttaggatttaattcccgtaacttttctccgagctgaagtccgtccataccatttaattcgatatttataaaagccgcttccactctatgtctggaaacatatttaagcgtttccgcagaatcattaaacttcccgctcagctctacatatgaaaattgtttgcattgttcttcaaaaagacggatagcttcttcatcgtaatctgcaataataactttcataacatcatttcatccttcttacacataatatatttttatatactctgtttattcctcttccgaagggcaaacgactgtgttttgcaccatatccatatgatgattcatccatatgagctcatatccagtaccaatatccatattatataattttctgaccattttttgcaagtaaaaacagtagacactaaaaaagtttatgtctactaaaatgattctatatcgccaaacggtaacatgccgccaatacaaataacgggaacactattcaatcatagtattcccgctatcattcacagtgagcgtgcggggattcgaaccccggacaacttgattaaaagtcaagtgctctaccaactgagctacacgcccttattcaattatattccttttaattacaaggaaaatgcccagagccggaatcgaaccagcgacacgaggattttcagtcctctgctctaccaactgagctatctgggcttatacacaatatacttgtgtaaattgcgggagcaggatttgaacctgcgaccttcgggttatgagcccgacgagcttccagactgctccatcccgcgatatgaaattaattatctctattgagatcaagccgatgatcggactcgaaccgataacctgctgattacaaatcagctgctctgccaattgagccacatcggcgtgtttacttcttttataatgtatattcagaagtataattaaatggatggaggtggattcgaaccaccgaagcaatttgcagcagatttacagtctgtcccctttggccactcgggaatccatccttatttttttaaagtggggcctatagggctcgaacctatgaccctctgcttgtaaggcagatgctctcccagctgagctaagaccccacataacgacccagaagagactcgaactctcgacctccgccgtgacagggcggcgctctaaccaactgagccactgggccactttttaattcaggttataccctgaaaactacatacaaagaatcttttttcatccattgcctatctccgctttggttatgccctcgacctattagtaacagtcagctccatgtgttaccacacttccacctctgccctatctacctcgtcgtcttcaaggggtcttactaacttgacgttatgggatatctcatcttgaggggggcttcacgcttagat

SEQ ID NO: 7640 - DNA, 16691 bp, Unknown
  gut microbiota DNA sequence
agaaaagtaaaaaagtgcaaatgggtaatgatttatataaatacatttattgaaaattattatataataaagtacttagtggtaaatgcaaacattttgtacaatttacccgtagaaaaggaggagaaggaaaaagatgaaatggactaagaaaatgaaaggagcaggaaagaaagctgctgtaactgttacggcgcttggcatggtgcttacagcatttccgccgataccggcgaaagctgcggaagagtttgccgggcagttgacaagcgtcgagtcagtggaaaaaggcagcaaggacaatatcgttgttgtgaaattcaatggtggcgttacagcgcagcttacgtttcttgaggatgggatcttcagatataacgtagatccgagtggcgagttctcgaaatatgcgactcccaaatcgcaagctcatgtcggaaggattcagcagtattcagacgactcttctaactattcacatccaaaggctgatatttcggataaagatggaaaaattacgattaaaagtggatcggtttctgtcgaattcgataaagctacggcgaagatgaaagttttaagtggcgataaggtcgtgatggaagaaaaagaagcattgtccatctcgaattcggcaacagtgcagactcttaagaagaacaatggagagaacttctatggcggaggtacgcagaatggaagattcgtacatacaggcgagacgataaatattgctaatgaaagtaactggacagatggcggagttgcatctccaaatccattttactacacgacaagtggatatggtgttttgagaaacacatttgcagacggtaaatatgactttggaaagagtgaaggagatactgtaacagcgactcataaagaaaaagagtttgacgcttattattttgtttctgatggaaaagacagcagtgaaaaaacacaggaacttttgagtgagtattatcatgtaacaggtaatccggttctccttcccgaatatgcgttttatgaaggtcacttgaacgcatacaaccgtgattcatggtcagatacagaaggtgggaagggttggacaatcaaaggaaatgaaccttacacaagtgcaggaacgacaaagtatgagagcggaatgtctacgggatataaaccgaaagatggaatgaacattgagtctttgaacggcacgaaaccaacagtaggcatcgaaaactatccaaaagtagaagctccttataagtattcggcaagacaggtgattgacgattattttacatatgatatgccaattggatattttctcccaaatgacggatatggtgcgggatacggtcagaacggatatggcaagacaggcggcgttgataatgaaggaaaaagctctcaggaacgattggcggcagtagcggcaaacgtacagaatcttgcagactttacaaaatatgcaaatgaaaaaggggtagcaacaggactttggacacagagttatctgacaccggattctaatccgaagacagaatggcagcttcttcgtgattttaaaaacgaagttaaagtcggtggtgtttctacattgaagacagatgttgcatgggttggacatggatattccatgcagcttgacggtgtgaagacagcttacgatattgctacaacagaaggtaaggtacgtccgaacattatctctcttgacggatgggcaggatcgcagcgttactgtggtatttggacaggagaccagtacggcggtgaatgggaatacatccgttttcacattcctacatatatcggaacttctcttagcggtaacccaaacataggaagtgatatggatggtatcttcggtggaaatcagttgattgctacaagagattatcagtggaaatcatttacaccacttatgcttaacatggacggttggggaacttatgcgaagatgccatatacgtttggagatccatatacaggaatcaaccgtatgtatttgaaaacaaaagcacagcttcttccgtatatttatactggggcagcttcggcggcaaacattgatacaggcaatggagatacaggactgccgcttataagagcaatgttccttgaatatccggacgacagttatgcaagcagtaaagaaatgcagtatcagtacatgcttggatcgaatcttcttgtagctccgatttataagagcactgctgcagatgataaggggaatgatgtaagaaataatatttatcttccggattcaaaagaagtgtggattgactatttcacaggtcagcagtatcagggaggacaggttctcaacaactttgcagctccactttggaaacttcctgtatttgtgaaaaacggtgctattattccaatgtgggaagaaaataatacaccggagcagattaagaaagaaaaccgtatcgtcgaattttggccggatggaaaaacatcttacacgatgtttgaagatgacggaaaatttgtggaaaatgatctgaaagaagatggcgattatggaaaaattacgaaaacttcttacggcgctcatgtatctaccaagtatacatctgaggtaaaagatggaacagcaacgcttactgctgaaaaatcaacaggaaactacactggatacaagaaagacaaaaatacaacatttgttgtaaatgtatccaaagaacctacaaaagttacagcgaaaaacggaagtgattcattgactctcgataaagtgcagagcaaagcagactttgataaaaaatcggctgaagcaggtaaagcagtctacttctatgatgaatctccagcaatcgagacatatgcatcggaaaaagaaacagagattgcgaaccttgtaaaagatgtgaagagaacaccgaaactgtatgtgaaatttgcacaggcagatgcgaagagtgttgctcagacattagtacttgaaggatttgaaaatgacggaaaacttccgcaggataaactgaataagaaccttacagttcctactctgacagaaaatgaggaagcaaagacaccgacaagcatcactcttgcatggaataaagtagctgatgcgacaacttacgagcttcttgttgacggagttgtattctctgtaggagatgtggagacatatacacatacagatctcggatatcactcagagcataagtataaagttcgttctagaaatgcagaaggatattctgaatggagcgaagagaagacgttccagtcagcagaagatccgtggaaagatacaccggctccgcagacaatcacatggacaggcggtctgtacggaaatcacagtgctgatttggcatttgacagaacgttccagaaatctgatggtggtttccattcagatggaaatgcaatcggacagactcttactgtagattacggaaaagcatatgaaattgataagattgagtattatccgcgtgatgatgcaggcaatggaactgttgaggaaatgaaattagagacaagtctcgatggtgtacattggtcagaggcaaaaacatacaaatgggcagtaaataaagatatgaagttgatggataagctggattgcggagcgcgctatatccggtttacaccacttaaagcgctcggtaatttcttctcggcaagtgagattaaagtatataagaaagaaaacacaggggcgtttgctgtcggaagtaccaataaggctgaggcggttacggatgctgattatacaaatatgaaaaattatcttggtgtatgtgaaaaagataagttgtttgcagatcagatcaagagccgttacggcgatattaacatgaacaatatctatgatgtttatgattacgcattcacaatgttccagttagatggcggaacgaagaagacggatagtgtttcgggagaagctatgcttcttgcaagcagcgacagcgtgaagaaaggcgagacgtttacaatcgacgtttacgcgcagaatgtagcaggacttaatgcattcggacaggtaattaattatgataatagcaaagtgcaatatgtttcttgtgaagtatcacctcttcttgctcagatggaaaatctgacggctaataaagagtatgatgacagagcatatgtaaaccttgcatttgcaaaccgtggagacaaagaactttatgccggaagtgacgtgcttgctacaattacaatgaaggcaaaagaaaacatctctacaacagatgcgaaagtgatcgacctttctaaagtaacattgatcggaccgaactacagtacgatcgaatcaaaggttgatacgaatattgaaatcccggacgtgccggcaacagagaagaagtttggacagtcagactttgatatcacaatgacaaatgaaaaacttccgacagatgatccggaaaatccgaacgtaaataaactgatccagcaggcaaattacaatggattgtttgatgggaaatttactcgtgattttgagtttaaatgggacattccggctaaccaagtagatggaaaacttccggattacattatccttcctacaacaatgcaccttgcattaaagaatccggaggcgttgaacaaagtagtcgtatccaacgcaaatgaaggaaacggttatttgcacaaagtatctgcaaaactgatctatacagatgatacatcatcagacgagatcaagtttgaaacaaaacaggagaaatatacatttgaatttgcaggagacaaggcggtaaaagaagttcagattacattcttagatgcaaaatcaacaagtgatgtgaagaacatgctcacacttgcagaacttgaactgtcaaatctgtctaacacaccggttacaggaatcacagcagatccgaacaatgcaaaagagatgtatgtcggaacactggcagacattaatgcaacagttcagccggacaatgcaacaaacaaattcttcacagtagaaagttccaatcaagatgttgtgaagatccttacactggcagatgagaacggccatccgacctacaaagcaagagcaatgaaggaaggaaagagcacgattacactgacagcggcaggcaataaagatgcgaaagcaacttatgaaattacagtaaaagcaggcgttgatatctcaggcttaaacgaagcgcttgcgaaagctcgtacatatcaggcatctgcttacacagaagaaagttatggacagcttacagcagcagtaaatgcagctacagaattgctgaagggcgaatatactaagaatcaggtacttgaagcacagatggcaatttacgcggcaatcgacggacttacattccgtccacttgatgagacaaaactgcttgatgcaaaagcagaaggattcacagtgacggcaacaagtgaatgtgatcctgataaacttgaggatggacttgcaacaaacgtacttgacggaaaagaagataattactggcatacagagtacaacaaagatgtattgccgcagagcctcaattttgatctcggcggactttacaacttgacagacattacattccttgcacgtcagggagtaacaaacggcgatattctgaaagcacagatctttgtaggaagcgacaaagaagatatgaaatccgtcggaacatatgagttcgatgaagaaggcaatgttcttgtaaacagagatcagtatcagcagattgcttttgatgcgaaagatgtaagatatgtagagttcaaagttcttgaagcaggagcacaggataaattcgcaagtatggcagagatccgtttctatggagagaaaacgacagcagctctgaaagctctctatgacagctatgtggcagaaaacttgaataaagcagactacacagcagaatcatgggcagtatacgaagcgaagatgaatgaagcgaaagctctcatcgaagcaaaagatacaacaaacgcagcagcaggagaagctttgacagcattgcagacagcacatgacagacttgtgaaacttaatccagatccgcagccgggcgatgtagataagagtggactgacgactctttataatcagtacaaagacaccaaagcagacggatatacagcagaaagctggacagcattcaatgaagctcttatgaaagcacagagtgttcttgcaaatccgaatgcaacacaggatgaagtaaatgcagcaaaagaagcattgcagacagcttatgacggtcttgtaaaagacacaactcctgatccgaacccgaacccgaatccggatggaaacggcggtagtggcggaaacagcggaagcaatggaaacagtggaaacagtggaaatagcggaagcaatggaagcaacggaaacggcggcaatgcagctgttgttacaggtgacagcgcaaacatcgcaggatatttgatggcgcttgtggcagcgggcggaatcgctgtagtaacattctttagaagaaaaagagtgaaataaaaatatctgattcgtaagatgaagattatatgaaacaaaaaaggcggtgcgcgtaaggcaccgtcttttttgtgcgacgagttaaaattcgggattgcaggagaagagatctttccaaacaggaagatcggatttatgagagatggagtttcaaatctgaaattccatctcttttccggttttgggatgacgaaatgttagcttgtaagcgcagagatgaagttgtcctgcctgaaatcgttttgtcgaagattgtacggaattcatatgatcggtgatttttttgccatatttccgatcgcctataagggggtgtccgaaatgtgccatttgcacacgaatctgatgatgtctgcctgtgtcaagatggatttctactaaggcagaagattcattttgcaatggcggctgcctgtggtttcgggacgtgtgttttggcgtgtcagtcgatttggaatcggtaaatttttcgtttccgggcgcgccgtatgtttctattgttctgtagtgaagtctggcaagttttgctcccggagtcgttttcgtacagactgcggaactgtttgtacgggcatctttgacgagatagttttcaagagagccttcctgcggttcgggaatgcctgatattactgcaagataatatttcccaaattcttgggaagtgagctggcggtttagttcctttgcggcggcaggtgtttttgcaaagacgagaatcccttctacaggctggtcgaggcgatgaatgatcgcaagatacggttcgcctgattttgcccggtgaaatttacgtgaagaaaaaagatggtttttgagcaggctttccatgtcggaagttccgatatgactgctctgagtcggcgttcctgcgggtttatggcagacgatgatctgctcgtcttcgtatataataagcggggatgcattttttatcatttgtcttattttcgctccttcgtattattgacttttcaatgtgttacggctaaactgattatcatataaaagaattttcaggtcaaccctttaaggaggaaattcatgataaataatgagtgggaaagatcgttggatgaattgaatcggacgattcaggacgctatcgatcatcaaaattacggacggttaaatcagaatgtgacggatacgatcggacgtgcgatggaaggactctccagaggactaagaaacggaatccgttacggaagcgatgcgatgaatgccgctgcggataattttgcacagaggcagagacaagcgggaaacacaccgccgtttcataatcagggaacaggatcagcaggtggtttcacgcagaatcagggagcgggctcagcaggcggattcacgcagaatcagaggacaggctcagcgggcggattcacgcagaatcagaggacaggcgcaactggcggttttacgcagaatcagaggacaggcgcaactggcggattcacgcagaatcagaggacaggctcagcaggcggatttacacagaatcagaggacaggcgcagcgggcggatttacacataatcagggagcgggctcagcaggcggcttcgcgcaggatcaaagaacgggaacagcggggaattccgtgcacagaggcggaatcctttatctgaagggaacggcaataaaggtcggcggtatcttcctcgcgattacgggataccttgggatgatcgttactctgatcatcggtctgatgcttctgttgggaagttcggtaacaggctggcagatggagataaatgtcatggcggctttgatgggcggtttttctgttgcgtttgcagtgatgggaattatcggaacatcgaatgcgtgtacggtgagccgttttggaaaatatgtgaaaatgatcggaaacagggaatattgtgacgtaaaagaatttgcacagcagagcggacgttctgtgaaagcagttgtgaaagatttgaaaaagatgattaaaaaaggctggtttcggcaaggtcatcttgatgagcaggaaacatgtcttatgacgagcaacgaagcttatcgccaatacacggcgcttatggaaagaacgcgtcgggaaaaacaggaaaaagaagagcgggcagcgaaggaacaggaagagttttccagactttctccggaagtccagaagatcatcgaagcaggcgacgaatatgtgagggcgatcaaagcggcgaatgacgcaatacccggagaagaaatttcggagaaaatcgcccgtatggaaatgcttgtagacaggatatttgaccgggtcgagcagaaacccgatacggtcagtgatatccgaaaattaatggattattatcttccgatgacgatgaaactgctgcaggcgtatgaagatttggatgcacagcctgtacagggagaaaatattatttcttccaaaatagagatcgaaaagacgattgacactcttaatgtggcgtttgaaaagttgttggacgatctttttcaggatacggcgtgggacgtgtcgtcggatatatcggttctgaatacgatgctggcacaggaaggacttacggaagacgagatcagaaagtaaaagcgcgcagcgagtggagaagataagatagaaaagatgttcgcagcgagtaaagaagataaaatagaagctcggggaatgatgagtgaagataagtaagatagggctgaagaaagaaatggaaaaggagattaaagaaatgggaacagaatttaaggacttagacaccactccgacattgacgttagatccgtttcaggcggcggataaaaaggaaactccggccgtgcagcaggtagaagaaccggtgctggacgacagcgttttgacagaagaagagcgtcagacggtcgaggcatttgcaaagcagatcgacttgacgaattcatcgctgatccttcagtacggagcgggaacgcagaagaagatggcggatttctccgaatcggcgttggataatgtgaaatctcaagatctcggcgaggtgggggctctccttaccggcgttgtgacgcagttgaaaagttttgatgaagatgaagaagaaaaaggctttttcggcatttttaagaaagcgtcgaacaaaattgattctatgaaagcaaaatacgcaaaagccgagacgaatgtaaatgagattatcaaggcgctggagaagcatcaggtacagcttatgaaggatacagcgcttcttgataagatgtacgaactgaatctgacatattttaaggaattgtcgatgtatattcttgcgggaaagaagaaacttgcggaagtgaaaagaacacagcttgcggatctgatgagcagggcgcaggcatcaggactgccggaagatgcgcaggcggcgaaagatttggatgagatgtgcattcggtttgagaagaagatccatgatcttgaactgacaagaatgatttctattcagactgcgcctcagattcggctcgttcagaataatgatacaatgatggttgaaaagatccagtctacaatcgtaaatacgattcctctttggaagagtcagatggttcttgcgcttggggtagaacattcgacgcaggcagcggaagcgcagcggcgtgttacggatgtgacgaatgagcttttgaagaaaaatgcagagaaactgaagatcgcaacgacggaaacggctcggcagtccgagcggggaatcgtggatatggatacgctcaaagcaacgaacgagtctctgatctctacgcttgatgaagtaatggcaatccagcgtgaaggcagggaaaaacgtcaggctgcggaggcggaacttcgcaatatggagcaggaattaaaaggaaagcttttgcagcttcacggataatgtttgggataaggtcttagatgcacgtttaggatggtattttcggaatgaatacttggaacggcggtttcggttgacattctgccggattttgggtaaaatcacagatgcaaacaggcgaggaaagagaatagtatatgtgtggaatgcatcagagagaaggcggttggtgaaagcctttgcaggaacacattgaaccggctccggagctctgtatgaaaatacagcgtatatctgcgttaaagataaaagagagaacaacggcaggcaggacgtctgcggtgttaataagggtggtaccgccgagatgctcggtcccttgtggggaagagcgtcccggcgtttttatataggcgcatataggaaatgagacgcttttccggcagagaagttttggcgctatccgggaatctgccgcgttaccggagacttttacgatccgggagaaacgggcaaaacggaagaaacggtcgaaacggtcgattcggacggatatggctaaactgctgcgctatggaagcgatggaagaaaagtcggaacaaaagataaaaagttccgaaaatgatttgggaaatgaggtaagaaaatggcgaaagaaaagaaacttgtacagtcgatcacatcgagagacgaagattttgcacagtggtatacagatgttgtgcgggaagcaaaattatgtgattattcaggcgtaaagggatgtctgaactatcttccgaacggatatgcaatatgggaaaatattcagtcggatcttgacaaacgttttaaagacacaggtgtggaaaacgtatatcttccggttttgatcccggaaagccttttgcagaaagaaaaagaccacatcgaagggttcgcgcctgaagtagcgtgggtaacacacggcggagcggagccgcttcaggagagattctgtatccgtccgacatctgagacattgttctgtgacgtgtggagcaagacggttcagtcttacagagaccttccgaaagtatggaatcagtggtgctcggttcttcgttgggagaaaacgacaagaccgttccttcgttcaagggaattcctctggcaggaaggtcatacgattcatgcgacatatgaagaagcggaagaacgtacaaaattaatgtggaaagtatataaagactttgtagaagaagatcttgcgattccggttgttgccggaagaaaaacagaaagtgaaaaatttgcgggagcgcaggacacttatacgattgaagcgctgatgcacgacggtcaggctttacagtcggcgacaagccatttcttcggaaattctttcccggatgcatttgacattaagtatgcagataaaaataatgaactgcacagtgtgtacgagacatcatggggattatccacccgaatcatcggtgcgatcatcatggttcacggcgatgacagcggtcttgtacttccgccgagaatcgctccggtacagacaagagttattccgatcgcgcagcataaagaaggtgttctcgataaggcaaatgaacttcttgacgctcttaataaagccggatatcgcgcgaagatcgatgattccgaaaagagtccgggatggaaattcagtgagcaggagatgctcggaatcccgactcgtatcgagatcggaccaaaagatatcgaaaacggtcaggttgttgttgtgcgcagagatacaagagagaagatcgttgtggcaatcgatgagattacaacgaaactcggtgaaatccttgagacgatccaggcagacctttatgcgaaagcaaaagcgttccttgatgaccacatcagttctgcggtgactatggatgagatgaaagatgcggtttccgaaaagaaaggtttcgtaaaggcaatgtggtgtggagacgaagcttgtgaggatgagattaaagcacagacaggcggagtgacatcacgatgcattcctatggaagaagaacatctgtctgatgtatgcgtctgctgtggaaaacctgcgaaacatatggtttactggggaagagcatactaaaatacattatttgtaaatgggcagtttaaaacaggagtggatttcttcgcttttggaagaaatacgttctgttttacagcgctgcttctcgataaataatatagaagaaataagatagtgttgtacaaaaaggctataatcgttttggaaaatgaacgactatagccttttttgaaatcctaaatatgcaaaatgacgaaaatggggggtgataatgacaattttgtttaaatgtgataaggttataaggtctatgaaaaataaaattgtgaaaaaaggggaaaggaaaagtatgaaaaagagaaagtatctggcattgttattagctgccggaatgatcgcacagacagctctttcgaccggcggagttgtgcaggttcaggctgccgaagacacatacgttaaaacagatgagctgacagacaacgatacggcggcgccgaagaaggatagtgttataccgtcaaagaatcagtatgagtatcagaaacaggaactggcggctttttgtcattttggaatgaatacatataccggaagcgagtgggggaacggaaaagaaaatccgaatcagtttcagctgacaaatgattttgatgaagaaacttatgtaaaagcgattcatgacgcagggtttaagaaactgatcattacggcaaagcatcatgacggtttctgcatatggccaagtgaaatgacgacacatgataccgaaacggcaggttatgaaggcgacgttttagaagaactttccagagcgtgtacaaaatataatattgacatgggactgtatctttccccgtgggatgtaaatagtgaatattatggttacaaagataaggatggaaaaaaacttgtcggagctgacggacagccgttgaatggaaaaacatgggatcaggtaaaacaagaagacgctcttgattataacgaatactatgataatcagttgaaagagattcttggaaatgataagtacggaaacaacggtcattttaaagaagtttggatggacggcgcaaaagatacgaacgacaagagcaatgcgcaggattatgatttccagagatggtttaagacaattcagcaatacgagggaaaagcaagcggaaagtacgaggatgattgccttcttttcggcgcggaatcttatacaactgtaagatggatcggaaatgagagaggatatgcggctgaagaaacgtgggcaaagtcaacaatcgacagagagaataatacgatcaatagtaacagtagagacggatatacgaaaggatttccgaatggaaatcagtggactgtgccggaggcggatacaaagattacgtcaggctggttctggggagaaagcaagaaaacgcctctttcgatggagcagcttgcaggtatttatttcggatcggttggacacaacgctacattgttactgaatgttcccccgaataaacaaggaacggtagatgcggatattcttgctcgtgtggcagagttcggaaaagcagttcaaaatacgtttgataagaacttggctgaaaaagcgtctgtttctgcgacagaagtaagaggaaactcaaagaaatattcaccggagaatctgctcgacggaaatgatgagacttattggacagtaggagacggtacgacaagcggaaaagtattgatcgatttgggagaatccaaaaagttcgatgttgtgtcgatagaagaggcaatccagtttggacagcgtatcggatctttcaaagtagaatataaaaacggtaatggagaatggaagacgtttgaccagggaacaacgatcggagcaaaacgtctctgtcgtaaaaaagctgtaaaagcggataagcttcgtattacagttactgctcataaccaggcggaaaataaagttccgatattaagcgagattggcgtatatgaggctgcggaaggatttgaacttggaacgggtatcccgtcaggtctgcagacgaaagatgaccgtggatttacgcttagcagcggatggcatcaggaaacgaacgatcagatgatagaaggaacgggtatctggatcaacggaaacggaaatggggcgaatgcgccatatgcggagacgaagtttaaaggtacgaaggcatgggttatcggtacgatcgatcaaaaacacggtccggcagatgtatatattgacgggaagaaagttgcatcgattaatacatattctgcaacaagaaagttgggacagattttatatgaaacgaatacgttagaagacaaagagcatactcttaagattgtaaatacagggtctaatactcaggctgtaggattagatgcagttgcgtatcttgataacggtggaaagggaatggtagaacttgaaaaagatgcctatcgagtgaatgaagatacaaaacacccaattaagctgaaacgcgtcggaggtacgaacggtgaattgacagtgcagtttgaggttgctccgggaagcgcatatcagaagcattttgatgctgatggaaatatgacagtaacatttaaggatggacaggaagaggcagaagcatttgtcacaacgaagcgtgtgaaggaaaaagaaggtgacgtttatttttctgcttatttaagcgctccgacagaagatgttcttctgggattcattacaaaagcaaagattacgattgcagatacagaatcttatgacaagcaggaacttcttgacaagatcaaagaaacagagaaagcgggatatcaggaatcactttatacaacagcaagttataaaaattatgtagatgcattaaaagcagccaaagaagcggcaaagaaagcaaacttgactcaggaagaagctgcaaaagcatgtgcggctcttgatgcggcaatcgcaagtttgacaaaacgaagtacattcagtgaaacagacagactgcagttccctaaagtaaaaggacgtagtacgactgtagaagcggaatattttgtattagattcgtctaaagctgaaaaaggtaaagaggttcgcattcagccggatacaggtgcaagtaatggggcaaaagtaggatggtttgaaaaaggtaatgtgataaaagcgccattccatgctgaaaaagaaggaaaatatacagtaactgtgacataccaaagtggaagagattctggcaatccgaataaaattaactggggtggaacgaatgtagacagcggttcggtcaatgtagtaggaaagaatacacagaatcctgtttttgaagagaagtcatttgacattaatgtgacaaaagcaggtgatggtgagttagtgcttactgcagatgcaagttcgtctcctaatattgacaagtttgttatcacagcgaaagaagtttctgctgcaacatataagattacggcgacagcaggagagcatggtaagattgaaggcgttacaggtacggaagtgacagtagaagaaggcgcgagccatacgttcaagtttgtaccggatgaaaattatgcggtaaaagatgttatcgtagacggcaactcgattggcgcggtagattcttatacatttgatgatgtgacggcaaatggccatacgattgaagtacagtttgaaaaggcagtttatgcagaagataaccgatttgtattcccaacggatggtaatacaaaaacagctgaggcagagagatttgagattcatgatgtaaaagatccgacagatggtgaatggcattgcggagtaactgcgaaagactgggcaagtggcggaaagattgtaaatgcgatgaataaaggggatacgattaccctttactatgatgcaccgcagacaggcgaatatacagtgacggtatattatagaagcggaaatccgcagaatggtcttacatgggctgaaaaagatggaaaaatcaaatcaggaaatgtgacagcaggagcaggagatagtgcagcggcaacacatacgacagagtttacactgaatgtagagacggcaggtccgggatgtcttgtattcacagcaccggatgcgaaagctccgcagttggataaattcgatatcaagagtccgggaacaccggttcctccgatttctgcagtagagcttgaagcggcagttgaggctgctaagggattagatctgaatgattacaaagatgacgatgccaaaactgcatttactgcaaaactggcagaggcggaaaaacttcttgcagacattgccggcggaagctttgcgggaacacaggacgaggtgaatcagatggcaaaagagctgaaagctgcacaggatgctttgaatgaaaaagatcagactcctcaggtgaataaagatacgcttaaggaggcaatcggcaaggcggaagcgcttgatctgacacagtataaagaagaa

SEQ ID NO: 7641 - DNA, 1580 bp, Unknown
  gut microbiota DNA sequence
ttaggtaattgcgaaacaagtccgcaatcctgactgaaaacaggcgaaggctcctgtcatgcaggattcttgggataggaagtgaaaatcgttcatttcttggcacaacaaataaacctcatgggcttatgaagttggtaagtcctatgctatgagtggttttaaacttcgtatgtattgatgctggtgaattttatcagcaaccatgacagttattaactgagaaattcctgcaagcaacaaatctgcatgtagtgttttctcattttgggttttacgaccggcaatacagaaactgtctttaaaatggttgattgatttttcaacgtttacacggattttataggtctcatcccattctacggaaccacgttccacaccgggataggcacgcagattcttttcggggtaaatgtaaatcattcttccacaggaagatgtggtacaggggttctcacagcggcagacacggcgtttcgttttggtttcacggttgtattcccatttcattttagggcatacaaacttcatgctgggaagtttgcttctcagatgagatttactcccttcccgtttcataggaagtgtggaatcatgcggacagcaaggaacaccattttcgttgaaggtgtagccattttcttccattgatagttttgtccggagtggaataaatgctttttcaaagccaagatcatccaaaagggctttgtagatttcaatggtatcaaaagcggcatcgcctagaaaagttttagggttgatcaaaggatgcttctgaaagaaatcaatcaaaacagggagcagtgccttagagtccgcaagtgatttatcttcatctggtgaatcggatttcttttcaacaatgatattaggatgagcatttaggaaatctttattgtagaaggtaatatcgcgaacaataccaagaccattagtgacaataccaaacttataggcatagcagaaatgtccgttgatgtacatctgttggatagctgggttagcagtagcgtgtgcaggcattgagccgtaagcagctttgtaaggatcaaagtttttatcaaagttgtgagcctttgcaaaggcctttaactgttttatgatacggtttgcgtatttcggattattttctgttacccatgcctcaattccagaagtatcaaagatactcatggaagcaaggttagaatcaatacgttggcagatcggttcagtgatatcaactaagtgatcgaacatcgattgtaagtccataagaaagtcctgtttaaagcgggtaaattttgaggcatcaggaacaacacggaagccacagaaatcccgtagttcctgagaatattttaaaaatataatcagaagagtatctgtcgggattgagaaaatgcgctgaataaggagagccttaatcataggataaagtggatgcttacgaggtcttcctgtagaagcgtgaaaatgagtaacaaaagaaacaggaacaatttcatcaagattaatggtttggtcaagtagagaaagaaactgatatttgtcattatcgaatttattttggcaatcttcaaaaacttctgccaaag

SEQ ID NO: 7642 - DNA, 245 bp, Unknown
  gut microbiota DNA sequence
gaagaaagcgtaccggagaacacggaagtcacagtgaagaatccggaaaaccttccggacggaatgacagagggaacattcgaaatagaagtgacggtagagtacccggacggaacaagcgaagatacgacagtgcaggtagtggtgacggataaccgcacggatgcagagaagtatacgccggaattcgatcagatcgagaaaaactacggcgaggcaacaacggaagaagagatcaaaggtgc

SEQ ID NO: 7643 - DNA, 7743 bp, Unknown
  gut microbiota DNA sequence
aaaagcaccctaagggagctctattaaagttacccttttttaccaccgatatgaaaaagaaattttttgctaatttatggttgacttttcatagctggtctcctttaaattcaatcaattttacggtataaacatacaaattaatagtaacaaaaatactctttatttacaattacaaattttcccaaaaaacaagaggttactgtcaagtaatcgttggcaactttctttttgatttatctttttgttgaaatagtatgtttgatccaagtttaatatccagccatatgcaatagtctttttctctccccctgtatctttccgtttaacccaaccatatgcccaattaccggatattcatatccttttccatctttctttggcgctttcgctgacattagaatctctccatacaactcttctactttttcttcttcaaataccggtcgacgcagacgttcggttacttcatacagttttccactgcacttttttgccagaatcttcgccagatgatttcctccccgtttactccaacttctatgtccatgcttcattcgctttgcgatcacgctccatacatggttttccattgttcccatattccgatatgccaacccttccggtggatctggaagattgagattttgagactgataaggcacgagtccttctcgattgttctcataataacgaatcaggtcttctacatcttcaatctcgctctcatcacttaagctgtttcgatagatttccagataccggaatacttcttctatctcttcagtttttatcagctctaaaacagcatccctcgcagcctgttcatggattttctctttcacagccttattccgatggaacggatctaactgaaaacaggtgcttttatctttcactttcttgatccaggatgctccgtctgcgtttaagattctttgatccacttcatccaggttaaactcctgcgcgattgctgcttcccgatattcctgaaactcctttgctttggaaaatcctgcaacaactaccttattttctagcgcataacgatccgaaccggtttttctccatccttcataagcaatcccgatcttaatctctgatttatcctgtttttcctctttccggtcttttccctgcagccggatataaactccgtccgcttcttcaaacaggacgggaacctctctttttcctttcacatgccctttcttatattcttctgtcagctcagtttcatcctcacaaacttttcccctaacgcctgaatcacgttccatactcccatcgcactgatggtctgtcctgtcatctcactgacctgacgggcacattctctgtaagatagttctgtaatcccttttaccaacagttccgccatattcgttgagattaaaccaacatgatccagatccagtgtttcgtctagcagatatacaaaacgctttcttccgtcctcctcagtcacttcataaacatttctccgataggtcacctcaccatatacggtctttacggttgtctgtctgcctcctttattcctgtacttctttttgtctctgttctccaacagcatccagtcataccgttccaggaattcttttgtgaactccctgcctaactggcagacccacgcataaatatttttctccaactgcttgaatgttacgccgttttcctttatcattgaattcatcatacagactccttatgttttttctcagcaattaaacaataagataaatctgtatgattgggaagaggtttcgatctcttccctttatttttgccaataataattatactctaagaaacaagagacctcccctaatataaggaccgatctcttgttttctcattccacattacactccgtacttcctataatatattccacatctgaatactctctaataagaacattaatataatatttacctttcctattatcaaacattgataaatcaatattagcctcatattgactttctccgaccttttgtggttctatccattgcaaatctttctgatcttcctgctgccacaccgataaaagaattcctttcatattttcttgcacttcgggtactatttcatctacaatcacttcgatccgttctcctgtaaccacttttgcttccacatgtgctccgtctttttctcccgctctaatgagcactctttcatttttcttattcacacctgaaattttctccaaaaactcagatttctttttcagctctgcttttagtgtagattcaccaatatcctccattaatgtcaactcttctgaaaacaaattcgttccaagtcctaatctgtttccttctattttgacgcccattgcagccaatgttgtaggaaaattatccattgttgtatatgttctctttttattatttaccggattaacagcagaattaatatacgccgtgtatgttcttcgatcatacttcccttcttcatctacttttacacaaaagtcactgtccattgtcaagtgatcccctgataatacgattgtcgtattatcataaaacggctgttgttttacccattcaataaactcataaacttgtttacttgaacacgccataacatttgcatactgattcccataatcattcggacatttttcacacatatatccatcttcaaaatgtgtatctaccgtaagcattgtaagattaaaaggttcttcttgctgggaaagttccgtacatttttcttttgcaaactcaaacaacttttcatcttcatatccccaccagactttataatcagaaggtatcttggaattttctattgcataatcatagtcatccagaaaataatctccatgctccgaaaaatatacttttctcccgccaaattcagcttttgatccgataagcagtgtttgataatacccctgttcttttaatatatctcccaaagtcgtaatacccgggaagaaatgttcctgcgtatccatatcattcgcatttatgcttgtttttaacggaagtcccgaagtctgtgcaaacattcctgccattgtccacgtagttccctctactgtatagccgccgttaagatctgttgtttctcccgagaaatcttcattttcttgtgcaagcttcgtcagctccggaatataattttccgtaaacgcaccgccgttgttttcatctgcatatgttgtttccatagattccaaataaatataaataagatttcttttttgctcaggaaattctaaatctatatttttcggatctgcataattttcctctataaaatcagattttgcaaattgattatataagtattctcctattcccgctttttcccatgctatatacaaagaaaccacaatcgcacccattgaaaagaatattcccgttataacaaaacaattataatactttgtttttctttttaaaaataaaagcacagaaaacaaaattaaaacaagaagcattggtacaatacactgtactatatattctataatcatatcctgattggcgccacttaaaggttccgtgagatggaataccaattcatctactgccaaattaggccatgttttaaacatccaccgaacgctaaatcctaataatatcgctaatcctaccattataacagatataactgttcctaaatacttaaatttttttaacattgctcttacctttttaatttcttcacagtctgtttccatataggaattaccatatcacctaaagttttaacaagagacaaattacataatacatttgcaattacaaacaataccagaatgattcctcctactataattgcttgcaaaatcaattcaccatacccttgtgcatgaataacaaaattcttactaagtaccatgattacgatacacatgcataaattaataataaaatttctataagatttttttgcactacgattcaatattttatgatttgaatataaaatcacatcatttgtacgatataacaaagcaacaatagtacctattaaaactccatatattccaaaatgagaaaccgaaatcaaagataccattagattaattagcatttccataatcgctctgccctgcgtttttttaaagtgtcccgctatactaattagatttcccgctgcacctctagcaacgctcaagcactgcataagcgcaaataaaataggtaatttgacatctaaataattaatatctgtaattcctcctgcatatatttccataaatgggagtatcattatatacagtgtcataaatagtacacagcctattcctgtataacacatatcaaacacatcatgcatgcgttcatactttttcctatcttcacaatatatttgccccattgcaaatacaacaccggaatttacgtttgaaattccggttaatacaacattaaatagcatattgtaaacagtatacacactaacaaccttcaatccacaaaatgctgtcaatataataatatctgtatttgaaaatatcaaagctgctaattgatgaatcaaagctgaattcttttgagcgattgctttatcatttttttcaacctttaagtcaatccatgaataatgcttcttttgatatacttcaaaaattatcatctgtattatattaaaggtcaaatgtaatgactgtacaacaactatgttgaatcctaataaaatgaaaataattttccccacattaattcctacattagtaaatgtaagaatgtttgtaacaacataccctttgccttctgcctgcaacagcaacttaaatttagcttgaaataaaaagtttataacatttcctgttcctacaagcaaaataattatcgatatataccaccatgaaatatcagtttttataataaatggataaatcacagcaaatcctatcatagcaatcgcatataatattccagtctttaaataatacttgtgggttgctgctaaaatactgttaataccttgatgatcctctttcgttatcggattatacagcgcttgaagcgttgttgctcctactcctgcctcaaataacccaagatatacaaatatttgattaatagaagacaacagaccatttatttccgaactaaagttaacaatcagcaatttagggagtaccattcctaaaataatagtaataacctgactcaatatcccgaatataatattataaaatccacgccttgcccgcatttaatatttcaccttattccccttccgtttttgctttttgacattgataaaagattaatgcaacaactaatgctagataaatagatgcattaggtctccgcaaaattgctcccgaaaattgtgccaatcctaactgcaatacataaaccataaaaagagtaaagttaaattcattaaatacatatttccatttttttatcaatactacccctactattatgacaaaatatattaagaaaagaatatacagccccattcctaagtatccataataataatatattgccgcataatcattttctaaatcagaatctttcatctgtgtaaattccatacctacaagtttagttaaaatatcgctatcttcccacaataactttgcataaattcttttttgtaaacgtacatcagccattgtataagaatccggcatccaaccatattcttctaataccgcttctacaccaaatttttccactaagcgctcatttaataaaggcttataacattctattagtttttctttttcttgcggatctgcaagtatttcttctaccgtaagtttttcacttatctcttgtttcttttcttcaatcgtttgattttctacatctctcaccccactatcagatacatcaactaaatgtcttggggttatcggatatataataacagaacctatcattaatacaaaaaaacctattgataaaaggagcattttcgatttttcttttttcacacatttttcccgtacaagtaaataatccaaaagataaaagaaaatcaatcctcctaaaataataaaaattgacaaatatgccgcttttgttccatttgcaatcaataccaaacatgataaaatggctgttataaaggaaagaaaaatattctttttcctagaaatccaatataatacaaacggaaccaatgttacaataataatactttgcgagtttgcattagcaaaccatcccatatagcctactttataaattttataagtgtactcacctgttccagtcaaatgagcaatcagggttgttcctataataacaaaaaaattcactacaaacgcatttataatttgctttttatgagaattatttttaaacaaataacaaaatgcaatacctaacaccggcatttggagtactttagccatataagaaacatcttctgccaagctcaaataacccactctaaatccatttgctatgtgcaatatgcaatatatgccaataatacccatcaatatgaggaaattccttttcttaggtattttatataaagcatagaacactattatcaccatcaacaacaaacgtatatatcctgcgattgtacctattttactgtcatattgaaaatacgctacaatatctaaaataggctgtaatacaatcaacaaaaacaaccaatttttttttattatttctttcattttataacttctcgctttcttctattacttatctttcctattgacactacaatattagtagctactttgtggcttttaataaaaagttttatataattattatcttgtttaaaatgtatatttttcctccaattcggaaaattaaaatccaaatattcaaatccttgtttaataaaacactttccgagaacataatctttttgatatatttgttgcaaattatatactgttatccgatttataaaaaagtattctaaataactatgaataactacattatcaatattttcataacacctttttatcatttccaaaactttaaatatatcaaacactcgtttatcaacactagttgtttcacttccctttctcactaaataatatactaaatctgcattcactttcccaattcgagctcctagtgacaaaactttatgaacaaaatatgtatcttcatatttaacttctaccggaaaccaaatatcattacttactaaaaaatctcttttatacaacttattccatgggcttgtattaatattaaaaatcaattccggcatctcatatattgtacaattttgaaatttgtcaagcttctttctcttgctttccttattcctttcaaaaacttcacaataatcacataccaccatatccaaattttctttcacaagtttgttatataaaagttcacaaaatctctcatccacactatcatcactatctacaaaagcaactgtttcagatttcgataattgcaagcctttatttctagaaatactaatacctctatttttttgatgataacacttcactttttcaggatatttttgttcaaattcttctataattttgcaacttccatccgttgatccatcatctattaaaataatttctatatctcttaaagtttggtttattaaactatccaaacatttcctcaaatatttttcagtattataaaccggaacaataacactcactaatggcataataactccttttttgaaaacatccttccaaatcatatttatcattgaacctatttttattgaatcacatactttaaaatattataataatttatatttttttgcaagctttta

SEQ ID NO: 7644 - DNA, 28842 bp, Unknown
  gut microbiota DNA sequence
cgggaatatatttttagaatatataagaaattatattaacatcagtaaaaaacattctgatgatgtgaaaagttacaaaaaatatataaaataagaaataaaacaggtgaaagtgtagaatggattgttgacaaaaatactctacattgatataattctaacaaagcaggtgatgatgtgctctttacgaaagagagtgattatgccattcgtgttataagagctttacaagatggcggtaagaaaacgataaaagaactttgtgaattagaacagataccatcggcgtttggttataagattcttcaaaagatgaacaaatccggattgatcgaaatacgcagaggcccaaagggcgggtatcagcttgcaaaagatatcggcgaatttacattgtatgacgtagtaacggcaatcgaaccggactttgcggttatggaatgtgttcatcactcttgtatcagaaatgaaagcaaagagggatgtgcggttcacagagaacttcttggaattcagcattcggtagaaaagcttttgaaaaaaaagacaatggctgatattttaaaaaagtagcatctgtgtagaaaatgatacacagatgacaaagtgggtgtatgcccacttttctttccgacaaaaagtggactaaaaatatctattaaaacagactcacgtgcgcagcagaaaactatttatatgaagtgttaaggaggaagaacagatgaatcaatgttatggatgtacgacttgtgaaagtgcggataagccgttggaggggtttattaaaaaccttccgctggaaacgtctcaccatagagtggaaggtcagagcacaaaatgtgcttttggacttcaaggagtatgttgtcggctttgttcaaacggaccgtgcagaatcacaccggatgccccgagaggaatctgcggtgcaaatgcagatacgatcgttgcgagaaactttcttcgtgcggtagcgtccggctcggggtgctatatccatgtcgtagagaatacggcaagaaatgtgaaaaatgcagcgcagaaaaagagtgggataaaaggagaaggagcattaaataaactggcggctctttttgagattgaagaagaggatatgtacgtccgggcagagaaagttgccgatgcggttcttgcggatctgtatcttcccgaatatgagaaaatgaaacttgtaaagaaaatggcatatgcgcctcgttatgaaaactgggaaaaactcggcatccttccgggcggagcaaaatcggaagtctgtcatggagttgtcaaatgttcgacaaacttaaattcagatccggtcgatatgttaaaagattgtttgaaacttggaatttctacaggtatttacgggctgacattgacgaatcttctgaatgatatcgtgctcggagaaccgaagcttcgtctggctccggtcggtctgagggtgatcgatccggattatatcaatattatgattacaggacatcagcattcgatgtttacatatcttcaggaaaggcttacagatgcggatattacggaaaaggcaaaacaggcgggagcaaaagggtttaagcttgtcggatgtacttgtgtcggacaagatctccagcttcgaggcgcgcattatgaagatgtgtttgacggacatgccggaaataactacacgagcgaagcgattctcgccacaggcgcaatcgatgcagtgatttcggaatttaactgtactttgccgggaatcgaaccgatctgtgacgaattgaagatcaaacagctttgtattgacagtgtggcgaaaaaagcaaatgcagagctggaagaatttgactttgaaaacagagagcaggtaacggaggaaattatagataaagttcttctttcttataaagagagaagaggcgcggattgtgcgtcggaagaacgggtagaactgaatctgatggaagagcatggcaatgaacgtacacttacaggagtcagtgaaggttccttgaaagaatttctcggcggaaattggaagccgcttgtagatctgatcgtatcaggcgatattaaaggagttgcgggagttgtgggctgttcaaacttgacggcgggaggacatgatgtccttacggtagaacttacgaaagagctgattgcccgggatattatcgttttgacggcaggatgttcttcgggaggaattgaaaattgcggtttgatgacgccggaagccgcacagtttgcaggaccgaaacttcgcgcagtatgtgaaaaactggggattcctccggtgcttaatttcggaccgtgccttgcgatcggacgtttggagatcgtggcgacggaacttgcggagacgatcggcgtcgatctgcctcagcttccgctcgtgctttcggcggcgcagtggcttgaggagcaggctcttgcggacggctgcttcggtctggcgttaggacttccgcttcatttaggacttccgccgtttgtaacgggaagcggcgcggctgtaaaaatattgacagaagatatgaaagaattgacaggcgggcaagttatcattaatccggacgcaaaagaatctgccgatattttggaaaagattattctggaaaagcgcgacgcgcttcatatataggagggcggctccatgagaaggattattgtagaatatgaaaaatgcgacggctgtaagaattgttcggcagcatgtatgcaggcgcacaggaaaacgccgggaacaatttatgatttggatctgaccgatccggaaaacgaatcgagaaattatattttaaaaggagacgacggcacatacagacctttgttctgcaggcattgtgacgagccggaatgcgtaatgtcatgtatgagcggggcgcttcagaaagacccggaaacagggatcgtgacatatgacgagacaaaatgcggatcttgctttatgtgtgtgatgaattgtccgtttggtgttcttgaaccggatcggatgacaaagaaaaaagtgatcaagtgtgatttttgtatgtctgacggtcaggaaccaaactgtgtgaaatcgtgtccgaaaggcgcgatccatgtagaggaggtgtgatggatgaactacgtgattatcggaacaggagcggcggggatcatggccgcaaaagagatcagaaagctgaaaaaagatgcacagattacgatgatttcggcagatgagcaagttcattcccgctgtatgctgcacaaatatctttcccacgaaaggacggcggaagagttgtcgtttgtggaagaagacttttttgagaaaaatcagatcgcggaagtatacggacatattgaagttatcgatacggcaaatcagatggttgatacaaagggaggagaatcgatctgttatgacaaactgctcatttccacaggggcagacagttttattcctcctgtaggagatcttcggaaagcgaaaaatgtatttggactccggcatttgaaagacgcgcaggagatcgataaaatggcggaagatgcggaaaaaattctgattatcggatcaggacttgtcggactggatgcagcgtacggattgatcgagcgagggaaaaaggtgactgtcgtggagatggcggaacagattcttcccgtacagcttgacgcacatgcggcgaagacatatcaggaactgtttgaacaggcaggggtacaattttatctcggatgcaaagccgaaggcgcggtatgcgaagctgacggtatgattcgtgcggttactcttgatacgggaaaacagcttttatgcgatctcatcatcgtggcggctggcgtacgtccggcagtcgggtttttagaaaaaagtgagatcgaggtcgaacgaggaatcaaagtaaattctaagatggagacaaatgtaccgaacgtatatgcggcgggagatgttacgggattgtcgggcatctggccgaacgcgatgaagcagggacagacggcggcaagaaatatgtgcggagtcggtacagagtatacggatacatttgccgcgaaaaatacgatcaactttttcggactggttactctttgcctcggaaggatcagacaggaagaaggggatgagatctttgtcgaggaagacagaaacgtatatcgccgtctgatcatgaaagacggagtaccggaaggaattttgcttcagggagatattgcgcattcgggaatatggcaatatatgatcaaaagtaagatagatatcagttctatgaaaaataagatttttaagattacgtttgctgatttttacggaatcggagatcgtgggaaatatgtgtggaaaatagacgaaaagatggacaaaaagacagacaaaagccgacaaaacgcttgacgcaagtgaataaaaccattagaatattatatgcgaattatagcagaaatatttgcaaaattttttaggaggtcattgtgacatggcaaaatgggtttatatgttcacagaaggtaacgcaacaatgagaaaccttcttggtggaaaaggcgcgaaccttgcagagatgacaagtctcggactccctgtaccgcagggatttactgtaacaacagaggcttgtacacagtattatgaagatggcagaaagatcaacgacgaaattatgagtcagatcatggacgctattgttaaattggaagagatcacaggaaagaaattcggagataaagagaatcctcttcttgtttccgttcgttccggagcaagagcttccatgccgggtatgatggatacaattcttaacctcggtcttaacgaagaagttgtagagactcttgcagaggcttccggaaatgctcgttgggcatgggactgctacagaagattcatccagatgtattctgatgtagttatggaagttggtaagaaatactttgaagagcttatcgacaaaatgaaagaagaaaaaggcgttactcaggacgttgatcttacagcagaagatcttaagactcttgccggacagtttaaagctgagtacaaagagaagatcggagcagatttcccgtcagacgcaaaagagcagttaatgggagctgttaaagctgtattccgttcatgggataacccgagagcaaacgtataccgccgtgacaatgatatcccgtattcatggggaactgctgtcaacgtacagatgatggcattcggaaatatgggagatgactgtggtacaggtgttgcatttacacgtgaccctgctacaggagagaacggacttttcggagagttccttacaaatgcacagggcgaagacgtagttgcaggtgttcgtacaccgatgcacatttccgagatggaacagaaattcccggaagcgttcgcacagttcaaagatgtgtgcaaaacacttgaaacacactacagagatatgcaggacatggagtttactgtagagcatggtaaactgttcatgcttcagactcgtaacggtaagagaacagctcaggcagctcttaagatcgcttgtgaccttgttgacgagggaatgagaacagaagaagaagctgtagctatgatcgatccgagaaaccttgatacacttctccatccgcagttcgatgctgccgcactgaaagccgcaacaccgatggcaaaagcacttggagcatctccgggagctgcttgcggtaagatcgtgttcacagctgacgacgctgttgaatgggctgcaagaggagaaaaagtaatccttgttcgtcttgagacatcaccggaagacatcacaggtatgaaatccgcacagggtatcctgacagttcgcggtggtatgacatctcacgcagccgttgttgcacgtggtatgggtacatgctgtgtatctggatgcggagacatcacaatggatgaagcaaacaagaaattcacattagcaggaaaagagttccacgagggagacagcatttctcttgacggatctacaggagctatttatgacggaatcatcccgacagtagatgctacgatcgcaggtgagttcggaagaatcatgggatgggctgataaatacagaacaatgaaagttcgtacaaacgcagatacaccggctgacgctaagaaagcccgcgaacttggagcagaaggtatcggactttgccgtacagagcatatgttctttgaaggcaacagaatcgacgctttccgtgagatgatctgctctgaaacagtagaggaaagagaagcggctcttgaaaaaatccttccggagcagcagggtgacttcgaggctctctatgaggctcttgaaggaaatccggttacaatccgtttccttgatccgccgcttcatgagttcgttccgacagaggaagaggacatcaagaaactggctgacgcacagggcaagacagttgatcagatcaaagcaattatcgacagcctgcacgagtttaacccgatgatgggacatcgtggatgccgtctggcagtgacatatccggaaatcgctaagatgcagacaagagctgttatccgcgcagcgatcaatgtacagaacgctcatccggactggacagtaaaaccggagatcatgattccgctcgtaggcgatgtaaaagagttaaaatatgttaagaagttcgttgttgagacagcagacgctgaaatcgcagcagcaaacagcagcctgaaatatgaagtaggtacaatgatcgagatcccgagagctgctcttacagcagacgagatcgcaaaagaagctgacttcttctgcttcggtacaaacgacttgacacagatggcatttggattctctcgtgatgacgcaggtaagttccttgatgcttattacgatgctaagatcttcgagaacgatccgtttgcaaaactggatcagacaggcgttggtaagctgatggatatggcgatcacattaggaaaaccggttaatccgaatcttcacgtaggaatctgtggagagcacggcggagatccgagttctgtagaattctgcaacaaacttggtcttgactatgtatcctgctcaccgttccgtgtgccgatcgcaagactggcagcagcacaggcagctatcgcaaataaataggagttctcatagaacttaattaaaaaatgaaataagataagcgtatcattagaaatagtggtacgcttatttttcggctctttgtcaagagttggggtaaaagatttattacaggggctgtgaaataacagtctctttttctatttggaaaggaaaaattgtctacaccttatgagatatttgaatgtggatatgctccgtatttttttgaggcaatccgtctgaactatccagactactgtcgggagctaccaactatgaaaccgcagatacgaccaaaagagcgataggaggagttaaagatggaaacatcagaaaaggttgtgctaagagagcaaccagaaataaaagatttgttgcagactttaatgaaacaagggctgaaaaaagagcaaagaagaagttatccgattgtattgacatcaatacagattttaagaatggtctacgagaccagagctgacgcaagctcacgcatgagtgccgaccagatttcagatgtagcgttatccttagagtatgttaaacagtatggcgaagctcacaaggaactgaattacaaacaagcctgtctgttggaacaatgtgtagccagacgaagctataacctttattctgatgtgcagagaggggaaatgttgtagtagaaattcccgtacaggctggcgaaaagaagttcaagtaagcagaaagtaaaacttgtcaatccgaagttatacggcagaggttacgcaatcggggatatgggacataccgattatgtgttagttgttgacgatattgtagcagttaaagaaaagtaaaggagtgaaaaaattatgagattatcaaacgggtttgtcattgacaaagaaaaaacatttggagaattaaaatttacagcggtgcgtgatgtattcttgcagaatgaggacgggacaccgagtacccagcttaaaaagcgtatctatgatttaaaatgcagtctgcatggtggaattatccctgtgtgtgtaccgccagaagtaccgttaagggaatttccgtacaatgcagttgggataccatacgtttgtttgaagtgcttcatcaaaggaatgaaacagtccatatctgaacgataatggttcacgccaacaactgcgatatatatttgttggcgtttgcttcaaacttggaaccatcgatgtagatatgttgcaaatccacatgctcctcgttgaagattgcttgattgatgtcgttaaaaatgttttcgatcttatcctgaagtacttcgttgatgaaatatccaaaggttcggtatgatggagtatggtgatccatgagatacatgaatctgatattgactttgcagttgtcttccggttctctcagggagcagtagccgctggtcataaatccgaaaagtaccgtttttaacatgttgaacggattatatctgagtcgtccagttgtgtactccggaatatctgtcagatacttatttaaatcgattactcccatcaatctgtcaaatgttaaaacaggatccagcagatccaaacaatctgaaagaaacagtggtaaatatccttgttttgggttattataatttacagttgaaattttcatcgcaagttaattttaatataaaagaggacctttcgttcattttgaacgaaaagtcctctttttccgtagagactgttatttcacagcccctttttttatcatgttcatgatgatatagaaaatgaaaatctatggaattcatacagaatcagcaatttgttcggaggctttctgcggtgcttctccggacagattggacagtttgccgaaagtgtgatataatcgagttagttaaaactaacttagaaaggagcattgtgcatgtctttttttcaaaatacttgtaaacctgaagggattggcggaaaaattatggttaatatgatgaatgccggacattcatctatggctgaatggggatttacacatatagagattagaaatgattacagatgtctggatattggatgtggcggtggggcaaatgtaaaaaagctattagtaaaaaccccatacggcaaggtgatcggcattgattattcagaagttagtgtaataaaatcctcaaaaatcaataaggcagaaatagaaaataagcattgtgaaatcttgcagggtaatgtaatgaaactgcctttccgaaaagaaacttttgatataattactgcgtttgaaacaatatatttttggcctgatattaatgaggcatttaagcaagtatatcgagttttgaaagtcagcggaacttttatgatttgcaacgaatcaaatggcgaaaattctaaagaagaaaagtggactaagattatacagggaatgaaaatatacaattctgaacaaataaaaaaatctttggaggatgcaggttttacagacataaaaatacacaaaaataaaaaaggatggctctgcgtagtttgtaaaaaaggataagatgcagatgaaaatatagtattttagcgtaaaggaattacaagttttatattgaaatgaggtggtcatatttggtaacagaaaaagaaaaagggccagaaactattttaattgtagatgatgattcggaaattcgtgaaattcttcgtattctattatgtagaaatggttttattgtcaaagaagctgccgatgcgaaggaagctctgttaaaactagactccagtattgactttttcttctgttgagcttatatcaagggttatgaatgtgagttgcagcaagaggtagatgaaacattataaaggagatatgatatggcaataattttaaggcttgatagaatgatggcagatagaaaaataagcttaaacgaactatccgaaaaggttggtattgcaaatgtcaacttatccaaaattaagaccggaaaggtaagtgctattcgcttttcaaccttaaatgccatctgtgacgcattagactgtcaacccggcgatattttagaatttcaaaaggacacacaagaagattgatttattaaaaggggatgtgacaaaactcaatcgagttttgtcacatcctcttcgtgtgccgctgcagggcggctgttattcagttgtaaaataaaagagggcggtagcactttgggttatctatcctgtaattccaaaccatatcaacaatgcaatccctataatcaggaaaacaattccaacttgcttgaagggttttgcctcatactgcttaaattcataaaacagtaaaaatgcaacgccaaaaaataatatcgatattgttcctttccatgccggatttccctttattatgcacattatcgttaatacttgggtaatagctattatccattcaaaggcataaacttttgcgtcttttcctattttttcatctcgctcgtcttttattgttctttgtcttggtggctgtttcatatcgtaactcctcctaatttttatgtttatagtacatgaaagtaaaggtttttgtgaacattgaaatcgaaaaagcaaattcatgcgtgttcctttaccgtacatgagcattttcgttttgttgtgaaacatatcattttgattttgctatttcttacagttcttaaaaccgcgagtagtcgctataattgcaacaaaaagtatgtaaatgcaaatcccgagagaaacaacagttatttcagttccataatttgagattgtattatcttgaatagccggaactgctctaaactgaatatatgaaacaagtccgattaatccaaagtcaattaaagtcataaaaattcctgcttgcctacttactttttttacatcatattttgttaattcctctgcattttttgtgttaaaaccggtaacaagcatacttccctttcctgtcagcaaaataattgttgcgataatagcaacgtcaactattccccacataaaccaaacaaaccacataatagcacctctccttattatttatagttcttgatcaaataagttatttctgtaatgatcatacatagccattgaaatagaatgaagaaaaaaatcgtttccacaaaatatgcgggtacaaaaatcagtataaagagggagagagggaaaattatatttagaaaagagccgttaaataacatgattttttccaatgtaattatttggtactcatcaaacttttttcttcttaaagcagaaaatgtatcaataataattgctacgccaatcattccaagtccaacatatttcatgtttttgttttggataaataaagaccatcggctatcagagagaaagtgatcatatttaaatacaaattcagatgaaactataaatattatggcgtaaattgcagtaatcaaggctatataaattgcattagtcataggattttttaatgatttcattttctttcactctccttaaaaatgaatacttcttcaatggtcatatgaaacagttgtgcaatatcataagccaaccaaagtgacgggtcatattttccggtttcaatagcgttgattgcctgtcttgaaacatgaaccttttctcccagttttttttgtgtcagattctccttttcacgcaattcttttactcggtttttcaaaaaatccccctccctttatgtcatgctagccttacattgtcattatagcatgtcatatataaatgtcaagccagcatgacatttattaagacagggaagcattaattttatgtctgaaagagtaaataatcaatatagcaagaattgtgaaaacacaaaccggattatttgttatattataattcgtagggaggcttcttatggaaaataaaacggttatcagcattgaaacggtcataggttatattgaagatcatctcagcggaaagcttgatcttgaaactgttgccacagcggttaattactcaaaatatcatttgcatcgtatatttactaaaacagtcgggatgacaatgcacgattatgttcagagaaggcagcttaccgaagctgcaaagttattagtattctcagacaaaccgatcattgaaattgcttttatctgcggatatgaaagtcagcaatcttttactactgcttttacagctatgtataagacatcgcctgcgcaatatcgtgacaagcaggcgttctaccctttgctgctgcgatttactttacacgacaaaatgcaaagcgccgcactaacaaagaacgatatacggcttgcggttatggaggatataccttcctggatggagttacttcggttggtggttgacggatatcctgttttagatgaaacagactacttacacaaattaaagatatttatccgaaacaggcaggcgttggttttgaaagacggagatttgttgatcggcgctttggcttttggtgttttgccgtgcagtattgaatttatggggatacatccgcaataccgaaaaagagggattcaaaagatttttttggatgcgttgttggaagattattgtccggatcaggatatttcaataacaacttataggaaaggagacagagccgatacaggataccgcgaagaactgcggcagcttggttttgcagaacgagagcttttaatagaattcggttatccaacacagcgttttgtattccacgcaaagcattcagaaacaaataatgacaaatagctttgtgaaaacagaataaaaatctaatttgtaaattatgtgaggaaataacaatgtgcgtaagagaaatagatccgaaagaaactacgagaactttggcatttgagctttggatgaaagctccgaaccctatggttacatttttcaagacttacgatgtaatgccattgatcaaagtaagcaaaagccgcggtatgaagttcaacatgcttcttgacttttgtataggcaaggctgctgtttcagtaaaagaattttatttattgcccgtgggagacaagttgatacagtatgataaacttgctgttaatacgattgttgaaaataaagacggagaagttagttcgtgcgatattgcctgtacggataatcttgaaaaatttaatgccgattatctaagatatacaacagaagtgtgcaatacttgtattgaccacgatctatcggatgaatatatggtcataggaacttcggctattgtaaatgtagaactggatggagctgttgggatgaacagcggaatttttaacaatccttttatgatatggggaaggtatcgcatggacggtgaaaaggctctcttatcaatttcttttcagtttcaccatacgcaaatggacggtgcgcatgcaggtaaatttctaaagaatctgcaggaagaaattgaaagactgccatatctgttgtcctaaatgaaaaaaactcttgccaaaaaagatgatttagtatatactaccagaagttagctgtaactaatcaatggcgctttaaagcggctgtaaactgccgcttatttttttgatcaagagttagcaataactaatcacaagacgtcatttgatttgcgcggggcagaaaaatatccgttgtcaggagagaacagcccggtaaaagaagaatgtgtctataagtgtgaagtaacaaaagttgttgaaggagaaaagaagatatgatgattgataaacgacttattagaacggtaagagaaagtaaaaaatacattgcatggaatgtaatatatcaatggatatcacttgtggcaaacattacgatgatggtgagtattgccgatttgctttccaggctatttgcgaatactgcagaccgggaaaactttgtctgtactgtaattgttgtggcggcagcggtaggcatccgctatttttgtgcggtacaatctgcaaaaatgggatatctttcttccaaggcggtaaagaaagtattgagagaaaagatatacaggaaacttcttcgcctgggaagctcatataaagagaaagctcaaacgtcagagattgtccaaatatcggtagaaggcgtggaacagttggaaacgtatttcggagcatatcttccccagtttttttatgcaatgcttgctcctttgacattatttattgttcttggatttgtcaatgttccggctgcggccgtgcttcttgtttgtgtaccgctgataccggctgcgatagctgcagtacagacatgggcaaaaaaactgttgtcaaaatattggggacagtacaccgcgcttggcgacactttccttgagaacctgcaagggctgacgactcttaaaatataccgggcagatgattttaagaacgatgagatgaacgttgaggcggaaaaattccgcaaaatcacaatgaaagttttaacgatgcagcttaactctattacgattatggatttgatcgcttatgggggagcggcgcttggcatagtgatgtctgtgactcagtacagtaaagggaatgtaagtcttgcgggatgtttattaattattatgctgtcggccgatttctttattcctatgcggcagcttggttcgttcttccatattgcaatgaatggtatggcggcaggacaaaagatatttcggttacttgatctgccggaagcagaagaaaagaaggcagactgtccgaaaggcgatattgtatgccgggatttgcatttttcttacgataatgatcgcgagattttaagcggggtgaatatgacattcaaaagaggcgcttttacagccatcgtaggtgaatcggggtgtggaaagtctacgatttctgccattcttacagggcgaaataaagggtatggcggatcggtttcggtcggagaaacagaattgtctgaaatccgtgaagccgaccttatggagaacataacttacattagtcaccaaagctatttgtttaagggaacggtacgggataatctgctcatgggaaaaccggatgcatcggacagcgaattgtgggaagtgcttgaaagagtaaatcttgcggatttcgtccgtaatgaaaaaggcctggacaccggtttgtcagaaaaagcgtccaatctgtccggcggtcaatgtcaaaggcttgcgcttgcaagggctcttctccacgatagtccgatatatatttttgatgaagctacttctaatattgatgttgagagtgaaaacgacatcatgaatgagatacaaaatctggcagagagcaagactgttattctcatatcgcaccgtcttgtaaatgtggtaaaagcagatgctatatatgtaatggtaaacggaaaaatagcagagagcggaaaacatagagaattattggaaaataaagcggattatgaaaagttgtgggaagcgcagcaaagattagaaaattatggaaaggatggtgctgtacaatgaaaaaaagaagtaggtttaccgttgtgacaaaactgatcggtcttgtaaaacctcttacggcttatatggcgcttgctgtcataatggggattgtcggacatttgtgcgcttcttttatcacgattttcggagggtttgccgtactcgatcttgtcggtgttaatgtgccgtttagtttgacgatcatttttatatctctggcgatattctcggtccttcgtgcggcgcttcgttatgcagagcaggcgtgcaatcattttatcgcatttaaacttttggctctcatacgagataaagtatttcaagctcttagaaagctatgtcccgccaaattagaaagcagagataaaggggatttgatttcagtcattacatcagatatcgaacttttggaagtattctatgctcataccatttctccggtattgatctggtttttctttactttgatcatgacggcttttattgcgtcgtaccatatttggcttggcgggctggccttcatcgcctacctgacgatcggagtgatcattcctttgattatttctaagatcagcggtgacgatggaatgaagtttcgcagcaagtccggcgcactttccggttttgtattagatagtttacgtggactttctgagacgatccagtatggtcagggacaaaaacgtcttgcagaaatgaataaaaaaacagatgaactttccgcagatgaagagagaatgaagaaaattgccggtcgaaatatagcggttacaaatacggtaatcttaatatttgactttatgatgctttttctttccgcatatttatatcagacaaacgcgataggatttgacgggatattgatctgtacgcttgcactgttttcatctttcggaccggcaatagcgcttgctaatttaggcagcactttgcaaaacaccttcgcatccggcagccgcgtacttgatattttagaggaagagcctcttgtagaagagattaaagatgaaaaagaggtttcgtttaacggtgccaaggcggaaaacgtaacttttgcttataaggacgaaataattcttgacaacctttcagcagatattccgaaaaattcagttgttgggatcgtgggcagaagcggtagcggtaaatccactcttcttaaactatttatgcgattttggaaggtggagaatggaagcgtcaaactttccgatactgatatagagcatatcaatactgcaaatcttagaaatatggaaagttttgtgacacaggaaacacatttgtttcacgacagcataaaaaataatataagaattgcaaaactaaatgcaacagatgaagaaataaaggctgcttgtcaaaaagcttctgttcatgagtttattatgactttgccgcaaggttatgatacacaggtaggagagctgggtgatacgctttcaggcggtgaaagacagcggatcggtcttgcccgtgcttttttacacgacgcgccgtttatgctacttgacgagcctacaagtaatttagatagtttaaatgaagctgtcatacttagatctttacatgaagaacggaatggaaaaacggttgtgctcgtatcacacagagagtctacgatgcgaattgccgacaagatatattcggtagagcatgggagaatgagctgataagaaaaatgtcatgtaaaccatactgttgaaacaaaaaaagaaaaaagagataggagaaagaagatgaatataaaaaagatactttacattatttttgggtgtataagctttggactgggcgcagtaggcgcagtgctaccggttcttccgacgtttccgtttttgatttttgccgctttttgttttgcgagaagttctaagaagttagacaaatggtttaagggaacaaaattatataaaaataatcttgaaacttatgcaaaaggtcaggggatgacgaggaaaacaaaagttcggatcatgatcacagtgacatttttaatgtcttttggcttttttataatgtttagaaaaaacctttatataccttgttcgatacttttcggtgtctggctgtttcatattttgtattttacgtttggtgtaaaaagatatattccgaaggagaatgaagggatatgaaaaggattttaaatacacttttgtttcttacatttattttgacattgcttgtgccgatcaccggggtacatattcataagctggcatccgtaatttttctaatactttgtcttgtacatacaggagtttattggaagaagatgaatattttcaggttttttgtgcttggcttaatatttgaggtgtttctgacaggactgttcggcatgatatttaaacaatattcgataattttgtcaattcatacgatcagttctattgcagttgttttctttttggcaatacatatttttgtatttaagaaaaagatttgttatagtttaagatcacatgcgcataatgcgaataaattaaaaaaaggaatcatcggaaaagaagaaaaggcttaaaattgattcttgacatttataaagtcgggtggtatactgtgaaaaatttaataatatattaaaccgttgaagcggagataacgtcaatgatgcctttacagagagtccgggtagctgagagccggatgagaaacaagttggcaaatggaccgctgagggtgcagtcaaatggatgttttccagagtattctgcaacgtgtgggcatacgtcagttgccggggatatgttggtatcctgctaagtgcacagggaatcctgtgaatgcaaggtggcaccgcggatagtgtcgtactttttatttatgtacacgattcgtccttgacagatttatttttttctgtcaggggcgtttttttattcccataaattcctctgacaagattgcaacgaaaagtagtgtaatgatttctggatcggaggtatgaagtatgaatgttttaccgacacaagaagaagtcagaagaatcgcttcaaccggaaaatataaagtgataccggtcagctgcgaaatactttctgatttcacaactcctatcgaaacgttaaggagattgaaaaatgtatctatgcgctgttatatgctggaatccgcatatgcagatgaaacaagagggcgttatacgtttctcggttttgatcccattatggagatacgttgtgcggacggagagatgaccgccggaatactgaagttacaaacagagcatccgtcagcgtatttacgccagattctctctgaatacaaaagtccttgcttttcttatcttccgccgtttaccggaggtcttgtgggatatttttcctacgattattttggatatagcgaagtgtcggcaaaagggcaagtggaagatacagaaaaatttccggatgtagatttgatgctgtttgacaaagtaatagcgttcgatcattttagacagaagatcattcttattgtcaatatgaaactgcatgatgttgaaagtgaatacaataaagcggtcatggaactaaaacagcttgctcatctgttaaaaaacggggaaaagaagaaagaaaccggcggaaagcgtcagggaaaagttacggcggcgtttggaaaagaacagttttgcgatatggttcaaagagcaaaaaaacatatttatgaaggagatatttttcagatcgtattatcgaatatgttatcagcgccttatgagggaagcctcatcaatgcttatcgggttcttaggacaacgaatccttctccgtatatgttttatttttcaggaacagatcttgaggtggcaggcgcttcaccggaaacattggttaaattggagaacggaacgcttcatacgtttccattggcaggaacgagaccaagaggaagagatgagacggaagataaagcgctggaaaaagaactgctgacagatgaaaaagagttggcagagcacaacatgctagtagatctggggagaaacgatcttgggaaaatcagccggttcggcactgtgaaagtagaaaaattacattctgtggagcggttttcccatgtcatgcatatcggctcttcggtgagcgggaaaataaaagaggagtacgatgctttggatgccatagaagcggtgctgcctgcaggcacactttccggagcgccgaagatccgggcttgtcagctgatcggcgaactggagaacaacaaacggggcatttatggcggcgccgtcggttatattgattttgcgggaaatatggatacctgtattgcaatccgcatggcatataagaaaaacggaaaggtttttgtaagaagcggagccgggatcgtagcagattccgtaccggaacgagaatatgaagagtgtttaaataaagcaaaagctacattgaaagcgctggaacttgcagaggaggtggaagaatgatcttactcattgataattatgacagcttttcctataacctttatcagatgatcggcgagatagaaccggatgtgaaggttgtccgtaatgatgaaatatctgtggatgaaatccgacgtctgaagccggagaggatcattctttcacccggacccggcagaccggaagatgccgggatactcatagaagttgtaaaagaacttgggaaagaaattccaatcctcggtgtctgcctgggacatcaggcagtctgcgcggcctttggagcgaaaattacttatgcaaaaaagcaaatgcacggaaagcagtctcagataaaagtcgataccgaaacgttgttgttttcaggctgctcacagagcattttggctgcaagatatcattctcttgcggcagacgccgacacgattccggacagtctctatgttaccgcctccacaaaagacggagaaatcatggcggtacagcataaggaatatccgatttacagtgtgcagttccatccggaatccattatgacaccggagggaagacaaatacttagaaattttatacaaggaggtataagacatgatcaaagaagcgatcgtaaaaattgtaaataaggaagatctcacatatgacgaggcgtatacagttatgaatgaaattatgagcggacagacgtcagagacacagaatgcggctttccttgctgctctgtcaacgaaaagcgccagagcagagacgacagatgaaattgccgggtgtgcggctgccatgagagcacatgcaacccgtgttgagaccggaatggaattgtttgaaatcgtaggaacaggcggcgatcatgcacagagttttaatatttcgaccacagcggcattggtggcagcggcggcaggaatgaaggttgccaagcacggaaatcgggcggcatcctcccaatgcggaacggcagactgtctggaagctctcggagttaatattcaccagaatccgaaaaagtgtctggaactgttaaatgaggcaggaatgtgctttttctttgcacaggagtatcatacttctatgaaatatgtgggggcaatacgaaaagaattaggttttcgtaccgttttcaatattttaggcccgttgacaaacccgggaacacctacgatgcagctgctgggagtatatgacgagtatctcgtggaacctttggcgcaggtattgctcaatctcggcatccgacgggggatggtagtatacggacaggataagctggatgaaatttctatgagtgcagcgacgaccgtatgtgagattcgggacggatggtttcggacttttgttctcacaccggaagaattcgggtttgaacgctgcagtaaagaagatttaaaaggcggcacaccgaaagaaaatgcagagatcacgcttgcaatcttaaaaggggagaaaggtcctaagagaaatgccgtattgctcaatgccggagcggcgctttatatcggcgaaaaagcggacagtataaaggcgggaattgcactggcagaagaacttattgattcaggaaaagcattggatacgctgcaaaagctgatcgaaggaagcaatcgtggggaggggtgtgtatgacgattttagaacagcttgccggctatgccagagaacgaaccgaaaaagcaaaacagaaacgcccgctttcgacgttgaggcaacaggccttttcaatgccgaaaggaagttttgcatttgaaaatgcgataaaaaagccggagctttcttttatctgtgaatgtaaaaaggcgtctccatccagagggatcatcgttagtgattttccatatatacagattgcaaaagagtatgagaacgccggagcagactgtatttccgtattgacagaaccaggatggtttttagggaaggatgcatatcttagagaaatcgccgaagtagtatatattccttgtctgcgaaaagattttaccgtagatgaatatatgctctatgaagcaaaagtgttgggggcatcagcggtacttttgatctgttctatattaagtgagcggcagattcaggaatatatcggtatctgtgatgagatggggatttcggctttggtagaggcacatgatgaaaaagaagtgacaatggcggttcgtgccggggcgcgtcttataggaatcaacaatcggaatttaaaagattttacagtagatacagacaatagccgcaggtttcgtgaaatgattccgccggagatactgtttgtttcggaaagtggaatttgcagcgccgaagatgtgaaaagattgcgtgagatcggcacagatgcggtgctgatcggagaagcgcttatgagaacagaaaacaaggcggaaaagctggcttggctaagaggtgctatatgacaaaaataaaattttgcggtttgtcccgtcggtgtgatattgaagcggtaaacgaactgaaaccggaatatatcggattcgtatttgtaaagacaagtaaaagatatgtttcctttgaaaaagcggaggaattaaaaagcctgctggatccaaagatcaaggcggtcggagtttttgtaaatgaagatttaaaacgaatcgaagaaatttgcgataaaaaggtgatcgacatcgttcagcttcatgggctagaagaagagaaggaactgaactatctgagaagccgtattgttcagccggtcatcaaagctttttgtataaaaaaggaagaagatgtcagacaagcggaaagaagtccggcggattttattttattggattccggcgccggaaccggaagaacttttgaatgggagtggataaaacatatggaaagaccgtattttcttgcaggaggaatccatatagataatgtagaaaaagcgttggagcagttaaaaccttatgcgatcgatgtaagctccggaatcgaaacagagggacgaaaagataaaagaaaaatggcagcgattatgacagcagtcagaaaggaacgaaaattatgacgaatcaaaaaggacgttttggtactcatggcgggcaatatatcccggaaacattgatgaatgcagtgatcgaattggaagcagcatatgagcattacaaaaatgatccggaatttaaccgggaactcacagaacttttcaacgaatacgcaggcagaccctccagactgtattatgcagagaagatgacgaaagatcttgggggagcaaaaatatatctgaaacgagaggatctcaaccatacgggcgctcataagatcaataatgtgcttggacaggcattgcttgcaaaaaaaatgggaaaggcaagattgatcgcggaaaccggagccggacagcatggagttgcaactgcaacggctgccgcgcttatggggatggaatgtgtcgtgtttatgggagtagaagatacgatccggcaggctttgaacgtatatcggatgcggctgcttggagcggaagtgatccctgtaacgacagggacggcaactttaaaagatgccgtttcggaagcgatgcgtgaatggacctcccggatcgccgatacgcactactgtctcggatcggttatgggaccccatccgtttcctacgattgtccgtgattttcaggcagttatttcaaaagagatcaaagagcagatccttcaaaaagaagggcggcttccggatgcggtgattgcatgtgtcggaggcggttcaaatgcgatcggcagcttttatcattttattgaggacaaaaaagtccgcctgatcggctgtgaagcggcaggcaggggaattgataccgatgaaaccgcggctacgatcacgacagggagacttgggatttttcatggtatgaaatcttatttttgccaggatgaatatgggcagatcgctccggtatattctatttccgccggactggattatccgggagtaggcccggaacatgcctatctgcatgatatgggaagagcggaatatgtgccggtgacggatgaagaagccgtttgggcgtttgaatatctggcaaagacagaagggatcattccggcgatcgaatcggcgcatgcagttgctcatgcaatgaaagtcgcgccgttgatgagtccggaaaagataatcgtagttacgatttccggcagaggagataaagactgtgcggcgatcgcccgatacagaggggaggatatttatgagtaatatcaagaatgcgtttaagaacaaaaaagcatttattgcatttttcacctgtggagatccggatctggaaacaacgaaaaaagcgatccgatcagcagtaaaaaacggtgcggatttgatagagcttgggattccgttctctgatccgaccgcggaaggcccggttattcaggcggcaaatttaagagctttgaaaggtgggatcactaccgataaaatttttgcgttcgtaagagaactgcgcaaagacatagatgtaccgtttgtttttatgacgtatacgaatgtggtattttcttatggtgtagaaaaatttgtttcagagtgtcaaaagagccggattgacggactgatcctgccggatcttccatttgaagaaaaggaagaatttcacccgatctgtgccggatatggggtggatctgatctctatggttgctccgacttctgaaaagcggatcgcaaagatagcaggagaggcggaaggatttttgtatgttgtctcgagcctcggcgtgacggggatgagaagtgagattacgacagacctgacttccattgtggcgaccattcgtgaaaacacccggattccgtgtgcggtcggctttggaatctccacgactcaacaggcagccgcgatggcagaatatgcggatggggtgatcgtagggtctgcaatcgtaactataatggaaaagtatgggaagaatgcgccgcaatatgtcggcgattatgtgaaagagatgaaaaaagcgctgtctgtatattgatatagagggcagaaaaactggaaaatatgtttttcctaagatatactatgtcatagtaacagcattttaaagtaggattaaggtgatacgtttatttttaaatagaaatatagttcgctgtgagtaaaggaaaaagataagtgaagcgggcggaaacaggagatatatattatgcggttattattggcagaagatgaaagagcgctgtcaaaagcgctgacagcgattttggaaagaaataattactcagtggatgcagtttatgacggtcagagcgcattggactatctggaagcggataattatgatggggtagtcttagatattatgatgcctaaagtggatggactgacagtgttaaggaaagttcgggaaagggggaatctgattccgattctgttgttgacagccaaatcagaagtggatgataaagtagagggattggatgccggagcaaatgattatctggcaaaaccttttcattcaaaagaactgctggcaagaatccgggcaatcacaagagcgcagacggcacaggcaaattccaaattgaagatgggaaatgtcacgctggatcgggcggcatttgaactttctacaagtaagggaagcttccgccttgccaataaagaatttcagatgttggagcttttaatgtgcaatccgcatcaattaatttcttctgaacggtttttggaaaaaatatggggatatgacagtgaagcagagataaatgtagtttgggtatatatttcttatttgaggaagaagttgtctgctctccacgcagatattcagatcaaagcgacgagaaatgcaggatattctctggaggagcggtcatgataaaaaaacttcgtattaaactcatcgtagcgtccatgatatctttgtttcttgtactttttatcataggagggattgcaggtgttttaaactacaggaagatcgcagaagatgctgatcgaattcttgaagttttggaaaaaaatgcaggacattttccgaaaatgattccgggaaacgaaaaaggggacagacatgggatctcaccggagatcccttatgaatccagatatttttctgttctattggatgaaaaaggagaggttattttaacagatacgtcaaagattgtatccatagacacagaaaatgcaatagaatacgcatcagaagtttgggcaagaggaaaagaaaaaggatttatggatcattatcgctattggaagacgtcttatggcggggagatacgtgttattttcttagattgcaggagacagctggataatttcctgaactttttgtttactacaatgatcgtatctttcatagggctattatcggttttgtttttgatgatttatttttccgggcgtattgtcaaaccgttttctgataattatgaaaagcagaagcggtttattacggatgcggggcatgaattaaggacacccttgacgattattgaagcagacacggaggttttggaaatggacttcggtgagaatgaatggctgcaggatattcgggaacagacaaaaagacttgcggatcttacaggttctttagttatgctttcccgtatggaagaagggcagaatggaaatttgaaagtagagtttcctttatctgatatggtggaagaggtatgtcatacttttcaggcgccggcgaagatacagggaatctgtatgaaaactgcgattacacctatgatttctataaaaggcgatgaaaaagcaatccgaagtctgataacgattttgcttgataatgccgtcaaatatacgaatgaaagggggaggattgacgttactctcgggaaaaagaaaaaccgtatttatctgtctgtatttaatacgacagaatatatttcaaaagaacagacttctcgtttatttgatcgtttttatcggacagatatttccagaaattcccagacaggaggatacggacttggactttctatagcagcggcgacagcagattctcacaagggaaagatcatggcagaaacagaagatgaaaaatcgctgcgtattacagtgacttttccggggcaatgatgaataaacagtacatgagaagcgtcaaagagatctctgtactgataatatcgaatatgcaaaaggcagtaaatctcaggttaataacctagggtttactgcctttttaagatgattttgtcttaaagtacaattaaggtacagcgtgtacgatattcctgtcaataaaaacggataatttatttcatcaaggagtttgacgtgggaagttgaaggttttgatgggatagaacagatggagggaacatttagatggagatgaagaaacaaaaaaagataataggtgggatgattttagttttggcagtgacagcctgtgcctctttttttaaatcggcggcagaagaaattgcacaggaagaaacgtcagaaatatatcaaaatgaaataaagaccatttataccgaagcgtatcaagatgaagtggaaacacagattgaagaagaaaaaagcagcggagcatacacagaggataatatgctgataaaagaaaatccatatggaacaaataccttgtctttatacgtttattttactacgcaggagccggtatctgtttcttacaatgtttcagttccggatttgtctatcggtgacttttcacaaacgccggaaggggaaggaagatttgatacggaacatgagtttcaggttatggggttgataccggaagaatgtaatactattacatttactttgacaaaagaagatggaagcgtggagatatattcttatgtacatgaaatgggagaattgtccggaaaagaggagattcagctgaaacaaacagaagcagccgaagggagtgaaactgtttcagacgggttatacgtcgttttaggaaatgacagtgatgaagaagatttcatgtattattacgataattccggtgtgctcagaggagaaattccgttgatcggttacaggagccacaggcttttattccgggatgattgtatgtattacagtatatcagaaagcaaaattgcggcggtgaatcatcttggaaaagcagagaagatttatgatacgggtacatacagtcttcatcatgattatgtgtttgatgatgatggaaatttgcttgttttggcaacagacactgaaagcgacagtgtggaagatcaaattattcagattaatacgcagacaggtgaagttagctgtgtgctcgatttgggagagttattttctgattataaagaagaatgtacggaaaatgaagatggagaattggattggatacatataaacacgatacagtggataggggacgatgccgttttactgagctccagagagacttcgactattttgatgatcgaagatatttatgatactcctcagataacatatatgattggggaggagagtttctgggaaggaacaggatatgaggaattgttgcttgaaaaagatgagagtgcgggaacattttccaatacgggagggcagcattctgtcacatatgtacaagatgattctttaaatgcaggagaatattatctctatctgtttaataataatttcggagtaagtaagtcgaaacctgcttatgattgggaacagatagaaggaatcgaaacatcgatgaaagaaggagaggaatcctattattataaatataaagtaaatgaaaataatggaacctattccctgatacaatcttttaaagttccatattctgcttatgtcagcagtgcacaggagcataagggaaatattattatagattccggtatgcagggaattttcggagaatatgacgcatcggggaatatcattcaagaatttgagatggaacttgccgatgaatatatttaccgtgtatataagtatgattttgcggacttctattttgaaaagcagtagaaatatatggcgggattttaagtaaaattaaggtgagcagtatatgatctgtctgtaaaatataaaacatatggagcttcctgtataattcaaatataaggaattccaagaaagaaggttgagaaaaaaatacctcagtgtagaataagattactgactttgcacggttagtaa

SEQ ID NO: 7645 - DNA, 57525 bp, Unknown
  gut microbiota DNA sequence
taccgctaccggcacatttgcacaatcaaaagtaatttctgccataatttcaccgccttactctgctgccaattcatcaatgattttgaaaatctcggctttcttttcttctgaaatttcataacgcaacatccttgaaaagttactatctgcaatccctaaacgctccgcagccctccacatcggaacgcctttagatttaaaataatcttttacatctttgtttctcattcttaacacctccaaaaagataacaatatcaataaatttacttgacgaacgttcgttgtacctttataataatcgataacaataacaaacgtaaattacctttattttacttgtttaggagatttcatttatgaaaataagtagtaaactacctctcagatgcgagagactaaaagagcttagaattaaaaacggatatacccaaaacaccatagcggagaaagtagacgttacaacaaaaacatatagatcatgggaagtcggtacttttaactctgccttaaattcacaagtatatccaccaataaataatgaaaaattagaaaaattgtcagatatatataatgtgtctattgactacattcttgggaaaagtaactacacttctgttgataatgaggaaatagggaaaatcactggcctaaataattttgctatttccactctaaaatcattaaaaaacacttatgattttgaacatacaatgaatattttaaattttatcatggcagatacttatctatttgggtcttttcttgggtatttgagagattatatagaaccaaatttcacaataccgatacacccggagcgtgataaagatacaggaaacatttcctatatagagaatttagatattgaatcaaattctattttaacgaataaagaacgttgcatatatcttggaagaaaaagcggagaatttgatggcaaaccgctctatgataccaaaggaatccctatagaaaatttaagtcgaatgaatcttcttttagtagaagaaattttcaaagtatggaaagacaaatataatgcaaggcggtgattaaatgactcttctaaaatgtccagaatgtaggcatgacgtatcagataaggctctaacctgtccgaattgcggttatcctatgaatatgcctagtagtacaaagccacgtataagaaacggaaaaccgacaaagttacctaacggatatggaacgatctataaaatgtccgggaaacgctcaagaccttacagagcaatgaaaacagataaatggataatagaccccgttacaggaaaatcaaagcaaatacgatctactatcggatattatcaaagtagagaagatgcaatgattgcacttgccaattacaacgagaacccttacgacattaaagcggacagtattactttttcagaagtatatgagaaatggagcgaaaactacttccctaccctctctaatccgtctagtgtcagaacggttacggcagcatacgcttattgtaacggtctttacgatatgagaatgaaagatataaaagtatctcatttagagggtactatattaaatgctcaagttggagacagtacgaaaagtagaataaaaagcctattcaatatgatgtacaaatacgctgttgctcacgatattgtcgaaaaggactacgcttctgttatgtttgctaacggtaacccaattaagcgatcaagaacaaaagaagttataccattctcccaggaagaaattttcttgctatgggacaacctagacagtattgcatttgcagacatgatattgataggaatatacagcggttggcgtcctcaagaattggctattttaaaagttgcagatatagacattaaagtcggaactatgctaggcggtctaaaaacagatgccggcaaaaatagaattgttccgattcatccattaataagaccgttaatagaaaaccgtatgaaagaagctacctccatgcagtcagaatttttattcaatgatgcaaacgggcagcagggtacatacatgacttatgataaataccgcaaacgttttgaaaaagttatgaagtatctaaaattgacacatagacctcatgagactagacacacatttattacaaaagctaaagcctgcaatgtagacgaatatattcttaaattgattgtaggacacgctattgatgatattactgaaaaagtatacacccatagaaccattgaccagttaagggcagaaatggagaaaataacaaagtaaaggagttgatgaaaattgattgtagcaatcaaaaaggctctatgataccgcaaatatcataaagcccaaaccacccagtaataagccactacgcaaattaaagggagcatgtttattgtagcattctcctaaccaaaagaaaaggagattttttatggacaaatttttagaaatcacatttgaaaaccagatacttgcaacaaaagacggagataaattcgtagaatatttcgctccgttcatggaaaagctgaaaggaattgtcagcgcagaactgtacgaggaatttgacgaacttttaaatggttgcgccaatcagaacaacatattctatggtgtgcagggaatgaaacttgctatgggcgttcttgatggaacatatcagttgacaatttaggaggtgttttcgaatggattacagagagaaaattattgagataattaataagatagagaggaaggatatactaaggtttatttacatagttattagtgatataatgaaagatgaaaaaattaaataaccgttacataaaaccgtatcgtaggggcgtctgtgagaattacagatgcccttttataatacaaaaaccgctactctcctactttgagtaacggcctctgctttacataccacaggcattatgattttaatattctaatccaactttgtcatactctgatttcaagaaattctctacatcttgcaacgtccataaatggtcataattgtcattataacatccccatacataggcattaatagatgaatcccacacgttgaaaccagttaacctttctccgttccaatctgtacacacagaatcattacaaagataatgctgaaaacctttttcaactctataaccggcgttaagtgctttccttctgattgtggctaatgaatattttgtcataatacatatacctctttctttctaaaatattttcaagtaggatatatgttttgttttatattatagtgttctgtttttagcccgtttgtatgctttgtacacatattataaaccagtaacttccttattgcaactaaaataataatacacgattttagaaagcgataatttgtgtgctacctcatgtgtgctacgtgtgtgctacgtgtgtgctacgtggcaaaatttagggctatcgcagaacattacgaaccacgataacccttgattttacggggtttcttagaatttactctctttagccgcttcctcgatggaaactgcaacagctacagtcataccaaccatcgggttgtttcctgctccgataagtcccatcatctcaacatgagccggtacggaagaagatcctgcgaactgagcatctgaatgcatacgtccaagtgtatctgtcataccgtaagaagccggtcctgctgccatgttgtccgggtgaagtgtacgtcctgtaccaccgcctgaagcaactgagaaatattttttaccctgctcgatacattcttttttgtatgtacctgcaaccgggtgttggaaacgagtcgggtttgtagagtttcctgtaatagaaacatcaacaccctctttccacataattgcaacgccttcacgaacatcgtttgctccgtagcagtttactttagaacgaagtccgtcagagtaagctgttctggaaacttctttaagttcgcctgtataataatcataatctgtctgaacatatgtaaatccgttgattctggaaatgatctttgcagcatcttttccaagaccgttcaagataacacgaagcggttttttacgaactttgtttgctttttccgcaataccgattgcaccttctgctgctgcgaatgactcatgtcctgcaaggaatgcaaaacagtctgtttcctcttcaagaagcatctttccaaggtttccgtgaccaagacctactttacgctgatctgctacagaacccggaatacagaatgcctgaagtccctctccgattgctgctgctgcgtctgctgctcttgtacatccttttttgattgcgattgccgcacccgtaatataagcccagcatgcattttcaaaacagatcggctgaatgcctttgatctggttgtatacgtccagtccggcatccttcgtaatcttctctgcttcttcaagagaagcgataccgtagctgtttaaaacttcattgattttatcaattcttctttcatatgattcaaataaagccatttatgtatcctcctgatttatttaccttaatatgtcgctaaatcccgattactccttacgcgggtcgatgatcttcgctgcgtcatcaacacggccgtactgtccttttgctttttcccaagcatcgttcggcgtatcgcctgctttgatgaaatctgtgaattttccgaggcttacgaactggtatccgatgatctcgttgttttcgtcaagagcgattcctgttacataaccttctgccatctcaaggtaacgaggaccttttgcaagtgttccgtacattgtaccaacctgagaacgaagtccttttccaagatcctcaagtcctgctccgatcggaagtccgtcttcagagaatgcactctgagttcttccgtatacgatctgaaggaaaagttctctcattgctgtattgatcgcatcacagacaaggtctgtgttaagtgcctctaagattgttttgcccgggaggatctcagatgccatagctgcggaatgtgtcattcccgaacatccgattgtctctacaagcgcttcctggataataccgtctttcacgttcagagtcagcttacatgtaccctgctgcggagcacaccagccaacaccatgtgtcaaaccggaaatatcctttacttctttcgctttcacccattttgcttcttccgggatcggagccggtccgtgatttgcgccctgcgctaccggacacatcatttctacttcatgtgaataaatcatgttaaaactcctttcaatatctatgattttcttctgcatacgaacacatactcgtgccatacctattttattttctcataaattaccgcattcgtcaatcaaactttgacaaagttttcactcaaagtgttcactttatgtttttataatgcttttatactattttaaaattttctttcctatttccgaaaatcctattcttttaacaatgcatctttcagcatctcaagtgcagtttcaactgtttgagctctgttttccatacgatttccgtgaaaacggcattcttttactactgtctccccgttcagataacatcctatatacacgagtccgacaggcttgtcctctgttcctccacttggaccggcaattcctgtcgcgctaagagccgcttctgcacctgcggcttttgccgctccttccgccatctctttcgccgtctgttcactgactgccccataagtttcaagcgtctcatgagaaactccaagcaggcgctctttcgcttcatttgagtaagtgacatacccctcattcaatactgcagacgcgcctgccgcatttacaagtgttcctgaaatcagtcctcctgtacaggactctgcagtcgtcacgtgaaggtgtttttcagataaaagttccgtcaccgtttcctctaaagttttctcatatgcttttttttcttttaaataccattcaagatacatgtttacatcccaccttgtgtaagtacctgtttatttttccacacgtaatcgatcagagaaatgatcgtaagtgccactgctgcccaaataagaatttctccgatcaagtcgaacacaccgcctaaatctgcaataagaacgatgatcatcgccatctgaaatacagttttgaattttccccaatagcttgctgcgatcacaattccgttgtcagatgccacgagacggaatccgcttataataaactctcttgcaataatgattattacaatttcggcagctaattttccggaaggaatcagacagatcatagccgaacaaacaagcagtttatctgccaaaggatccataaattttccgaaatttgtcacaagattatattttctcgctattttcccatctaaaagatccgtcagactcgcaactgcaaaaattgcgagagcaatccacttattagccgctccgcctacatccgtaagcataaaaaatacaaaaaacggtaccatgataatgcgcaaaacagttaatttatttggtaaattcataacaattctcctatcagatcatattctaaagctccggttattttcacttttgcgaaatcgccggatatcagttcttcttctgtgttaataaagatcaatccgtccacattcggcgcatcgcggtatgtcctgccgacataagcattttcatccgcaactttgccttcaatcataacaagcatttctctgccgatcatattttctgcattgtcaaatgcaatttcctgctgaagttccatcagatccgcctgtcgttcttcttttacttcttctgcgatctgatctggcataacagccgccggggtgtcttcttccggtgagtaggtaaagactcctaaacgatcaaactccatttcgtcgacaaactgcatcaattcttcatgctgatcttctgtttcgccgggaaagccggtgatcaacgtcgtacgaaggcaaatatcaggaatttcttttctcaatttttttacaatatctgtcagttcctgttttgacgttcttctgcccatccttttcaaaatactgtcgcttgcatgttggatcggaagatcaagataatgacacactttcggttctttttttatcacttctatcaattcatctgtaatttcctccggatagcaatacaaaattcggatccagcggattcccgcaatcttgcataactcttccacaagcctgtgaagacatttttctccatacagatcttttccataaagtgtcgtttcctgtgccacaaggatcagttctttgacaccttgctctgccagctctttcgcttctttgatcagtcgttccatgggaacacttctgaaatttccacgtattttcggaataatgcaatatgtacaatgcttatcgcacccttccgcaatctttaaatatgcaaaatgtcctcccgtcgtcacaagacgctttgctcctgaaaccggaagcgcattaagatccgaaagtataatgccctgctctccttccaatgctcggtctaccacatctaaaatcttatcatatgccgtcgttccgagaacttcatctacttccggaatttcatctaatatttcctgtctgtatctctgtgccagacatcctgtcacgatcaacgcttttacctgtcccgactttttatattctgccatctcaagaatattttgaatgctctcttcttttgcgtcatggataaagcagcatgtattaattacaataatatctgcctgtctttcatcatctgtcatctcatatcctctagatgccaaaagtccgagcatcacttctgtatctacgagatttttgtcacatccaagagagataaacaatattttcatatctgttccatacctcctcttcctttttattatacttttcacttttgtactttaatgtggcaagattcatccgctaacatgaaaaaggcagataccgtttggttctgcctcattgtttttactcttcttctgccgcactctcggctttgatcttcaactcgcctttgttcaattcttcgattgcgatcgacaatggtttctctccctctttcacatcgacaagcggaaggtctccggcaatcagttgtctggcacgtttcgatgttgccataacgatcgaataacgactgttgacgatctttgtttccccttcttcgacatctttgtttacaactttcatcaaatctgtataagacggatgcagcatatttaattttctcctttcaatctttccaaatcttcttttattgtcttcatgaatgcttcattccgaaaacttcttcggtgctctccctgaatgatcatatgcatttcttcaacgcacatattcaggtcgtcattaacgacaaggtaatcgtaataatccattccctccgcttcctcacatgcacggttcattctggactcgatcacatccatcgtctctgtgcctctgcctacgagcctttttttcagttcaccggcgctcggaggtgtcacaaacaaaagcaaagtatcgggaaattcctctttcacttttaatgcgccttgaatctctatttcaaggatcacatcttttcccgcatccaactgctttcgcacatactcttttggagtaccgtaataatttttcacatatctagcatactctatcaattcatctttggcaatcattttttcaaattcatcttttgatatgaaaaaatattctcttccatcctgttccccatctcttggctgcctcgtagtcgccgagacagaaagtgcatacgtatcaggatatcttgacagaagttctttcatcagcgttccttttcccgaacccgaaaatcccgatacaacgatcaaaattccttttctgttcactttgtttcctcctattcgatattctgtatctgttctctgatcttctcaatctctgttttcagactgatcgcgcggtttgatatatccagatcattcgccttagacaagatcgtgttcgcctcacgattcatctcctgtgcgataaaatcaagttttcttccgattccgttagactcttccaatgtctccttcatatgctgaatatgactttttagtcttacaacttcctcatctgtacagatcttatccgcaaagagaatcacttctgccgcaatccgattatcgtcaatctgcgtatcctctaataattcccgcatcttttcttctaattttgtcctgtattctgcaataatctgcggcgaacgctcttctataaaccgaatctgttcactgagcagatccaatttcaaaagaatatcttctttcaaacgttctccttcttttgtcctcatctctacaaactgtgaaaacgcgccttccaacgcttcttttaatccattccaaagctcgtcttcatcctcgctgcattcttccatcgtaaagacttcgggatatctggacaatgtactgacgcgaacatcattatctaacgaaaattcttctgccatctgattcagatattttaaatattctgccgcaagagccgcgttatactttaccgacacctgcgattgagacagatcttcatacgtgataaaaatgtcaacctttccccggtctgcatatgatttaaggagcgtcctgatggacgtctcgaaaaaattcaatttcttcggcatccgaatgtttacatcgagatatctgtgattcacactttttaattctaccgtaaattttcttgagtccttcagaacttcacatcttccgaaccctgtcatactttttatcatcttgtctttcctcgtgttcttctccttggcagtctatatatcaaatttatctgttttttagaactgccgattactgcaattttagttattatacctctaatgcgcgtaaatggtcaacaggtcttttttcattctcctctttatgatatactttcttatatattcatgttcaaaagaaaaatgttttatcatttcccttctgaacaattcaaaatatggagaatttattatggcttttgacggaattgtcgtggcaggtcttgtccacgaactgaaacaaaaactaacagacggacgaattgcgaaaatcgcgcagccggaagcagatgaactgcttcttacgatcaaatccccctgtggacaacatcggcttttaatctcagcaaacgcttctcttccgcttatttatcttacagacacaaataaaccaagcccgatcacggctcctaatttttgtatgcttcttagaaaacatatcagtaacagccggatcacggatatttcacagccaaaactggagcgtatcatctgttttacaatcgaacattttgatgagttgggcgacctttgccaaaagaagctcattgttgaaatcatggggaaacacagcaacatcattttctgttccgaagacggaacgatcattgacagtatcaagcatgtatctgcacagatgagttctgtcagagaagttcttcccggacggaaatattttattcctgatacaatgcataaaaaagatccgctcacaacagaatggaaagaattttccctttccgttaatgataaaccgatgtctgtggcaaaagctctttatacaagctttacagggatcagtcctgttaccgcagaggaaatctgttatcttgccggtatcgactcaactcttccggcaaaagaatacagtcaggatgttcttttccatctgtatacccagtttacgatctatctgtcagcaataaaagaaggcagatttgagcccgctatctactatgacaaacaagaaccgaaggaattttccgctcttgaactgacgtatctttcagcatatgaaaaacgtctctttccttctgtttgcgaaattcttcgtacttactactctgagcggagcctgattacgaggattcgccagaaatccgtcgatcttagacacattgtacaaactgctcttgaaaggaatcggaaaaaatatgatctgcagatgcggcagttaaaagataccgaaaacagagacaaatacaaagtttacggcgaactgatcaacgcttatggttacaatgttcccgaaggcgccaaacagatggaggcgctgaactattacacaaacgaaacggttacgatcccgttagatccaacaagcactccgcaggaaaacgcacagcgtttttttgccaaatacaacaaacaaaaacgtacttttgaagcgctcacccagttgatccgggaaacaaaagatgaaatttcctatctcgaatccatacagacctctctcgatattgcaatgacagaggacgatcttgccgccatcaaagaagagctgtctgaaacaggatatgtgcgccgcaaaaccgtacgaaagaaaataaaacttaaaaacgaaccgctgcactatatttcaagcgatggttttcatatgtatgtagggaaaaataatcttcaaaacgacgcccttacatttgattttgccgccggatgcgactggtggtttcatgcaaaacaagctcccggatcacatgtgatcgtaaaaacaaacggggaagaacttcccgaccgtacatttgaagaagcgggcaaacttgccgcttattattcaagtatgcgaggcagcgaaaaagtcgaaatcgattatatagagaaaaaacatattaaaaaaccaaaaggcgcaaaacccggttttgttgtctattatacaaattactctctcgtcatcgacagcgatataagaggcatccaaaaaatatccggcagttagaattagcaaaggagtctctattctctctgcccggcttttcactgttaaaacatcacaaggcgtcaaacatgccgaaaaacaccgatacatgtctgacgccttttatcgttcttaattctgtcccataagataatcaataaactgctgtgccgtccttcccgacaaacctccatgagacaattcccatttatttgcttccagaagcagatcttcttccggcatttctattttatttttctgcgcaagcgtacgaacaatctgacgaaattctttcttatcgggcgagccaaagtaaatcgtcacgccaaaccttgcgacaagcgataacttttcctgaaccgtatcatttgtatgaagctcttcatctctgtctgctttatcccgaaacgtctcacggatcaggtgacgtctgttagaagtcgcataaatcaaaacattatccggctttctctcaagacctccttctattaccgctttcaaatacttgtattcaatctcaaactcttcaaatgaaagatcatccatgtatataataaacttataattccgatttttaatctgcgcgatcacatcatttaaatcttgaaactgatgcttgtatacttcgatcatccgaagcccctgatcgtaatactgatttaaaacagctttgatcgacgtagattttcctgttccggcatcgccgaataagagacagttatttgcttttttccctttcacaaaagcctcagtgttatcgatcagcttcttcttcgcaatctcataacctacaagatcatcaagatgtacatgcgcaatatttgtgatcggttctaccgacatcgtctttccttccggatgatcgatacgaaacgctttatgaaggccgaatttaccgactccgaattctttgtaaaactgtgtcatcttcctcttgaagtctattgcgttcgacgaatctgcaagtccttctgccagattacagatacgatcccgaatacgccggttaaaaaccttccccgcattgctcgtatttttatattcaaaaagaatctgcatacattctgccgaaaattcacgctccatctcctgaaaatcataatcaaacaattctttaaatatctgaaagtcatgaagggcaatcctgttaatgcttccgtcaatctctcctacaatctcacatgacgtgctgtaagcattttcatcatttacaagaagaaacgtcagatatgtatgccaaagattcccctcgaatccatgactggcagaaatctctaatatctcattcatacattcaaaaagaagacttctcaaatcttccctgttatagtaatcatttccacaattttccatgagaaacgtcatgttttttaatattctgccatgctccatatttttatacagcatcagttcatttgtacgcattgttctctctccttccgttttttcctgctttaccgttttatgttaaacatcctgtcttttctcccagaaactactggattacggcatctgccgtctcaataattgccgagtatttttaagtttgttgcctcttcacgaagtccgcgaattgcatttttcacagcagggtcttcaaggtttccttcaaaatcaacaaaaaaacaatattcccaaggtctccctttgatcggacgagatgcaatcttcgtcatattcagatcattataaataaaatgtgataaaattccatacaaagaaccgctctgatgcggcgaatcaaaacggatgcttatcttggaagcatttttcaaaaatattttttgattcgttacaacgataaaacgtgtggaattgtcctcatcatcattaatttcatcgactaaaacttccagtccgtggacttttgccgcataagcactgcatactgcagcttgtgaaatatcctgttcttcaatcactttctttgccgccaccgcagtattgacaacactgattttctgccaatcaccatggtcgtctaaaaactcagacgtctgcataagagcttctgtttttgaatatactttttttatatccgaaagcttcgcgcccggaagtcccgacaatgtatgcacaaccggaaggatcgtctctgctacaatatagttttcaaattcatcaagcaggtcatacatctcgttcaccgtaccggcagtggaattctcgatcggaagcaccgcatagtcagccgaaccttcctctatcgcttccatcgcttcccgaaatgtcctcacatgaaaattatttacatctcttccgaaaaactgatacattgcagcctgtgaataagctccttctgttccctgaaatacaacacgggcattttcacgatccagattttcgattctgataaacggaaggcgtcccagcgctcccgcttccacaagctgactgtactgaagcttcctgctcatagacatgagctgctgatacagctcctggattcctttcttattgaaatccccctctacttttgacattacatctgcaagtttttctttttctctttgcctgtcaaacaccttttttcctgatttcactttatattctccgacttttctgcagacttccatccgtttttcataaagctctgctatttcattatcaattttatcaagtgcttctctcaattctccaagcgatgtcattttttctcctccgatgcccccaaatttttcttttcacaacagtatagtatatttttctttcaaaatctacatgtttacaaaattaatgacaaactaagataacagttcatccatacaggtgtccgcttatgagtaaaagagtggcgtcttcgttttatgatacgatacgccgccttctttttcatattttgtttctgtttttccggctttaaacttttctttttgttcattcttctttgccgtatctctctattttagcaaatatacatttatctgtttataaaatttccgactgtttgttttctctatacggttgaaaagaaaagggttttattatattataattaaagatttttaggaggttttgtatgagacatttaatgagtccgctggatttctcagtggaagaacttgacaaactgctggatcttgctcaggatattgaagcacatccggcaaaatatgcacatgcctgtgcaggaaaaaaacttgcaacacttttttatgaaccgagtacacgcacacggttaagtcatgaggcagccatgttaaatctgggcggaagtatcatgggattttcttctgccgattccagttccgcagcaaaaggagaaagtgtatctgatacgatccgcacgatttcctgctatgcagacatctgtgctatgagacacccgaaggaaggcgctcctatggtcgcctgtcagcactcttcaattcctgttatcaacgcaggagacggcgggcatcagcatccgacacagacgctgaccgacctgctcacaatccgcaacgtaaaaggacgtcttaaaaatatgacgatcggtttatgcggcgacttaaaattcggacgtaccgttcactctttgatcaatgctctcgtcagatatgaaggaatccggtttatcttgatttcccccgaagaattaaggcttcccgattatatccgccacgaagtacttgaccggaacaacatcccatatgaagaagttgtccgtctggaagatgcaatgccctctctggacattctctatatgacaagagttcaaaaagaacgctttttcaatgaagaagattatgtccgcatgaaagatttctacatacttgacaaagcaaaaatgaagcttgcgccggaagatatgtatgttctccatccgcttccgcgagtaaatgagatttcaaccgaagttgacaatgatccgcgcgccgcttattttcgtcaggttcagtacggcgtatacgtgcgcatggcattaattcttacactgcttgaaattcatgttgattaagaaaggtaaaaggaacagatcatggtaaaaaacacattgaatgtcggaagcattacagaaggcttcgtccttgatcatatcgaggccggaaaaagtatggaaatttataaatatctccaccttgataaactggactgctgtgtagccattatcaaaaatgcccgcagtaataaaatgggaaagaaagatattatgaaaatcgaatgtccgattgatttcatggatcttgatattttaggttttatcgatcacaatatcaccgtcaatattatagaaaacaaacaaattgtcgctaaaaagcagctcacgcttccaaaagagatccgaaatgtgatccggtgcaaaaacccacgctgcatcacttcgatcgaacaggaactggatcatgtctttgttctgacagatgaagaaaatcagatctaccgctgtaaatattgcgaagaaaaacatcgaagacaacgataataaaatccggctttataagtcgtaatatacaaaaggaaatggtgagctgtaagaacaattttttacactgcatccatttcctttttataatcactcttattttacacttgttttttctgctgtatgccaaactgaatcggcttgctttttatcagcattcttctgcgatcttatagatcagtctttccgtatcgtcccagccaaggcacggatctgtgatcgactttccgtaaatgcggttttcctcgatcttctggcatccttcttccaaatagctttcgatcattacccctttgatcagtttttttaattcactgttataatttctgctgtgaagcacttcactgacaattcggatttgttctttaaactgtttatttgaatttgaatggtttgcgtcaatgatcgccgccggatttttcaattccctttgcctgtacatatccaaaagacggataagatcttcataatgatagtttgggatacatgtcccgtatttatctacgcctccgcgcaatatgacatgtgccagatcatttccctctgtcgtcacatccattcccctgtatataaaagaatgagaactctgtgctgccactacagaattgagcattacagaaaaatctccgcttgtcggatttttcattcctacaggtatatccatcgcacttgccgtcagacgatgctgctgattttccacagatcttgctccgattgcctcataagacaaaatatcgtcaagataacttctattttcgggatagagcatctcatctgccccggtaagtccgctctcctcaatcgctcttatatgcatctttcggatcgctatgattccggctaacagatccggagcttcgtccggctttggctgatgaagcattcctttatatccttctcctgttgttctcggcttattcgtataaattcttgggatgatcatcaagcgatctgatactttttcgttgattgtcgccaatttcgatacatactcacatacggaatcttcattgtccgccgagcatggtcctacaattacaagaaacttgtctgatttcccttcaaaaatctctctgatttcccgatcccttttttctttcagtttaagaatttgagaagaaagcggatattctgctttcaaatcagcaggaatcggaaggtgtgcatttattttcatacccatagttttttctcctgtttctttttaaattagtatcctcttgacagatccgacatgtattttagcgaatcacagctttatattgctaaagcattcggggtaacaaaatgtgttaagcaaaacgataagccgggttatgtcgtggacaatcatctatctaggcacgacgttgccgccgtgctcaagcgacctacctgaagcgtgacgggccgccacattgcttctatccggtcttgcttcgaatggggtttacatgtgccctctccgttaccgcagaggcggtagtctcttacactgcctttccacccttacgccgatatggaatccgacgcggtttatttctgttgcactggcctgggagtcacctccaccggacgttatccggcatcctgccctatgaagcccggactttcctcgtctgctgcctttcggcacttacatccgcgattgtctgtcttacttaacacagtatctgattatactattttcctactccttcgtcaacaaaaagtgtatctccatccgctgccgaagtggcaagcagatcacacctctcattttgaggatgtccgtcatgtcctttcacccagtgaaacgacactttatgcttttcttttgctttgagaagacgcttccaaagatccggatttttaaccggttcgtttttcccacgcttccatcctttcttaatccatccgtctacccactgtttattaaacgcatttacaacatactgtgaatcagaataaacttctacctcacaaggtctgttcaacgcttccaatcctgcgatcactgccatcagttccattctgttgtttgttgttctgacatatccccgggatagttcttttgtatgaagcgtccctttcgtatctacatattcaagaatcgctccatatcctcccggtccgtccggatttccccgtgccgccccgtctgtatatatttttacctgcatagaaatgtctgtccttccctctcgatcttcacaatcttgtcctgataatcttttgtgcattcttcgagcatcaaacggctgcacacatcataatttccccaaaaatgcatcggaaatactctttttgtttccgttcgtttcatgaaacagtcgattccgagacaatactgttcccccagtcttggatcgaccggaacaaacgccgcatcaatcttttctccgcaaagcttgttgatctccgactgataagaacgacgcatatttttattatactcgtccggctccccttcccagtgccaccaattcaaatcccctgcgtgatagatcgtctggtctttatagcgaatgaaaaatgccgttccctcatcatttgaccggagcgttcgcacataacatccttttatgtccgcctcttctcctgctttcatataaatgattttatcgtttttctcaggatgagaagccagttcatatacatctgaagaaataatatattgtatatcccggaatttttcctgcagcctgaaaatttcctcgttataatgatcatgatgcctgtgacttacgaaaacatacatttttttgtttccgtctgtttccggaatcgttcctttgtaataatcaaataaaaagcaggcatcttccatttccacaaaaaatccgctgtgtccgatatatgtgatcttcatcataagttaatactctccactacttgtactacttccgataaaatgtattccatatcttctttcgctgtttttgcactttccggcagattcacaataagtgtatttttccgaatgcctgccgccatacagtcgagcattgctttcttggaatacctgagattatatgccctaagcgcttccgggattcccggaataagctgctctgcgacttcttctaccgccttcggagcacagtcctgctctaaatatcccgtcgcccctgtcgttatgatcagttcgacagagcccgagtctgccagctggcgaaaaactgtcgccacaacttctttatctcttggcaaaactttcgcagctttcacttccagcctgttttgttcaagcatacgcttcaaagcctctcctgccgcactttttttctttgcttcataactttctgtatcgatcgtaaatattgctgttctcattgctttgtaacccctttcatttgtttctctctatctgttttaatcatttgtttccccttctgcacaaataataaatctccgatacgtctgtgagcatttattctttgccatctagtatcctctctgcgatccggtttgcattttcataaatgtcttccacgctttccccgattttaaacttcccgttttgataaacagctctcccgtttatcatcgtcatttttacattcagcttactggcgctgtacacaacatttttttcaatattttgtatcggctgcatattcggctgcatcagatctatcataatcaaatctgcgtattttccttctgcaagtatatcacagttgtcaagtcccatcgcgtaagctccgttgacagtcgccattttcagtacgtctgctgccggaacagcctccggatcattatgaactactttttgaagccctgtcacaagaaacatttctttaaacatatcaaggcaattattacttgccggtccgtctgttcctatagcaaccggaattcctttttcaagatacgttttgaccggggcaattccgcttgccagttttaaattagaagccggatttgtaacgacacatatttttttctttttcataatgtcaaaatctgcttcatctaaatgaacgccgtggaataatcctcctccgttttcaaaaaggccgagagaatccatatatgcgatcggtgtcatacctgttttttcccgacattcctccacttctctttttgtctccgaacaatggacataaacaggctttttatattttccggcaagctgcgcgatcccttccatcaaattgcggcttgtcgtatattctgcatgaaatccgaactgataggacaaaagcggagtttcttcacattgataccgaaaatagtcttgctccatctcttctaaagtaccgccgaaatcattgatatctccgcaaaaaaccattctaaagcccagttcttctgccgcttttgcactgtcttgttttaatttatacatatcaaaagccgccgtaatcccgcttgtcaaatattccaaaatcgcaagttttgtcaaatgatatacgtcatcggatgtcagctttgcttctgccggaaataccttatcaaaaagccattcctgaagtttcatatcatctgcataagaacgcagaaatgtcatagcagaatgagtatgcgcatttttaaacccgggcataatcagatttccctctgcgtcgatttcttcgtcccatttttcttcttcatttaaagccggtttttctgtccgctcacttttttccgttttggcttcttttatgcggaaaatctttccgccgtcaatatagatctcacctttaaaaacaggtcgtttttcttccattgtcaaaattcttgcattgtatattctcgtcctcatccgttttctcctactctgatctttcatcctcgcacatcttttcaatcgatcttgtcacaagacgttcaaactcctgagctcttcgatctgccacagcctgtacgtcaagatggcttaattcttcacccgacaatccgcttgccatattagagacgcatgagatcccgcacacccgtattcccgcatgacgagctgccatcgcttcgcacgccgtactcattccgactgcatctgcacctaatattccatacatacgcacttctgccggactttcaaaattcggaccggacgtctgaagatataccccttttttcaaaataatcttttcttccgcggcagttttctcaatgatctgattcagattggcatcatagatttttgtcatgtcgggaaatctttcgccaagttccgatacgttctctccgatcaaaggagacggaacgaaagatgaaatatgatctgtgatcatcataaaatctcctacctgaaaatcacgattgattccacctgatgcattcgtcagaaaaagaatttcaatccccatacgcttcataagacgcaccggaagaacaacctcctgaggcgtatatccttcataaaaatgaacgcgtcctttcattaccattgcaggaactttccctatataaccaaggagaaattttccatcatgtccctgcactgttgaaaccgggaaccccggaatttggtcatatgatatctcttttacaactttcatatttttcgcatatcccccgagtccggatcctaagatcagaccgacgcgggggataaaatctgtcactgttttacaatattcatagcatttctcaagtttgtcaaactgcgtactcatcttacgcctcctattgaattcttttgtcatactgaaagcctagactatttttattttcttgtcaagaactgccgtcagataataatacataccatgccgccatttgaatcatttacgatcttctgcatagaatcctgaagttttacctggctttcatcattaatcatcgctattttatttctcatgccgtccatcacaagctcttctactgtttttccgaaaatatttgttccccatacgccctccggagtctcactctcttttttaatgtatccggcaagatcttccgcctgcttctcatttccgacgatcggtgcgatctctgtctctatatttgcacggatcatatggatcgacggcgcctccgaacgaatctttactccgaatttacttccctgtttgataatcaccggctcttcaagccggatatcttcttttgacggactcacgacgccgtatcctttcattttcacatcggcaaaagcatctttgatccgggaaaattcttcccgcattgccgacaactctttcatcactgccataagctcatattcgccgtgaatctcttctcctgtcacttcactgatcacttcatagtaataagattcggcaaattcaattttcacctgtacttttcccgtatccatctcgatcttttccgtcaggatacgctctatgtacggtccttcagcctcaaaagaccgcgacacgacacttcggatatcatccatcgtctccatgatctttcttacatgctcaaaaagatcttgtttgatcttatgttccctcgaaagcatttccacccatttcggcacataaaactcgacctctgtgaccggaaattcatagagaacctgacgcataatttcatggatatcctcttctttcatctgttcacaattcacaggcaatactgccgtttcgtatttttcacgaagttcttcctgaagcttcttagattcttctgtatatggtttcttacagttaagcaatatcataaacggctttcctatcgctttgagttcttttaccgtcctttcttctgcctgaatataattttccctcggcaaatccgtaacgcttccgtctgtcgttacaacaatccctattgtagcatgatcccggatcactttctgcgtcccgattgcagccgctttcgtaaacgggatctcatattcaaaccacggtgtctttacctgccgctcttcgtccttttcaatatggccggatgctccttctgacataaaaccgacacagtcgatcattcgtatcttcacttccagatcatctgacagcttcacccccgccgcctctttcggaacgaacttcggttctgtagtcataattgtcgtaccggaagcagactgcggcaattcatcttgcgtccgttcttttgcatgtatatctgtcatattcggaagcactaaaagatccataaaccgcttgataaatgttgatttgcctgtccgaaccggtccgactaccccgatataaatttccccgttcgtcctcgccttcatatctttgtatacttgaaatgattccataaaaatacccccttgttctgctgatacaatttatgcatccgcaaacgggggtatgactttatttttcccattgaagcgctctatgctcggaacgcgactctctaagcatcaggtcatccacagcttccgccggtgatttcccttcaaaaagcactttattgacttcttccacgatcggcatgggaacatcatatttttttgccagcttcgccgctgcctttgccgaataaacgccttcaacaaccatctgaacttcatccattgcttcctgcattgaccttccctgtccgataagatatcctgctttccggtttctgctgtggacgctggcgcacgtaacgatcaaatctcctattcccgtcaaacctgtgaacgtctcgatcttcccgcccatcttcacgcccagtctggcaatttccgcaattccgcgggtaataagcgctgcctttgtattatctccgtaaccaaggccatctgcgattcccgctgcaagagcaatgacatttttcaaagaaccgccaagctcaattcctaaaatatccggacttgtatatacacggaacactttattaataaacgcagactgcaaatattccgccgttttttttgtttttgctccgatgacacatgttgtcggaagctttcttccgacttcttctgcatggcttggtcctgaaagaaccgctacgtccgcctgagggatttcttcttcgatctgagcagacaatgtcaaaagtgtactctcctcgattccctttgccacatcaacgataatctgacctttcccgacgtaagctgacatcttcttcgcagttgcccttgtaaacggcgacggaactgcaagtacaagaaagtcttttcccttgactgccgattccagatcacccgtgatcgtcatgccgtcggaaagtttcacccccggaagcttcgtcaggtgttctctctttttatccagcatttcaacttctttttcatcgatcgaccagatcgtcacatgatgtccgttgtcagccagaagaaccgataacgccgttccccagcttcccgcaccgattactcctacatttgccataaatcaatgcccctttctttttgaaccgaatttattttctgttcctttgaccagacgctttatgttctctctatggcgataccatgctaatgcagtcaaaagaactgcgatcccatatagttcataacagtagcctgcttccatatcgaaccatccccactgtccaaataggatcatttcaattaaaaatgctgtgtatgcacaaagagaaccgacagatatgtaccttgtcacgatcacaggaataaaaaagaataatgccgtaacaagtataagaaaaagactctgcggcatatgccacacactgttaataaagacaagtcctgccataaccgcaattccttttccgcctttaaagttcatataaaacggaaagttatgtccgagagtcactcctgcccctgcgtacattacaagcaacggaagacaatcgctcccccgatacataaaacgtacaataaaatatgcagccacacattttaaaacatctccgagaaaagtgaagatccccgctttccatccgagcacacgaagagcatttgtcgttcccgaatttccgcttccctcttttctgatatctatatggttcatcttaccgaccagatatccggtctgaaaaagaccgcacacatatccgaccgcaagacagatcaatcgttccatatttctttaccccttttctttccgttctcttataaagaatttcagggaagttcctctaaaaccaaacgcttctctgatcttattttccaaataccgcgtatatgaaaaatgcatcaattccttatcgtttacaaagataacaaaagtcggaggttttaccgcaacttgcgtaatataataaagcttcagtctttttcctttatctgacggaggctgctgcattgccactgcttctgtcataatctcgtttaaaactccggttgcgatccgaagtgtctgattctcgataaccatatcgatcatatcatataaccggttcaatctttgaccggttgctgcggatacatacataatttccgcatacggcatataagaaagcacctgacggatatcgctttcatactcacgcatcgttctgtcgtttttctcaatcgcatcccatttgttcacaacgatgatcacgccttttccacgttcatgagcaattcccgcaatctttgcatcctgctccgtcactccttctgtcgcatcgataaccataagcactacgtctgctctttccacggctgttaccgtacggataatactgtagcgttccagttcttctttgattttattctttctgcgaagtcctgccgtatcaataaaaatatattcttttccgttatgaagaatctcagtatcaatggcgtctcttgttgttcccgcgatatccgagacgattactcgattctctccgagcagtttattgataatcgacgactttccgacgttcggtttccctacgatcgcaacccgcgggcggtcatcatcttccgcctgagcgcttccttccggaaagttttccgcgacaatgtcaagcatatcgccaagtcccaatctggatgctgccgagatcggaaccggatccccgataccaagattataaaactcatatacatctgccatatatttgtcaaaattatccactttatttacaacaaggacaaccggctttccggatcttctgagcatgtccgcgactttagaatccgcatccacaagtccctgcttcacatcagttataaaaataataacatccgccgtatcaatcgcaatctgagcctgctctctcatctgtgataaaatgatgtctttgctgtccggttctataccgcctgtatcgatcattgtaaattctttatcaagccatgtcacatccgcataaatcctgtctcttgtcactcccggagtatctttcacaatagaaatcatctctcctgccaaagcattaaaaagggttgactttccgacattcgggcggccgacaatggcaactactggtttactcatattattttcctttcaaatcaatctttcggttttgcagtccggatctgtctgtttttctccgatcaccgcatctataaaatcctgtccgcttgattttacaatatcaataggcacttgtaaagcgtcggatacttgtcttaccgtaaaatcatcaagaaacacatcttcatctgtctttaacatattgcacggaatgagcagtctgctgccaagacgctctcctttaagctgcgctgtcagatcctgcgccgtgatcagtccggacacagtaatgcgttctccgaaaaagtcgtttcggatagaaaagacatgaatttccaaattaggaaatttctcttctatcttttccgccatggcgcttatataaggatatgccagctttcctgtggcaatcgacagttcttcctgccgctcgtctcctgtaaggcttttatacccttctgtaaattcttcaaaaagaagacggagcattccgaccccattttccaactgaagatatccgtcataccgctcttcctccggcacctcctgtcctgcgagcaaataccactcatcccctgcatgaatgaaatgaattccgtactgctcataaatgcgatcctgccatttgtgtataactgataatacttctttggcatcctctttcgtaaacggctctaaatgatacagaccgtctctgaactttgtaagccctaccggaacgacagaaacgcttcgaagaagcggaatatatgccgtcaggtctttaatagaacgttccagctcagccccgtcgttttctcctttgcacagtacgatctgtccgttcatttcaataccgccttcaaaaagtctgtctacttttttcagcgcatctcccgcaaaacgattgtgaagcatcttgcagcgtagttgtggattcgtcgtttgaaacgaaatattgatcggttctaacctatacctaataatccgctcaatatcatgatcactcatatttgtaagcgtcacataatttccctgtaaaaaagacaatcttgaatcatcgtctttaaaataaagagtatctctcattccctccggcatctgatcgatgaagcagaacatgcacttattccggcaggaacgatactcatccatcaacccctgcccgaactctattccaagctgctcgtctgcatctttttcaatctcaagctcccactgttctccgtcctgtttctcaatcaaaagtacgatttcttcgtcttccacgtaaaactgataatcaaaaatatcttcaatctcctgaccgtcgatcgaaagaagtttatctccgggttcaatgcctaattcctccgcaatactgccgggcatgattgatttgacaatatgctcatgtttttttcctgtcatttgttattccccttatttgctgttcattctatcacatactataacacatttaaacctcttcgcaaagactgtacttcaccaatacaacatacatacaaaagaagcggcgcttgaatttcaggctgaaaaatgatatgattctagtgctgtaaagtcgtttgcatttttctatgctccggcttaaaactcaatttatactattatttaacaggagaatactatgtcaaatatcgaacttttagaaaaaactcttccggccgcaccgctaaaactcattgcaatggaaagctgcagagaactcggacaaaaagtaaatgattatattgtttcttttcgtgaaaatacaatcaacgaagtatccgaatcttctctgtatgtaaactacaagtcaaacaactatctcgtagactgctgctgtccccgttttggcacaggagaagcaaaaggacttcttaaagaaactatccggggaacagatcttttcatcatgaccgacgtttgcaaccacaaccttacttacactgtaaacggacatctaaaccacatgtctcctgatgatcatttccaggacctgaaacgaatcatctccgctgcaaccggcaaagcaaagcgtattaacgtcattatgcctttcctgtacgaaagccgccagcacaaacgtacaaaacgcgaatctcttgactgtgcgcttgctcttgaagaattaaacgcaatgggagtttcaaacatcgtcacttttgacgcccacgatccccgcgtacaaaacgcgatccctctaagcggatttgacagcttcaatccgccgtaccaatttatgaaagcgctgtttcgcgccgttcctgatcttatccccgataaagatcaccttatgatcatcagccctgatgagggagcgatgcaccgcgccgtttatttttccaatattctcggtgtcgatatgggaatgttttataaacgccgtgactattctacaatcatcaatggtaagaatccgattgtggctcatgaatttctcggcgatgacgttgccggaaaagatgttatcatcgtagatgatatgatcgcttccggaggaagtatgcttgatgtcgcaaaacagttaaaagaaagaaaagcaggccgtgtatttgtatgtacaacttttggtttattcaccgaaggatttgaaaaatttgacgaatactatgaaaagggatatatcaataaagttattacgacaaaccttacatatctgcctgcagaattatacaaaaaaccatatttcgtaaaagcagatatgagtaagtttctcgctttgatcattgattctcttaatcacgatattacaatcggtgctgtaatgaatccgacagacaaaattcatgctctgcttgaaaaatatgcccgcggcgaacagatttgatcgtgcatacagtataaaatatattgtaactaattgattttaaaagaccggcgcttgaatgtttgtttgctatacaatgaaacttagagctataaaaacggtacagtcaaaagattcttttatcttgagactgtaccgtttttatagtttccaaatgtatccctcaccgctttgcaaacttaatacagtttagcaccgatcaatctcggacggtatccttttttctctaatgcttttagtatctcctgcttgtgttctgttccaaatgcctccatcgtaatacgaagctctactgccgcatttctgtttgtacttacaaattggttatgctccagcttaattacatttccctgagcttctgcgattgtctgcgccacctggacaagttcacccggtttgtcaggaagaagtacagatacagaaaaaatcctgtcgcgttggatcaatccatgctgtacaatagatgacatcgtaattacgtccatattaccgccgcttaatacacagactacctttttccctttgcagtcaagctgcttcaatgccgctactgacaaaagacctgaattttcaacgatcatcttatgattctctaccatgtcaagaaatgcgccgatcaattcatcatcttctacaagaagaacgtcgtctacattttccttaacaaagggcagaattttatctcctacagctttcacggccgttccgtccgcgatcgtattggcgctttcaagttgtacgacttcgcctgccgcaagcgccgctttcatacttgccgcctctgccggttctactccgattacttttattttcggattcaacatcttagccagcgtcgcaacgccggaaacaagtccgcctcctccgatcggaacaagaatgtaatcaacagtcggaagttcctgaacgatttccattgcgatcgttccctggcctgttgctacatctatgtcattaaacggatgtacaaacgtatatccctctttttctgccagctcacacgcataggcataagcatcgtcatagacatctccgtgcaggatcacttccgcgccgtagctctttgtacggttcacttttataagaggtgtaaccgtaggcataacgataactgctttacagccaaatttttttgcggcaaaggcaacgccctgagcgtgatttcccgccgatgccgtgatcagtcctctgcctcgttcttcatccgataacgtactgattttataataagctcctctgatcttgtatgctccggtatgctgcatattttccggctttaaataaacctttcctccgctttgctcgcttaaataatcactgtacacaagctttgtagaattcgtcactttttttacaagctcgctggcttcttcaaatttctccaatgtcatcatttttcttcatcctctctgtaaaacaatgcgtttacaaactcatctgcatcaaatttctgaagatcgtctatcgtctctccgactccgatatattttacgggaattccaagttctgcctgaatcgcaactgcaattccaccttttgccgttccgtccatctttgtaagaataacacctgtaatgtctgccacttcattaaactcttttgcctgtgccaaagcattttgtcctgttgtcgcatctaatacgacaagtgtctcccgaaaagcttccggatactctctgtcgatcacacggttgatcttcttaagttcctccatcaggttctttttattgtgaagtcttcctgccgtatcacagagaagcacatctgcatgacgtgcttttgccgcagctaccgcgtcatagattacagctgccggatctgctccttcctgccctccgatcatatctgcatcggcacggttcgcccattctcgaagctgttctcccgccgcagcacgaaaagtatcggctgccgccaaaacaacctttttcccctgacttttcaactttcccgccagttttccgatcgtagttgttttcccgactccgtttactccgatcacaaacacgacagatgttctgttttcaaactcatatgccgtctctcctacatccatttgttcccggatactgtcaatcaataattgtctgcactcaatcggttctttgatatgtctttcttttacttttgcccggaggtcttctaatatttccattgtagagtgtactccgagatcgcccatgatcaacgtctcttccagctcctcataaaactcctcgtctatttttgaaaagccatgaaaaatactgtccatcccggatacaatattatctcttgtctttgcaagacctgatacaagacgcctgaaaaatccttttttttcttccatttatctaattaattcctttctctgattcctttatcaattctcagcgatccaatttatcttccaaaagatcgactgaaacaagcgttgaaacgcctttttcctgcatcgtgattccatacagtctatctgctgccgtcatcgttcctctacgatgcgtaattacgataaactgcgtatttttcgtcagtttatgcagatattgtgcaaagcgggtcacgttattatcatccagcgccgcttcaatctcatcaagaagacaaaacggcgacggttttaaattctggatcgcaaataataaagaaattgccgtcaacgctttttcgccgccggaaagctgcatcatattttgaagttttttccctggcggctgggcaatgatacggattcccgcctccaaaatatcctcatcttccatcaactccaatgttccttttccgcctccgaacaactgtcggaacactgtgttgaactcttcttttatttttaaaaactgctcggcaaactgttttctcattgcagcatctaattcatcaatgatctgcatcagcgtctgctccgcctcgacaaggtcgtcatgctgatttttcaaaaatgcatatctttcggaaatatttttaaaatcttcaatcgcattgacattgactgtgccgagttttcggatctcatttttcaactcttgtatctgacgcttcatatacgcaagatccgtcagattttcgtcacgaagcttcatcgcatgattgtatgtgatctcatattcttcccacatataattcatctgcttttcagacgccgcctcgtaagattgtttttgactgtccaggcggaaacattctttatcgagagccgaaatatgttttgacaagtcttcccgcatttgcagaaactgtttatgcttcctgtttaatgcatctcttccctctgtctgttcttttatttctttttcaatttcatcaaacaattctcttgaattatcaatcgttccccgaagctcttttatcttgtcttccttttccttaatctcatctgacgcataatctttatttttatccaattcttccagttctgcctgaaacttgacgatctcttcttcaatacgtgaaatattttccgatacgaaaagattctgctgttccattcctgccaaagataaatgtgattcttctgagatcttaagctgttcactctccgtatctctttctttttcaagcagagcatgaagttcttcgatccgaagattgagttctttttctaaattttcagatacctcaagttccatcctgatcgactcttcgttctctattatctctcctaactctctttcaagctttccttgttctgcgacataacctgcacagctttgttttgcctcctccatacgcgtcttcgtctgctcggcattcatcttcgctgtattttcgatgaccgatgcctttctgagttcctgacggatatcatctaccatattgtagcatcccgcgcgttcagatttaatcctgcttacatctgcctcggcggcatccatatcttttttcagcatggctaccgtcttttcaaattcttcgatctctcgtcttctgctcagcaggttgctggaatttttaaatgcgcctcccgtcatcgatcctcccggattgatcaattctccttccaaagtaacaagtctaatcgactgcttatattttcttgcaatgagaattccgtcatcgatcgttctaacgacaagggttcttcctaacaactgctctgccagtccggtaaaacgcgcctctacataaacaagcttatctgccgtaccgatcactcccggttctttaagcgcttcttcattgcgaattccgcctccgcctctcatacttgtaagcggcaaaaatgttgcccggccgaacttattcgtctttaaaaaagaaatcattttcttggctgtatcttcattatccgtaacaatattttgaatacttccgcccaaagcagtctcaatcgcaatctcatattctttatcgactttgataatatctgcaacaacgccgatcaatcccggatttttatccttatttgccatcactttacggatactgtttccatatccatcataacgctccgtaatatttttcagtgattccagcctggatgcctctctgtgatatgctgttcgtccgacattcaatttttcctgtctgacatttaactcttcttgaagtttttgtatcttctgttcattttcggtaatctgcatattatagagccgaatcttatcttgaatctcagacaaccgctcttcatgttcatgcagctgctcttcctgctctttcgcctttgccgacacttctaaaatatttcttgcaagcacggattttcttgttgatatttgatctctcgttgtatcaaaatgttggatttttgctttcgtagaagctctgtttccaagaagatccataatttcctgtttccgctgttcgatctcttctgtatgctccgcaatctgtgtctgcacatcgatcagtcgtttttttacaaccgtatctgcctgcgacgcttcacgcagcttttccgaaagatttttcttttcttcttcaaaagacgctttctgctcttttctcatattgatttccgattggacggtattcaaccggttatcataatgctcatcattcatacgagccgtattgatctgttctctcaatacattgatctgaccttccagttgctgcttcagtaaatttgtttcattcaaacgattttttgcagtttcgattgcaaggtcgatctcttctacttcctcttcaatcgcctcatactccgttttcatcttatcataactgatatttgactcttctaattctaatgatgcgatctccagtttcttttgtgtttcttttaaacagtcacggatcctctcttcttccaaaaggaacatattaatatcatatgtctttaactcttcctttttctttaaatactctttcgctgtttccgactgtttttccaaaggtcccaactgcttttccagttcctgtaaaatatcgtttacgcgggttaagttcatacgttcttcttcaagtttctttaccgataggttttttctccgcttaaactttacgattccggcagcctcgtcgaacaattctcttctttcttccggcttcccgcttaatattttatcgatctgtccctgacctataatcgaatatccttctttaccgatacctgtgtcataaaacatttcattaatatctttcagccgacaggacgctccgttgatcagatattcactttctcctgaacggtacagctttctcgtcacagtaacttcttcataatcaacaggcaatttgtgatccgcattatccaatgtgatcgctacagaggcataacttaacggtttcctgttctctgttcccgaaaagattacgtcctgcatcgtaccgccgcggagctgttttacccgttgctctcccagtacccagcgaactgcatccgcaacattgctctttccgcttccatttggtccgacaatacctgtaattccgttatgaaagtcaaatttaatcttatttgcaaaggacttaaacccctgcacttctatactttttaaatacatagaacacctgctttatctttttttcagcacatgaatcgcctcataggcagcctgctgttccgccgcttttttagtccttcctttgcctttaccgtacgacctgccccggatcgtcagttccacagaaaatgatttgttatgatcaggtccttcctcgcctatcagatgatattctatctctcctagtttttcagcctgaacaatctcttgaaggatagttttactatcataaaagagtttcttatcttcctgatccgtcaaaacaaaacgatgtataaactcttttgcattagtaaaaccaccatccagatatattgctccgatcaaagcttccagtgcatctgaagtcacagaatcacgaaaacgccctcctgttacctcttccccttttccgagaagaagatagcttccaagatcgatgtctctcgcgcacatagccaatgactgctcacacaccatgcttgcccttgtttttgtcagctctccttccggaactttcggagactgccgaaacaaaaactcactggaaatcagttctaagaccgcatctcccaaaaactctaaacgttcattgcatctgtatttttccatccgatgctcattcgtataggaactgtgcatcattgcctgttcaagaaaagaaaaatttctgaatcgataacctatcttctgttctaactcttttaatttcttatgcattttctactctttcccggtgtcttgcaccgtcctttatttcttttccatgtaaaacgaaaaagcccacaggggctttttcattttacaccaaattattccactgcttttttgatctgatcaacagcatcctgaactgttgttattttctccgcttcttcattatcgatctcaatgtcaaactcttcttcgattcccatgatgatctggaatacatcaagagaatctgctccgagatcatctacaaatgtactgtccggtctaatctcttcctcacttaaattaagaacttccgcgataattttttgaagcttttcaaattccataatatcttctccttacctgatctttaaatattttcctgatttttttgaataactgacgttatcttttcgttgatcttctgctctttaaatgtcacacattgaataatcgaattacatacttcttttgatgtcgagcttccatgtgttttgacaacaagacctttcaatccgagcagcggtgctccgccatgttcgcttgtgtcgaaatctttcaacgtatctttcaaggccggtttcaccaaaagaccgcctattttgctcttcagatttgccatcataccacttttgatcttcttgacaagcgcccctgcaacgccttcataaagcttaaggatcacgttgccgacaaaagcttcacatacgatgacatctacatcgccataggggatctctctcgcttccacgcttccgataaaattgatatcaggacactctttcagaagcggaaacgtctctttcacaagggcattccctttctcttcttccgcgccgatattcacaatgccaaccgtaggattcttcttacctacaacgctctccatatagatagatcccatctttgcaaactggacaagatgagacggtcgggcatctacattcgctccgcagtcgatcaaaagggaaactcctttcagcgtcggaatcagcggcgcaagcggcggacgctctacccctttaatcttgccgacaagaagctgtcctccaacgagaaccgcgcctgaatttcctgccgaaacaaaagcgtctgcctcaccgtttctgacaagtttcattgccgtcacaagagaggaatctttcttgctgcggattgcttttaccggcggctctgcagtttcgatcacttcagtcgcattcacaatatgaatcttttcatccggatatgtatactttgcaagttcttccttcaatatctcttcttttcctgtgagcagaacctgaatatcgttccgcttttgtactgcttctacagcgccttttaccatctccaccggcgcattatcgccgcccattgcatcaagcgctactcttgtcatgtcagacatcttcattcctcctaacgctactgaaatcattctaattgatattattgtaaaaatcaactaaaaaatgtccgtcggacatctttttatcatacgcatagcaataaaaaaaggacgtaaaatcatattttacgtcctcttcattcaattcacgattagtcaacggaaataatctcacgtttattgtatgcgccacaagctttgcatacacggtgaggcatcatgagttcgccgcacttgctgcattttacaaggttcggagcgctcatcttccagttagctcttcttttatctcttcttgctttagaagatttattctttgggcagattgacataggttacacctccttaaaattcttaaataagtcacggacaactgacattctaggatcaagccccgtatcttcacaatcgcaggactttgtattcaaattttgaccgcataccgggcaaagacctttacaatcttccttgcacagtactttttccggccatcccgacaagatctcattactgagtagtttgtccacgtcaagatgatatccgtcaataaagtttgattcatccagctcctctgtcagttctgcgtcggagagacctatgtcgacatgttttgcaaaatctaaagcaaattcatatcttacatcctccaagcatctgtcacagggaatgaccgtcacaagtctggtatctgcataaataagcatttcctttcccctgacatgttctacccggacatgaaccggctcactctcgacaatcggatacttcccgaatttcatccggatctctcccattgtaagcggcacagtctcttcaactgtcttatgctggtctgacaaaacgtctgataggttaattaacattgttatttactcctattcatacctgaattattatatcatgtaaattctgtttgtcaaccgtcattttcatgaaaacacacaaaatatagtattttccatacgatctttaagacaactcaactcatttactattttacaagcgccaatgtctctcttgcaatcgcaagctcttcatttgtcggaataacaaatacccttacttttgaacccgcttttgtaatctcagcctgttttcctctcaaacctgtatttgcctctttatcaaagtcaactccgagatatcccagataagaacacacctgttctcttacataatcgtcattctcaccgattcccgcagtaaatacaatatcgtctaccccattcattaccgccgcatatgctccgacatatttggcaacattataggaaaatacgtccattgcgatcttcgcttttttatctcctgaattcatcgcatttgtcagatcacggaaatcgcttgagagttctcccgaaataccgaacacacctgacttcttattaagaacgtccatcacgcctgcaatatcaagatgttctttctctgcgataaattccatgatcgcaggatcgatatttcccgaacgtgttcccattacaagaccttccaacggagtcattcccatagaagtatctacagattgtccgttcatgacagctgtcacacttgatccgtttccgagatgacatacgatcgtcttcagttcttcatacggtttttccatcacttccgccgctttcttagatacgaaactgtggcttgttccatggaagccgtaacgtctgatcttataatcctcataataattgtatggaagtccgtacatatatgctttttccggcattgtctgatggaacgccgtatcgaatacagctgtcataggtgtattcggcataagtttttcgcaggctgtaataccgatcaagtttgccggattatgaagcggcgcaagatcattacattcctctatcgctttcttcacttcttctgtaatcacaactgaggatgcaaacttttctccgccgtgtacgacacgatgtcctacagctccgatttcatccaaactcttaacaacacccgtttccggatttgtaagagcttcaatcacaaactgaattgcctctgtatgggtcggcatcgccttttccgacacctctttttctccgccttccggctgatacgtcagacgtccgtcaattccgatcctctcacaaattcctttcgccaaaacttcttctgattccgcgttaatgagctgaaatttcaatgaagaacttccacagttgattactaatacgttcattacttctcctccatttttgtttttataaactatataaacagaaagttttactgaaactctctatgtactcgatcttactctgcctgtgcctgcaccgccgtaattgcaacaacacccacaatatcttctgcgctgcatccgcgtgacagatcgttgacaggagctgcgattccctgtgtaagcggtccgtatgcctctgcctttccaagtctttgtacaagtttatatccgatattgccggcatcaagatcagggaagatcaacacgttcgctttacctgccacttcactgcccggagctttcgatgctccgacttccggaacgatagcggcgtcaagctgaagctctccgtctaattttaattccggcgcaagttcgtgcgcgatctttgttgcttctacaactttatcgacatctgcatgttttgcacttccttttgtagaatgagaaagcatcgctacaatcggttcttttcctgtcagcgtctcgaaagattctgcggaagaaagtgcaatgtttgccagtttttccggatcagggttttgctcaagtccggcatctccgaagatgaacgttccgtccgctcccatatcacagtcaggaacaaccattaaaaagaatgcagatacaagttttgttcccggctttgtcttcaagatctgaagacacggacgaagtgtatccgccgtagaatgacatgctccggacaccataccgtcggcgtctcccattttcaccatcataacgccgtagtacagataattattcaggaggagctctcttgcctgctcttctgtcattccttttttctgtcttaattcaacaagctttgcaatatactcttctgttttatcatttttagccggatcaacgatcacagcgcctgtaatatcatatgcgcctttatttttctcgatttcttcttcgtttcctacgagaatcaaatctgcaatcccttctcttaagaccgtctgcgcagccttataagttctttcgtcctctgtctcaggaagaacaatcacctttttatcagcttttgctcttgccttgatttcatcgataaatcccatgatttaaaagccacctttcatttttcacaattatatttttattataacgcaaagggattttgtatacaaggggattccatgtgcatttttaagtacaattttatacaatttcttttcatctttgtatgattgttataaaaatatcaatctttggtttcttatgccctttgttatttgttttctcttccctttgttcttttcttccgttcttttaccctcacagcctaaacatcgttgttacgatgttaaaataaacaaggattgtgcatgtatcaagaattgttgtaataagcggagccgccatgattgccggatcaagtccgatcttctttgccagaagaggaaggatacacccgatacactttgccatcattacaactgcgatcattgtaattccaagggcaactgccagcataatgttacgatcatacataatacagattcttaccccgttcacaaacgcaagaagagttccgacaacaagcgccactctgatctctttaaagataactttaaaaatatccgaaaactcaatttcgccgaccgcaagacctcgaataatcagagtcgagctttgagatccgcagtttcctcccgttcccatcaacatcggaataaatgtgatcaagatcggcatcgcagccatcgcctgctcataatatcccagtatttcgcccgtgatcgttgccgaaagcatcagtagcatcaaccacggcgtacggtttttcgcctgttggaaaacggatgtttcaaaataagaatcttcatttggactgacaccggccataatactgatatcttctgtcgtttcatcctgcaatacaagcatcgcatcatctactgttacgattccgacaagacagtcttcatgatcaattacgggaattgctactaatccgtatttattgatcatattcgccacatgctcctgatcatccagtgtgcgggcgtaaagcacgttttcatccatgatctcttctatcagtctcgactctcctgccgtaagaagatcctttacatcgaccatgccgatcaatcttcttttttccgtcacatagcatgtataaatcgtctctttattaataccgacctgacgaatctttaaaatagcatccgcaaccgtcatctctttacgaaggctgatatactcgatattcataatgctgcccgcactgtcctccggatactgcaaaagcgcatttatcttctttcttgtctcttcatccgttgccatcaaaagacgatccactacatttgccggcatttcttctaatacgtcgacggtgtcatcaacgtacatctcttccataacttcttccaactccgaatccgtcagcgcattgatcaaatcttctctcatgtcgctgttcatatccgtaaacacttccgccgcttcttcttttgccagaagacggaagatcaaaatacgttgttttttgtccaattcttccaatgcatctacaatgtctaccggatgcacagactccagttcttcctttaattttttaaaatcatgcttttcaagcagttcgatcatctgctctacgtcaagtctgttttcctgatccatgcctaactcctcatcttccaagatatctttttgtaacaattcagccataataggcacgcagtgcggttttatgaacaacacggactgaaccgttacatattccactgtaaaaattcatctttttatagtataatatggcagaaaatgatatacaaggagtttcttatgaaaattgtaggacttattacagaatataatccatttcacaatggacatctctaccatatccaacaggcaaaacgtacaaccggtgccgacgctgtcatcgttgttatgagcggcgattatgtccaaagaggtgttccggctgtcatgccaaagcgtttaagagccgaatccgctctggaatgcggtgcttccgctgtatttgaacttcctgtctgctattctaccggaagcgcagaattgtttgccgaaagcgctgtcgctttgttggaccagcttcaaattgtagactcgctttgtttcgggagtgaatgcggagatttagatgctttatccgaaattgcagaccttctctgtcaagagccaaaagattaccgttctcttttaaaaaaacatttaagaaacggactttcctttccgtgtgcacgcagaaaagctttgaaagaatatcttccggaaaaaaactttgcggctcttttagatgaacctaataatattctcggaatcgaatacctaaaagcgatcagaaaattaaaaagcacgatcaaaccatatacgatcctcagaaaaggcgcccggtatcacgaccaagaactcagtacagagaatttaagttctgcatcggcgatccgttctcttctttcgtattcaggatcttctttaagaaaatatgacgatctgccaaagggagcttttgacgacaccgccccttttaacattttcggagaattggaatcacaagtgccgcagtgctgcctgaaacttttaaaagattgccacaaagtttcttacccgatttatcaaaacgacttttctcttatcctgaaatacaaattattaaacaaatatcccgaaaacctgcttcgatacatggatgtctctgaagaactggcaaacagaatctgttcccggcttaattactttttcaactacaaacagttctgtgaccttctaaaaacaagagaacttacgcagacacggatcaaccgggcactccttcatataatgctcggaataaagaaaacagacgtagaggaatatattgatggcggatatcatttttacgcccgccttttaggctttcggaaagaccgggaaaaactgctcacacgcatttcaaaagaaagttcactgccgcttcttatccggttgtctgaaaccgaaaccatccctcctctaggccgcaaaatgcttcgcaatgacatgcttgcatctaatttatacacttccgtcgtcaccgataagtttaaaacagccttccaaaatgaatacaagcagaaggtgatcaaaatttaatttccgccagacaaaaacatgcccgcagcggtctttttccaccactgcggacatgtttttatttttctgttatttcaatcattacagtctctttgcgattgctttaataaactgctcgctgttgagtaccgtcggattttcaagcgttgtgatcaatgcgagatcttttgtcatctctcccgcctcgatcgtatctatcgttgctttttccaacttatccgcaaactccatcaattcggtattgccgtcaagttctcctctttttctaagcgcacctgtccatgcaaaaatcgttgccactgagtttgtcgatgtctcttccccttttaaatgcttatagtagtggcgctgaacagttccgtgagccgcttcatattcatagtatccttccggtgaaacgagaacagatgtcatcatcgccaacgaaccaaaggcagaagacaccatatcactcatcacatctccgtcgtagtttttgcatgcccaaatatatccgccttctgatttcattacacgggcaaccgcatcatcgataagcgtgtaaaaatactcaatgcctgcttctttgaacttctcatcaaactcagcgtcataaatctcttgaaaaatatctttaaatgtatgatcatactttttggaaatcgtatcttttgtggcaaaccaaagatcctgctttgtatcaagagcataagaaaaacagcttcttgcaaaactttcgatcgaacggttgatattatgcattccctgcacaatacccggtccgtcaaaattatgtacaagctctttcgtctcgcttccgtcctctgctgtatatacaagttcaactttgccggctcccggaattttcatctcagaacctttgtatacatcaccatatgcatgtcttgcaatcgtaatcggtttcttccaattcttcacacacggctcgattcctttcaccacgatcggagcacgaaataccgttccgtcaagaatcgcacgaatcgtaccgtttggacttttccacatctctttcaaatcatactcatccatgcgcgctgcatttggagtaattgtagcacattttaccgcaaccttatatttcttggtcgccattgcagaatcaaccgtgacctgatcgtctgtctcgtttctatgctctaatccaagatcataatattctgtttttagatcaatatacggaataagaagctcgtctttgatcattttccaaagaattcttgtcatctcatctccgtccatctccacaagcggtgtcgtcattttgatttttcccattgttattttctcctttttaatatatgaactttttgcccccatctattcaacacatcttccgcttatacagcttccgatgtagctgtactttttgcaatctaatatccctgctttttcaaattttgcattacatgaataatatgctcattagcaagctgttctgccatctctgcatctctgtctttgatcgcacgtaaaatctgtctgtgttcacgtatcgactttctggctctttcttctgatacgatcgatgattttctggctctttgcacataattatgaaaatccgtcagaacatgtttcagcattctgcttcccgaagcttcatagagaacagcgtgaaaacgaccatccaacgccgcaacctgctccgtgctgaagccgctttcctttttcatttgaaactctgaaagaagaagcgattcttccaactggtcaagctgctcttctgtaatatgttctgccgcccagcgggcgcacaatccttccagcatcgagcggatcttatagatatcccatatatctttatgagatatacccgatacataagctcctctgttcggaataatcgtcacaagcccttccaactcaagctgacgaagagcctcccgtacaggcgtccggctcactcctaattctttccctatcgccgtttccctaagttcgtcgttttctttatatgttccatttaaaatattatcccttatcttctgaaacacacgacttccaagggaatgatcctgatattcttccatctgaaatcctccgactataatctacaatacaacatgcagttccctacatacactttctattttggcaattaattcttcatctgtcaagaccgtaacgcgtccgtcctcatactgtttatcaacccattctttcagacgatgtaccagttccgaatttttatcaactttccgttcttccagaagtttaaaatacgcattgatccaatatgcgatccccgctgttccggatgtattggaaaccgacaccagtgcgggacggtttaaaaatttatccgtatcaaaaatattgtatatttcctcatttttcaacatgccgtccgcgtgaatccccgcacgcgtcacattaaaattcttacctacgaaaggcgttcttgaaggtacagtatatccgatttctttctcataatattctgcaagctccgtgatcacagttgtatccataccatccaaagttccgcgaagctgcgcatactcaaataccattgcctcaaggggagtatttccggttctttccccgataccaaacaatgaacagtttacaccgcacgccccgtaaagccacgctgtcgttgaattattcaccgctttataaaaatcattatgtccgtggaattcgatcagttcacttggaacaccggcatgagtcattaagccatatatgattcccggaatcgatcttggaattacagctcccggaaaattcactccgtatcccatcgtatcacaaacacggatttttaccggtattttatattcatccatcaatttcattaattccatacaaaacggaatcacaaatccgtaaatatccgatctcgtaatatcttccagatgacatcgcggacgaactcccgtctccatacactcacgaactacagtaagataatgttcaagggcctcttttctcgtcattttcaacttataaaaaatatgataatccgaacagcttacaagaatccccgtctcttttaatccgatctccttcacaagctcaaaatcttttttgcttgctctgatccaactcgtaatctccggaaattcataccctttttccaggcagcgatagacagcatctctgtcttttttactgtataaaaagaattcgctctgccgtacttttcctttcgggccgccgagtctgtgcaaatattcataaatcgaaacaatctgttcagtcgtatatggagctctcgactgctgaccatctctgaatgttgtgtctgtgatccatatttcatccggcatattatgaggtacaatcctgtcattaaatgcaatcttcggaatctcatcataatgaaacaaattacgaaatacattcggtgtatccacatcaacaaggggatacatatgttcttctaattcaagcaagttcgtatgcttattcaaaaatacttttctgttttccatcaaatttcctcctatgattgcatctttttatatgtatacacgtatatatgtatgctatacatactcttgcacctcgtgctcagatatatgtattcttgtataattgtatacaaatatacaaaatatgtcaatccttcattaaagtattttattatacaaaagtaacaattctgcctgcgctattcacgaacccttactgtatagccggactgttacatacaaaaagagagcgcaaacagttctgtcattcacactctctttctcaacgatatctaatttattttactctcttcacagtaagagttcacttatctgatcactcttactttcaacacgccttctaccgctgctaactgcgcttccacatcttctgaaactgttccatccacatcaagcatcgtatatgcgtattctttacggcttttatttgtcataacttcaatattcatattcttttcagccaaaagagcggtgaactgtccgatcatattcggaatatttttatgaaggattgtaattctctctccttctcctttcgctcccatatcgcaatccgggaagtttacagaatgtgtgatatttccattctcgagaaaatctttcacctctgccgcagccattttagcacagttatcttccgactcctctgtagatgcaccaagatgcggaatcacgatcgcgcctctgacaccgactatctcttttgtcgggaagtccgttacgtagcagcgcactttctccgatacaagcgcgtctacgatgtcttcctgattcacaagaacatctctggcaaaattcaaaataacaacgccttttttcataagactgatagcgtctttgttgatcataccttttgtatcttccaatgcaggcacatgaactgtaatataatcacactctttataaatttcatctgctgttttcgcgtgatgaatattgcgcgacaatctccatgccgaatcaacagaaacatatggatcatatccataaacttccattccaagatgaacggctgcatttgccacaagaacacctatcgcgccaagacctataacgccaagttttttcccttcaagttctgttcctgcgaatacttttttctttttctctgtgatctttgcaatatcgccatcctcttcgtattcctgaacccagttgattcctccgataatatctcttgctgccaaaagcattcccgcaatcacaagttcttttacgccgtttgcgtttgctcccggcgtattgaatacaacaaccccttcttcggcacagcgttcaagcggtatattattcacacctgcgcccgcacgggcgatcactttcaagtttttatcaaactccatctcgtgcatctttgcgcttcgcacaagaatagcgtctgctccttttgcagtctccacattcacataattttcatccagctgatcaagtcctactgccgaaattggatttaagcaatgatatttatacatgattatgcattctcctcttcaaattttttcataaattccaccagagccacaacgccttcatacggcatcgcattgtaaatacttgcgcgcattccgccgactgatctgtgtccttttaagttctcaagtcctgcttctttcgcttcttttacaaatttagcatcaagatctgcatctcctgttacaaacggaacattcataagggaacgatcttttttgacaactgttcctttaaacattttactctgatcaaggaaatcataaagcactttcgcctttttctcatttttctctttgatcgcagcaagtcccccctgtgctttcagccatttaaacacttttccgcaaatataaattccatatgccggaggtgtattataaagcgattttgcatcagcatgtgtcttatatgtaagcattgtcggcgttccttcaagcacatcttctgtaatgagatcttcacggataatcgcaattacaacacctgcaggtcctatatttttctgaactccgccatagatcattccatatttttctacatcaaccggctctgaaaggaaacaggacgacacatcagcgatcaatgtttttccctttgtgttcggaagttctttaaacttcgttccgtaaatcgtattgttttcacaaatgtatacataatccgcatcttccgaaacaggcaggtcggaacaatccggaatatatgagaaagtctgatcttccgaagacgcaatccgatttaccttcccgtatttttctgcctctttcgccgcttttttcgcccactgtcctgtaataatataatcagccactctgttcttcataaaattcatcgggatcatagcaaattgctgagacgctcctccctgcatgaacaacaccttataattatccggtatattcatcagatctctcaaatcctgttctgccgaattaatgatctcctcaaacgctttcgacctgtggctcatctccataactgacattcctgttccgttgtaatcaagcatttctgcggcagcctctttcaatacctcttccggcagcacggccggtcctgctgaaaagttatatactctgctcattttccttcctcctgtttttatttttaatttatttgtttttataattacacatatgcccatgcagacttttacatgtcatcttcgtcaaacgcttcactgattgcggccccgggcgctaccataggccacactttatcatcactgtctatctggcagtcaatcacaaccggacgattcaatgtcagcgctttagagaacgcctccttaaattcttcctgcgacacagcccgcattccttctgctcccatagcttctgcaagtttcacaaaatcaactgcatctctgagcacggtagccgaatacctctcatcataaaagagatcctgccattgacgaaccatcccaagcacatgattattcactacaacttgtataatcggaatattgtgccggactgcagtcgcaatctcattcatattcattcggaaacatccgtctcccgcaatatttactacgattttatccggacatcctgtctttgcgccaagcgccgctccaagaccatatcccatcgttccaagtccgcctgacgtaagaagggttctcggttttgtatatttataatactgtgcagcccacatctgatgctgtcccacttccgtaacaatgagcgcttcaccgtttgtctgacgatagatctcttctacaagaaacggtcccgataatacattcggatgatatttcagaggatatttttctttatacccttgtattttttcaagccattctgcatgattctgctgttttaaacgcttattaagcgtctttaaaacatcttttagatcgccgatgatttcttccgtaatcaaaacgtttttattaatttcaaccggatcgatatctaactgtataatttttgcattttttgcaaatttttctgtattccccgtcacacgatcactgaaccttgcccccataacaaccaagaggtcacattcacttactccgaaattggacgctttcgttccatgcatgccaagcatacctgtataccgcggatctgttcccggaaaagcgcctttgcccataagagaatccgtaaccggagcatccagcttgtcaacaaactcttttaattcttgactcgcccctgaaagaaccgctccgcctccgacgaaaacaaacggtttttctgcttcttccaacatagaaatcacccggtcaaaccgttgttcatccatcctcggagtttttctcgaggaatcttcctttgtgcattttcccaattcttccggaatatattccgttactttagccgtaatatctttcggtatatcgacaagcaccggcccgggacgtcctgtctttgcaatccgaaatgccttacggatagtatccgccaattttgtcacatcttttacaataaaactatatttcgtaatcggcattgtaattcccgctatatctatttcctgaaaactgtcttttccaagaagtgatacccctacattgcaggtgattgccacaataggaattgaatccatatatgccgttgcaattccggtaacaagattcgtcgcccccggtccgctcgtagcaaggcagacgccgacttttcccgttgctctcgcatatccgtcagccgcatgagaagccccttgttcatgggaggtaaggatgtgcctgatttcatcccgatgtttgtacaattcatcatatacattgagaatcgcaccgcccggatagccgaaaaccgtgtctactccttgttctttcaaacattctattacaatttctgctccatttaactgcatgccataactcctttaaacatcctgtatctcttatccgcacagcctgtaaccgcgctcttatttttctttcggtatttccagaatcgcacctctgtttccggatgtgaccatagacgcatatcttgccagatatccggtctttactttcggttctctcggctgccatttttctcttctcttcttcagttcttcttctgaaactgccagattcaaagataaattcggaatatcaatctgtataatgtctccctcttctacaagagcgatcggtcctcccaccgccgcttccggagaaacatgaccgatagatgcgcctcttgacgcgccgctgaaacgtccgtctgtaataagcgctacttccgagccgagtccgtatcctgcaatcgccgaagtcggattgagcatctcccgcattcccggaccgcctttcggtccttcataacggatcacgatcacatcccccggattgatctttcctgttttgattgcttccgttgcctcttcatcactttcaaaaatacgggcaggaccttcatgtacaagcatctcatcgcagacagcagatcgttttacaacgcttccgtcaggtgcaagatttccttttaacacagccaatccacctgtttcactgtatggatgatcgatcggacgaattacatcgggatttttattttcgcatcccgcaatgttctccccaactgtcttgccggttactgtcagacaatctgtatgaagaagtccttttttattcagctcattcataaccgcatagactccgcctgcctcattaaggtcttcgatatatgtatggcctgccggagcaagatgacaaaggttcggcgtcttctcactgattccgttcgcaaaatcaatctcaaaatccattcctatctcatgtgcgattgccggaagatgaagcatactgtttgtcgaacatccaagagccatatcgactgtaagagcgttcaaaatcgcatcttccgtcataatatctctaggtcggatattgtttctcacaagctccataatctgcattcccgcatgttttgcaagctgaagtctcgcagaatataccgcgggaatcgttccgtttccacgaagtcccattcccaatgcttctgtcagacaattcatgctattggctgtatacattccggaacacgaaccgcacgtcggacatgctttattttcaaattcataaatttcttcatcgttcattttgcctgccgcataagatccgaccgcttcaaacatgcttgacaaacttgtcttttgcccttttacatgtcctgcaagcatcggtcctccgctcacaaagatcgtaggtatattgacacgcgcagcagccataagaagtcccggcacatttttatcacagttcggaatcataacaagaccgtcaaactgatgtgccattgcaagcgcctctgttgaatctgcgataagatctctcgtaacaagagaatatttcatgccgatatgtcccatcgcaataccgtcgcaaacagcaatagccggaaccataatcggtgttcctcctgccattgcaactcccatttttaccgcttctgtaattttatcaagattcatatgcccgggaacaatctcattataagagcttacaactccgatcagcggtctgtctaactcctcctgcgtcattccaagcgcattaaataaagaacggtgcggcgcctgctgcaccccttttttcactgtatcgcttctcattatcctatgcctctctttcacgttttatatataagaacagattcgttctcccatctcttttgttccgatctgcgtcattccttctgacataatatcaatcgtccggtatccttcctcgagtactttctctaccgccgcctcaatcgcatctgcttcttgatcgagatcaaacgaatatctaagcatcatcgccgccgataaaattgtagcaatcggatttgcgattccttttcccgcaatgtcgggagccgaacctccgctcggttcgtaaaggccgaactttgtatcgtttaaacttgcgcttgcaagcattccgattgagccggtcaccatactcgcctcatcagataaaatgtcaccaaacatattttccgttaatattacatcaaattgtgccggatccttcacaagctgcatagccgcattatccactaacatatgttcaagcgttacttccggatattctttcgcaacttcttcaacaatttttctccataatcttgaagaatccaatacattcgccttatcaacgcttgtcacttttttccgacgtttcatcgcaatgtcaaatccgcgcttcgcaattcgccttatctccgtttcactatatgtaagctcatctcttgcaacgagaactccgtcttcttcttccgtacttctttttccgaaatagagtccgcctgtcagctcccgcatgatcatcatatcaaaaccttgttctgcaatctcctctttgagcgggcaggctccttttaattcactgtaaagaactgccgggcgcagatttgcaaaaaggtttaacccctttctaagctgtaaaagccccgcctccggacgtttagacggttccagacgataccatggcgatgtctttgcatctcctcctatcgatcccatcaatacggcatcactttttttcgcctgttccaatgtttcttccgtaagaggcactccgtttacatcaatggatgctcctcccatcaaaagctgagtatattctatctgatgcccgtaaacttctgccgttttatcgagcactttcatcgcctcatctacaatctccggaccgattccgtcgcctttgatcacaccgatgttcatatccataatttcccgtccctccaaactaaaatgttactgtttataatacagcatttttatacacgtttcaagtatttgcgtctaaaaattagagtgtactctgtgattttttcaaattcacgcgctaaagtgatgaatttgaaaaaatcagggagaattttgaaaatatttcaaaattctccctgatctcataatgcaaaataattgacttaaaatcaatctgcattcggtttttcaatctgagcaatcgcagctttctgcatcggaatacgacagtttttattatttccgaactctacaatcacatcttcatctgtaatatcaatgatgactccgtaaaaaccgcttgtcgtcagagctgtgtctccgacctccatagaagccagcatctgctggatacgtttctgttcttttttctgtggacgcataagcaaaaaccacattacaccgataactacaagccaaagaacaagcattgttaccatttcacccatgattataatttcctcctaactttcctaacgcaataagactactatacacaactttcttccatacttcaaggatatttttcaaaatactgaagtaacttgaaataaacataattttgagaagcttatccggttattgcatcataccttccagttttctctttttataagccttatactctcccgcttcaatcgcttctctgatttcttccatcatcgtattataaaaatacaggttatgaagaacgcaaagacgcatcccgagcatttcttttgcttttaacaggtgacggatatatgctctgctataacttctgcatgccggacatccgcatccttcttcgattggacggtcatctaactcatactttgcattgaataagttcatttttccatgatttgtataaacatgcccgtgccgcccgtttctgctcgggtatacgcagtcaaaaaagtccactcctctgtctaccgcctccaaaatattcgccggagttcccactcccatcaaataggtcggcttattttcaggaagatgaggaacaaccgcctccagaatacggtacatatcttcatgactctctcctactgcaagaccgcctaccgcataaccgtccaaatcaagctccgcgatctgtcgtgcgtgctccacgcggatatcttcatagattccgccttgattaataccaaaaagcatctggttatgattaatcgtatcttccaaagaattcagcctgttcatttccgctttacatcgtttcagccatcttgtcgttctcgccaccgaatggaccatatactctctgtccgctacgcttgagggacattcgtcaaacgccatcgcgatcgtagacgcaagattagactgaatctgcatactttcttccggacccataaagattttacgtccgtctatatgagagtgaaaatgaactccttcttctttaatcttgcgcaatgatgcaagtgaaaacacttgaaatccgcctgagtccgtgagaatcggcttatcccaattcataaagcgatgcagaccgcccatttttttcacgatttcatcccccggtctgacatgaaggtgatatgtatttgacagttcaacctgcgttttaatctgacggagatcatctgttgatacggctcccttaattgccgccgccgttcctacgttcataaaaaccggcgtctcgatcgttccgtgtaccgtatggaacctccctctttttgccataccgtctttttttagcaattcgtacatgtatataacctctgattttctgtttttcaataaattctaagtcttatcatttacattaataatgaagaacaaccggcgttcccgcgctaagcatattaaataaagctcccgcctgatctaccggcatattaacacagccgtgagaaccatatgactgatatctcgaaccgccgaatgctgtctgccagtctgcatcatgaaagccatgtccttgataagtaaacggcatccagtagcggacatacgtttcgtaaatcggtttccctgtttccggatctttttcaccgattaattttgaatccggttctgtataaagaatcgaatatacacctgccggagtcgcatgcttcgcatcgggaaggcctgtaacaacatctgtctccagtgcgatcgccccgtttacaatataccacatatgctgtgcggaaaggtccacctcaaggtacgtcgttccccagtcttgtgccgcatgagatgccgctgtcttttcatatgcaggttctcttgtcacaacttctccgtttttaatacttgcgatcaaattctgcgtttctgcctcttcgtcgatcgaccagccgtaagtacctcctgatacttccactgtctttcctgtcggagaagtgatcgttctcgttgttccgactgtatcataagtttttccgaaatctctcatccatgcccggacagcttcttcattgaatgttacattcatatcagcatccgccgaaacccatgtcgaaataagagctttgtctacaactacattttctttcatcggataggtaatacttgcctgacaatatttattcatatcgtcacacgctttttgaacttcttttgattccgttgtatatttaggtactttatagcatttttcattcagaagatttaattccggttcaaaattggtaatatactctttgatctttttagtcaaaatttccatatctaccgcacttccatacacttccggctctactttgaatgattcaccgtcaaatttaggatatgcagataccggttccgtctgctctgctttcactgcctgaatcgacccgattgctttactcagtgcatcctcattataatcaacgttgatcgtcacttctgcgctggattttgaaaaaagcgctcgtatccacagaagaggattctgatttttcaatgcgtcttttacactatcatcttttttatacgtcattgaaattgcctctccattaatctcgtccgtcttattatcagcttctataatcttcaaagaatacccttccacttggtctttcatatatgctacgacatccgattctgttttccccgaaaagtcttttccgttaattgttgtattaatatagaaatgactgataaaaaacgccgaaataccaaggtatatcacgagcagtccgcctatgatgcttcctccaatgatccacgcttttttactccgctttcctttattttctttcatctttttctgccgacgtctttttccccttcttcggagcactttcttttttttcttttctccctcttcatcttcatcttcatacagctcatcgtcatcaatatcatcatcgtcaaagctgtcgtccgcgctgaagttgtcactctccgaaaaatcttcctcatcttcaaattcttcaaacacttcttcatctaaaagccgtacgtcttcttgccggcgtaaggatttatttttcttttcactcatccgttaatcatctctctccctttttcaatatcacggcaacattatattacgattgtaaaaaaaagtacagtatattgttttattttaagaaaaattaagaccttgcttgtaactgctcctttcttcctatataatgacttttgtaattctgcttttcgacagaactttacatataacagaataggtaattgcgaaacaagtccgcaa

SEQ ID NO: 7646 - DNA, 53924 bp, Unknown
  gut microbiota DNA sequence
gtaacacatgtattgtaatcctacagtgaagcggaacaatatgtgaaaaaagtgcttgacaatttggatgagtagtgatattttataaaagtaattgactgccgaagacagcaggtgccgttaggcataaggttgagaacgcctgccgaggaagatacgaattctttttaaaaagaacatttgtaaacctctgtgtcttctgtcgcagaggttttttgtataggcgacgagccaaagttcggggttgcccgggatgttggtaatcgcctgcaatcccgggatgtgcctttcggcgcttccgatgattgaaggtctcaggacgcagtcatttaaaatctataaggaggtgcacctggacgtggcaaaagttgaattaaaacaaccgatcgtagcagctatcgcagaagacatcaaagatgctcagtctgtagttatcgttgactaccgtggacttacagtagcacaggatacagagcttcgtaaaaagctcagagaagccggcgttacttacaaagtatgtaagaacacaatgatgaagagagcatttgaaggaacagagttcgcgggtctggatgagtatttagaaggaccgagcgcactttgcgtatctaaggaagatgcgacagctccggccagaattcttgcagagtttgctaagacagcagacaaacttgagatgaaagccggtgtaattgaaggaactgtatatgatgtagccggattgaatgaactggctaagattccgtcaagagaggtacttctctccaaattgctcggaagcttgcagtcaccgattacaaactttgctcgtgttattaaacagatcgctgagaaagacggcgaggcagcaacagaggctccggccgaagaagcggcagcagaggagtaaaatacagatgtgccggatatgcggcgcaatgtaaaaaggaacaaaatctgaaccggagatcagaagaagagtccggcagagtaaatttaaaaatggaggatatcaaaaatggctaaaatgacaacagctgaaatgatcgaagcgatcaaagagttatcagtattagagttaaatgaattagtaaaagcatgtgaagaagagtttggtgtatctgcagcagcaggcgttgtagttgcagcagcagcagacggtggcgcagcagcagaagaaaaagatgagtttgacgtagaactcgtatctgcaggagcttccaaagttaaagttatcaaagcagttcgcgagatcacaggtcttggactgaaagaagcaaaagagcttgttgacaacgctccgaagacactcaaagagggtgtttccaaagcagaggctgaggagatcaaagctaaacttgaggcagaaggtgcagaagttagcatgaaataatcggagtttccgataactttatgaacgtctttaagtaagacggtcttaagaaaatcaaccgcagaagataaaatgcttctgcggttcttttgtctttgttgtgcgtttacgttaaacatcgccgtttgtcgaaaagtgacgcataatatcatatatgaagaaaaatgtcaagaaaaaaatgggaaatgttattgacaacgaaaagagctttgtgttatagttaaaaatgcactattatggaaaggtatgccgtattagaagcgttattactattacaaggctcttttcatttacgcgaagcaacgtgccaaaatctctgtttatacggtgttttggcgactgccacgataacgggaataattgagatgcaagagaagtcccgtttgtaaagattcaggtcattcgatgttgtccgacaaaggagatgcggacaacgaaagaggaatgattgaaaaaatgatagaggagtgaaacgtcaatggagaaaaacagaatccgtcccattaaaaccggaaaaagtttccgcatgagttactcacggcagaaagaagtattggagatgcctaacctcattgaagttcaaaaagattcctatcaatggtttcttgacgaaggactcaaagaggtgttcgacgatatttccccgatcgctgattacagcggacacttaagtctggaattcgtagatttcacactttgcgaggacgatgtgaaatatacgatcgatgagtgtaaagagcgcgatgcgacttatgctgctcccttaaaagtgagagtccgtctccacaataaagagactgatgagattaacgagcatgagatttttatgggagatcttccgctgatgacaaagacgggtacatttgttatcaacggtgcagagcgtgttatcgtcagtcagctcgtgcgttctccgggaatttattatggcattgctcatgataaactcggaaagaaactgtactcatctacagtgatcccaaaccgaggcgcatggcttgaatatgagacagactccaacgacgttttttatgtgcgcgtcgatcgtacaagaaaagttccgatcacagtgctgatccgtgcacttggtatcggaacgaatgcagagattgttgatcttttcggtgaagagccgaagatccttgcaagctttacaaaggacactgcggagagttatcaggaaggtcttttggaactgtacaagaagatccgcccgggcgagccgcttgcagtagacagcgcggaaagtctgatcaacagcatgttctttgatccgagaagatatgatctcgcaaaggttggacgttataaattcaataagaaactgatgctgaaaaaccgtattgcaggctgcatacttgcagaggatgcggtgagtcagcttacgggagagatagttgctgaaaaaggtacgaagattactcgtgaacttgcagataagatccagaacaatgccgttccttatctgtgggtagaaggtgaagatgaagagagaaacatcaagatcctttctaatatgatggtagattttcaggctgttacagatatcgatcctgaagaagtaggtgttacggagcaggtatattatccggttttggcgggaattatcgaagagtccgcaggagacatcgaagagatgaaagcgttgatcaaacgtgacattcacgatttgatcccgaagcatattacaaaagaggacatcctcgcgtccatcaactataatatgcatcttgaatatggcatgggaacggatgatgacattgaccatttgggtaaccgccgtatccgcgcagtaggagaattgctccagaatcagtacagaatcggtctttcaagattagaaagagttgtccgtgagcgtatgacgacacaggatcaggaaggaatttccccgcagtcactgatcaatatcaaaccggtgacggcagcggtgaaagagttcttcggttcttctcagttgtctcagtttatggatcagaacaacccgcttggagagttgacacataagagacgtctttccgcacttggaccgggaggtctttccagagatcgcgccggattcgaggttcgagacgtacattattcacactatggaagaatgtgtccgatcgagacgcctgaaggtccgaacatcggtctgatcaactctttggcaacatatgcgcgaattaatcagtatggatttgttgaagcgccatatcgttggattgataagtctgatccggaaaatccggtcgttacagaaaaagttgtttatatgacagctgacgaagaagacaattatcatgtggcacaggcgaatacaccgcttgatgaagaaggccactttattcataaaaatgtatccggtcgttacagagaggaaacacaggaatacgagagaagcaagttcgattacatggatgtttctccgaagatggtattctcagtcgctacggctctgattccgttccttgaaaacgacgatgccaaccgtgctcttatgggatcgaacatgcagcgtcaggcagttccgcttctgacgacagaggctccggtagtcggtacgggtatggaagtaaaagctgccgttgactcgggagtatgtgttgtcgcagaacgggcgggaacagtagaaagctctacgtcaaaagagatcgttgtccgcgaagaagacggcaagaagacatcttataagctgacaaaattccagcgaagcaaccagagtaactgttacaatcagcgtccgatcgttaataaaggcgacgttgttgcggcaggacaggttattgcagatggaccgtctacatcaggcggagagatggctcttggtaagaacccgctcatcggttttatgacatgggaaggttataactacgaggatgctgttcttctgagtgagagacttgtacaggatgatgtttatacttctgttcatatcgaagaatatgaggcagaggcaagagatacaaaactcggacctgaagagatcacgagagatattccgggcgtcggcgatgatgcgttgaaagaccttgatgagagaggaatcatccgtatcggtgcggaagtgcgcgccggagatattctcgtcggaaaagtaactccgaaaggagagacagagcttacggctgaggagagacttctccgtgcgattttcggagagaaagcccgtgaagtaagagatacatccttgaaagtgccgcacggtgagtatggtatcgttgtagatgcgaaagtatttacaagagaaaacggcgacgagctttcacccggggtaaatcaggcggtcagaatttacatcgcgcagaagagaaagatatctgtaggagataagatggccggacgtcacggtaacaagggtgtcgtttcccgtgtgcttccggtagaggatatgccgtttcttccgaacgggcgcccgctggatattgttttgaatccgcttggtgtgccgtctcgtatgaatatcggacaggtgcttgagatccacttgagtcttgcggcgaaagctcttggatttaacatttctacgcctgtctttgacggagcaaacgagatcgacattatggatactcttgatctggcaaatgattatgtcaatcttgagtgggaagagtttgagaaaaaacatggacaggagcttcttccggaagtattgcagtacctgtctgacaatagagaacacagaaacctttggaaaggcgttccgctctcaagagacggtaaagtgcgtttgagagacggacgtacaggtgagtatttcgacagtccggtaacaatcggacacatgcactacctgaaacttcaccatcttgtagatgataagatccatgcgcgttctacaggtccttactccctcgttacgcagcagccgctcggtggtaaagcacagttcggcggacagcgtttcggagagatggaagtttgggcgctggaggcgtacggcgcatcttatacactgcaggagatcctgacagtgaagtccgacgacgttgtaggtcgtgtgaagacttacgaggcgatcatcaaaggagaaaatataccggaaccgggtattccggagtcatttaaggtgcttttaaaagagcttcagtctcttgcgttggatgtgcgtgtcctgcgtgatgacaatacagaagtagagattatggagaacgtagattacggcgagacagatctgcgtcacattatcgaaggagacagaaagtaccgtgatgagaatgaatctttcggtgatcacggatttagtgagaaggagtttgtaggcgaggaactcgaggatgttgaacctgaggaagagccggatgatgatgccccggtggacattgagtttgacgagtattccgattatgaggaagaataagaggaggatccaaatatatgccaaacaataatgaacaacaatatcaaccgttaacatttgacgcgatcaagatcggtctggcttcaccggaaaagatcatggaatggtcaagaggtgaggttacaaagccggagacgatcaactacagaacattaaaaccggaaaaagacggactgttctgtgagagaatcttcggaccgagcaaagactgggagtgtcattgtggaaaatataaaaagatccgttacaaaggtgttgtttgtgaccgatgcggcgtcgaggttacaaaggcaagtgtgcgtcgtgagcgtatggggcatatcgcccttgccgctccggtgtctcatatctggtatttcaagggaattccgagccgtatgggattgatccttgatatctctccgagaacattggaaagagtgctttactttgcttcatacattgttctcgacaaaggagagacggatcttcagtataaacagattctctctgagacagagtatcaggaacagaaagagaagtggggcagcggctcattccgcgtaggcatgggagccgaggcaatcaaagaacttctggaaagcatcgatcttgaaaaagaatatgcagaacttcaggcagggttggaaaatgcgacaggtcaaaagagagcgagaatcgtgaaacgccttgaagttgttgaggcgttccgtgagtcgggcaaccgtccggaatggatgatcctttctgcaattccggttattccgccggatcttcgtcctatggtacagcttgacggaggccgttttgcgacaagtgatttgaatgatctgtacagaagaatcattaacagaaacaatcgtctgaaaagactgcttgagcttggagcgccggacattatcgtaagaaacgaaaaacgtatgcttcaagaagcggtagacgctttgatcgacaacggacgccgtggacgtccggttacaggcccgggaaacagagcgctgaaatcactttcagatatgctgaaaggtaaatccggacgtttccgtcagaacctgcttggaaaacgtgtcgactattcgggacgttccgttatcgtcgtaggaccggaacttaagatttatcagtgcggtcttccgaaagagatggcaatcgaactgtttaaaccgtttgttatgaaagaacttgtggcaaacggaacagcacataatataaaaaatgcaaagaaaatggtagagagacttcagccggaagtttgggatgttcttgaggaagtgatcaaggaacatccggttatgcttaaccgcgcccccacgcttcacagactcggtatccaggcatttgagccgattcttgtagaaggtaaggcaatcaagctccatccgctcgtttgtacagcgtacaatgccgacttcgacggtgaccagatggcggtacacgttccgctgtcacaggaagctcaggcagagtgccgtttcttgcttctttcaccgaacaacctgctgaaaccgtccgacggaggaccggtggcggttccttcacaggatatggttctcggtatttattatctgacgcaggaaagaccgggagtaaagggcgaaggaatgttctttaagagcatgagcgaagcaattcttgcatatgagaacggatatattacgctccactcgcgaatcaaagttcgtgtaactagaatgatgccggacggaactgagaagacaggaacgatcgatgcgacactcggacgtcttttgtttaatgagattattccgcaggatcttggattcgtagatcgagaggtagaaggaaacgagctgcttctcgaggttgatttccatgtcggaaagaaacagttgaaacagattcttgaaaaagtaatcaatactcacggagcaacacaaacagcggaagtgcttgacaatgtaaaggcaatcggatacaaattctctacaagagcggctatgactgtatcaatttcagatatgacggtgccgccgcagaaacctcagatgatcgaggaagcacagaataccgtagataaaatcacaaagaattacaaacgtggtcttataacagaagaagagcgttataaagaagttgtcgaaacttggaaagcaaccgatgataagctgacagaggctctgctgacaggtcttgataaatataataacatctttatgatggctgactccggagcccgtggatctgataagcagatcaagcagcttgcaggtatgcgtggacttatggcagatacgacaggacgtacgatcgagttgcctatcaaatcaaacttccgtgaaggtcttgacgtacttgaatatttcatgtctgctcatggtgctcgtaaaggtctgtcagatacggctcttcgtacagccgattcaggttacctgacgagacgtcttgtagacgtatctcaggaattgattatccatgattctgattgtgcagaagaaggaaaagagattccgggaatgtatgtatctgcatttatggatggaaatgaagagattgagagccttcaggagcgtattacaggacgctattcctgtgaggacatcaaagataaagacggaaatgtactcgtaaaagcaaaccacatgatcacaccgcgccgcgcggaacgcgttatgaaaaaaggcgtggatgagaacggcgagtcactgaagaaagtgaagatccgtacgatccttacatgtaaatgtaagaacggcgtatgtgcaaaatgttacggagcaaacatggcgacaggagaagcggttcaggtcggagaagcagttggtattgtggctgcccagtcgatcggtgagccgggaacacagcttacaatgcgtacgttccatacaggaggagttgccggtgacgatatcacacagggtcttccgcgtgtcgaggagcttttcgaggcgagaaagccgaaaggtcttgcgatcatcacggaatttgccggacgcgcaatgatttccgacacgaagaagaaacgtgagatcatcgttacaaatgatgagacaggcgaatcaaaggcgtatttgatcccgtacggttctcgtattaaaatacaggacggcgtgatgcttgaagccggagacgaactgacggaaggtagtgtaaatccgcatgatattctgaagatcaaaggtcttagagccgttcaggattatatgcttcaggaagtgcagagagtataccgtctgcagggtgttgagatcaacgataagcatatcgaggttatcgttcgccagatgttgaagaaagtccgcatcgaagagaagggtgatacagaattccttccgggaacaatggttgacgttcttgaattcaatgaagtaaacgagcgtcttgaagaagaaggaaaagagccggctataggcgagcagatcatgcttggtattacgaaagcttcacttgctacagattccttcctttcagccgcatctttccaggaaacaacgaaagttcttaccgaagcggcaatcaaaggaaaagtcgatcatcttgtcggtctgaaagaaaacgtaattatcggtaaacatattccggcgggtacgggtatgaaaaaatatcgtgacgtagcgttaaatacagatgccagagcagaagcgatgctggcagaggaacttgaaactgaagagagcgcagaaggagagaatgcagaagtggaaaacgctgaggcagtaagcgcagatgcagtaaatgaaagtttggaaaacgaagagacagcgttgacggatgaagtgatggatacagaagaagcagatgatgaagattttgtcacagaagaataaaagatcattgttctgctaagcaagaaagtgcaagaataataaacaagaaagacaaagaataagataaaataaaaactccgtatacagattcgggataaaacccggtgacgtatacggagttttttgttcagctctgtaaaaaacatgcataagataagaaaatcattgattttatttaatcataaagagaagctccgaatcgaatttttcgataaatcttcagaaaaattatgacaggaaggctgatcagaatgtagagtgtagaaaaaactccgacagagcctccgattagcataagtaaaattaaaccgatattcattgtaggtcactccttaaaataaattttgcggttttacacaaaaaaataattttctgtgcaaaacaaatgaaataaaaacaaatcagtctctattttaaaggagcaaagtgtaaaatggaataaagcggcaaaaaccttagcgggtttttaacatttactcatcttcatcttcagccatacgatagccgactccgacttcagtaaaaatgtattgaggctgtgcgggatcttcttcgatttttcggcggatattggccatgttgacacgaagaatcttattgtcattatcagcgtaaggtccccatacatttgaaagaatcgatgcatatgtaatgacttttccggaattttgcgccagatatgccacaatcttatattcgatcggagtcagatggacagcattgccgcgaatcgtgagcagccgtttggaaaagtcaagtattaaatccttatgtcggtaaggacggatatagaaggtgctgtcagtgagcagacgattgctgtgtctgagggaagcgcggatccgtgcaagaagctcggaagttccgaatggttttgtaatataatcatcagcgcccagatcaagagccgcaaccttttcccgttcggcagtgcgggcggaaataacgatgatcggagtacttgcccatgtacggacgtcccggataatagaacagccgtccatgtccggaagtcccagatcaagaaggataagatccgggcatcgggaacggatcatttccagtccttgcttaccggtatcggcataaagaacctgatagtcatgacgttttaaaacctttcccatgaaagtttgtatatttttttcatcttcaatgattaagactgaaaatttaggcatttgcttcaacctccttttcttttggaagtgtaaaaataaattcggcgccgtgtttgtgattgacagcggttaatttccctccatgagcttctatgatcgtcttacagattgacagaccgattccgattcctttatggtggtctgaattttttccggaactgcgctgaccttcaaatatataaggaagctgttcgggatcgattccctttccgtagtcacggacagaaaaagaaacacactcttttgtctgtgtaatgatcagatcgatctcttccgtactttcagaatgaacggaagcattttccagaagattaatgagaacctgttcgattaatgtggcgtccatgggaatcataagaaaatcattcggcatatggactttgatacggacgtccgaaagccgttttctgagccgttgtatagcctctgaaacgacttcttcgacgacttccggagacttcttcactttgtcttgagagttgttgtctatgcgcgtgatcgtaagaagattctcgaccatattcagcagccattcagaatcctctttaatatttgatacaagttcggttcgttcatattcggtcatatctgatccgttttccaaataagaagaggaagagccgataatacttgtgagtggtgttcgcagatcatgtgatacggcacgtaaaagatttgcacgcagtttttctttatcagcttctgccagcgctttttctcgttccgcagcggctttttgatgttgttttaaagaagttgttgttgcgcttgtgattagtgtgatcgcgagcatcccgataaacgtgacaggatatccgtccaatgaaaaattaaatttaaaaaatggataagaaaaaaggaaattaacggcgatgacgcagaataaagaggcgacaatgccgtatacatatccggacgtcttaagagcggtcaaaatgagcgcaagcgtatagatcacagtgatgtttgctgaatttttatttcctaagtgaaagaaacaaaaagagacagcagtcgcagtgaagagcatgaaagctgtaaatagtgtgtcagaaatcgttttttttcgttctgttttgttgttttgtctgttcatagtaatttattcgcttaaagtatgaaaaaagcatggagagcggtcttagaccggctctccgtttttgtatttctgaagaacatgctggattctttcgttcggacttaaaatagaactaagagatccgtcatgattcaatgtatcgatgataagagcaatatatttgctcatatcacagttgatgtaatatggtttagacaaaagctccggtgtctggtagatcaggtttgtcgtaaggataccgtgaataataccgtcttcatatgctttgtcgaatttctccataccgtttgtaaacagaccgaatgtagccgcagcgaaaatccggtttgctttacgctgtttcagttccgtagcgacatctatgatgctgtcgcctgaagaaatcatatcgtcgatgatgatgacatcttttccctctacggaagagccaaggaattcatgagcaacgatcggattacgtccgtctacaatctttgtgtaatcgcggcgtttatagaacatacccatgtcaaggccaagtacgttggcaagatatacggcacggtttgttccgccctcgtcaggactgatcgccatcatatgatctgcgtcgatctgtaagtctttgacattgcgcagaagcccttttataaactgatatgtcggagaaactgtttcaaatccgctcagcgggatcgcattttgtacacgtgggtcatgagcgtcaaaagtaatgatgttttcaactcccatgcgtacaagttcctgcaaagcaagagcgcagtcgagtgattcacgggaacttcttttgtgctgacggctctcatataaaaacggcatgataacattgatacgtcgtccttttccgccaatggcagcgataattctctttaagttctggaaatgatcgtcaggagacatgtgatttgtctttcccgcaagagagtaagtaatgctgtaattacatacatctaccataagatacagatcttttccgcgaacggattctccgagaactccttttgcttctcctgagccaaagcgcggaacgcgggcatcaagaagataagaatctttttcatatcccgaaaatgcaatatcgtcgcgaaaagcatttccgctttcgtgtctccattttacaagatagtcatctactttctttcccagttcttcacatcccgtgagggaaataagaccaagacttcctaccggaatattttccaaaattcgttctgttcggcgtaacattaatgtacctccctattttttaattttttcttgattcgtatatcatcaccgattatctttaacaatgcatagctgcttgtgattctcgagaaagagcgctcggtataaagattggcaagcgattcaagagaaagatttgttgagatgatcgttgatttcttgtgaatgagacgttcgttgatacatgtaaaaaactgtgcggcaatgaacgcatttgtgtactcgcttccaagatcatcaatgatcagaagatcacagttgaatatatagtcattcatattttttgaatcgacgtcattgcggtcaaattttgtctgcgtaagtacactgaaaagctgcggcgccgagaaatagagaaccgaaaattcacgttccatgatttcgcgggcgatacaggtggaaaggaaagtttttccgactccgacgctcccatagaaaaagagattgttgaattcctttccgaagttatttataaagcgatggcatatatttaatgtctcttccatcatagcgcgggcgttttttcccgttgttttatcatactgggaagccggataaaaatcaaggtcaaaatagtcgaaagatgcttctgtcggaaattctttgatattggactgttcatataaaagctcaataacggagcgtttgaaacagtgacatttttcgtttccgatatatccggtgtccatgcagtcgggacaatcgtagatcggttccagataatctttgggaaatccggcagaagtaagaaggttctttttgttctgccgcaggattgcaagctcttctttgagagaagacaatgctttcggatcgccgtttagcatttttttgccatactgcactgaaaggatggaaatcgattcatccagtgatttgaattccggaagttttttgtaaacttcttcataacgcttcatttgaagatcgtgatttttcaatctggtttgttcgtactcccgcatcagtgcataatattgtgaatttttaagtgccatggagatactccttctacttgccgtctggctcaatgataatcgttttgttaattgcttttcagcagttgttcttcaagtgattccatatcgtaactgcggcgctcaaaattgttcagattctttgttacaggtttttgccgcgcggcagttcttacggcagagttctgtttctgatgagcttcgtcaagcgccgagatctcttttaagtgacggatattgtgttcatgccactttgtcagaatagaatcggcatattcaaagctcggctggtgtgtagaggtaatcgtgcgtctgcacgcctctgcgataatgtcagaggaaaatgcatactgctcagaccattttttgataaattcaagttctgaggcagcaggtcctctgcctttgataccgaacgcattcagtacagtgtagcagcttctggaatagagcatagactgctcttttgcctgagagactgtctcgattccttcttcgacccatgaaaaagcgacctttttgatatagtggatgcttttatgtccgttttctacacaagattcgatcaaatactcaatcagatctgccgacatatgcagtgtatcataaaaataagtaattgtctccatttcagtatgtgttaatgtttttcccaaatattgttctgcaataaagaggagagattttatttctttttgtgcccgaaattcgtcaatagcgacggctttttgaatggatgcatttgaagcggatgctgtctggcgtgaagctgtgtgcagcccttctttattatgtatagagtgaaccggatctgtcagacctgcagataaagaaatatctgactgaggctgagaaggaagattccggtcggacacattttgtatcgtggagcggacagtctgcggcgcaatgcctccggcaggagaatcggtattccgggacgcgggaggagtccatgcacatgcaaaactttgcagttcgagaaatgtgatttttccgtccgccgcatattctgatcggagcagtccttcggattcccaatatctaagcgcccgcaagatgtctttttccgtattgttgagacaatctgcaatcatagaaagtgtcagcgcaggattgtcgtcttcggcatgccgcagaagaaaaagatatacttttataaattcgccgttggcattgaccatgtaattgtcgataaaatcgtttggcagcagcgtcgcgtttgtctgaaatttattttttaatgtcagtgttttcatacttactccatcctgtttcattattcttaagtgttttgtgaaggtcaaagcggcgctgccgcgtttttcccggttcagcccgcgccaatcgcaaacgcgtcctgcggactcaaagcggcgctgccgcggtttgctcatgaaaaagcgctcgccgtatagggagtctcccagttcagccctcgccaatcgcaaacgcgtcctgcagactcaaagcggcgctgccgcggtttgctcatgaaaaggcgctcgccgtatagggagtctcccagttcagcccgcgccaatcgcaaacacgtcctgcggactcaaagcggcgctgccgcggtttgctcatgaaaaggcgctcactccatctcggtacttgttcgcaaagtcatacgagtatgacttatgcttacaagcacggagatgggctgaactggggttaacaaaaagcggacatggaatccgcttttgtcaggtgtttcttatatagtatcattttactgccgggtaaaaaagggcttttttgttggtaacttgctcttttttgtagataactatgtggagaacttaaaaatagcttctacgatgtttattttagcagattttcaccgattgtaacaacgtctccggctcccattgtgatgagcagatcaccgggacggcagttttctttcaggaatgcttcaatctgtgcaaagcttgggaagtagtgcgtatctgttccgagtttttcggtttctttcgccagatctgccgaggagatgccgagagtatctgtttctcttgcagcaaagatatcggcaagtacgaggtggtctgcatgagagagcgcctctgcgaattcatggaagaacgcttttgtccttgtataagtatgaggttggaatacacaccacacactgttgtgcaaagagtgctgcgctgcttttaatgtggcaagaatctctgtcggatggtgtgcataatcatcaataacagttactccgttaaattcccctttatattcaaaacggcggtctgttcctgtaaaagacaacaatcctctcttagtgatatctatagaaagaccaaggatatcagcaacggcaatggcggacagagcgtttgaaacattatggtcgcctgttaccgacaactggatatgatccgcatattcaccgcggcggaacaagtcaaatgcgacatgtccgttttcgtcataagtaatatttttcgcgctgtaatcaaaacatccgtttgttccgtatgtcacgacattgcaggaaagaccttcgtatatctcggcataatctttaatctcggcattgataataagagttccgtcttcaggaagcagttccgcaaactgatgaaatgaatgacgaatatcttccagatctttgaagaaatcgaggtgatcctcttcgatattaaggattacgctgatttttgggaagaaatgaagaaaactgttcgtatattcacatgcttccgtaataaacgtacctgaatttccgacacggatatttcctccgatcgccttcaaaatacctccgactgaaatcgtcgggtcgagatctccttccagtaaaatatgagagatcatggacgttgtcgttgttttcccgtgagttccggaaactgcgatcggcgtatcgtagtttttcataagctgtccgagcagttctgcgcgggtcagcatcggaattttcagcgcaactgcttcgatcagttcaggattatttcgattgattgccgcagtgtaaacgacacaaccgatatcccgtgtgatattttccactttctgaccatagataatatgagcgccttcagaaaccagtttcttcgttaaaggagattcctttgtgtcggagccggatacagtgaatccttcttttaaaaggatttccgcaagtccgctcatgctgataccgccgattcctataaaatggatatggatcggttcgttaaaatcaattttatacataatgcttcctcttttctttcacctaaatgggttgaaagtaacagtttcgtctgcgccattcgtaaaatcgcgctgtatagctgaactgttacaattaaaatgcaccgttatttttatgtgtaacaatcgttttttaaaaattagtcataaaatatcataacctactatattatactatatatgcaaaaaattgaaagaagttctttttgtgcgaaataaacaaaaagttaaaaatgttaaagaaaaaattgtaaaaaatgattggataaacatgaaaatatgatataataaatatatctaactagaaatgaggtgacgtaatgtttaaaaaagagatgattgcaatgcttttagcaggcgggcagggcagtcgattgggggttcttacagcaaaagttgcaaaacctgccgtagcatttggcggaaaataccgtattatcgactttccgctgagtaactgtattaattcaggaattgatacagtaggagtgctgactcagtaccagccgctgaggctgaatactcatatcggaataggaattccgtgggatttagacagaaatgtcggaggtgtatcgatacttcctccttatgagaagagttctaacagtgaatggtacaccggtacggcaaacgcgatttatcagaatcttgattatatggagacgtataatccggattatgttcttattctttcaggcgaccatatttacaaaatggattacgaagtgatgcttgattttcacaaagtgaatcatgcggatgtgacgatcgcggcaatgcctgttccgattgaagaggcgagccggttcggcatcgttgttactgatcatgagagcaggattaaagagtttgaagaaaaaccggaaaaaccaagcagtaatctggcgtcgatgggtatttatatctttagctggccggtgttaaaagaagctcttatcaagttgaaagatcaaccgaattgtgatttcggaaaacatattattccgtattgtcacgacaaaggggacaggctttttgcatatgaatataacggttattggaaagacgtaggaacattgagttcgtactgggaagccaatatggaactgattgatattatccctgaatttaatttatatgaagaattctggaagatctatacgaacagcgcgaatatcccacctcagtatattgcgcaggacggagtggtagatcggtgtattatcagcaacggaacagaggtgtacggggaactgcataattcggttttaggcggaagagtgcgcgtcggaaagggaagtgtcgttcgtgattcgattattatgcagggagtaacgattggagagaactgtgtgatagacagggcgatcatagcagaagatacggtaatcggagataatgttgtgatcggaatcggaagcgatgtgccgaacaagatgaaaccgaacatttacagtggaggacttgctacgatcggcgagaactctgtgattccgtcaaacgtgcagatcggaaaaaatactgcgatcagcggagtgacagcggcggaagattatgaggacggcatacttgcaagcggcgaaaccttgataaaggcaggtgagagagtatgagagcagtaggacttattttggcaggaggaaacagcaggaagatgcgcgagctgactgcaaaaagagcggtggctgcgatgccggtagcgggaagctatcgtgcgattgattttgtactcagcaatatgacaaattctcatattcagaaagttgccgtgctgacacagtacaatgccagatcgctgaacgagcatctgaactcatcaaaatggtgggatttcggaaggaaacagggaggattgttcgtgttcacgcctacgattacggctgacaacggatattggtacagaggaacggcagatgccatttaccagaatctggatttcctgaaaaaatgtcatgaaccatatgtgatcattacttctggtgatgcggtttataagctggattataataaagtgcttgagtatcatattgcgaagaaagcagacataacggttgtgtgcaaggatcttgaaccgggagaagatgccacgagatttggaacggttcgcatgaatgaagaatcaaggatcgaagagtttgaagaaaagccgatggtggctcattcgcatacgatttcaacaggaatttatgttctccgcagaagacaactgatcgatctgatcgagcattgtgcggaagatgaaagacatgattttgtaaacgatattttgattcgttataaaaatctgaaaaaaatatacggatataagatcaacagttattggaataatatctcaacggtagatgcgtattataagacaaatatggatttcctgaaaccggaagtaagaaactactttttcagagagcttccaagcgtatattcaaaggtaagcgatcagccgcctgcaaaatataatccgggcgcagttgtgaaaaacagtcttatcggaagcggaagcatcgtaaacggaacgattgaaaattccgttatctttaaaaaagtatttgtcggtaataattgtgtgatcaaaaattcaattatattgaatgatgtatatctgggagataatacatatatcgaaaattgtatcgtagagagcagggatacaataagagcgaatacaagatacgtcggagaaaacggcgtaaaagttgtagtagagaaaaatgagcgttacgcattgtaaaaaagcggcgtaatactccgaaaaggcagaaaagaaaggagatctgaacctatgcagatcacagatgtacgagtgcggaaagttgcgaaagagggaaaattaaaagcggttgtatccattacgatcgacgatgaatttgttgttcatgacattaaagttatagaaggagagaaaggaatgttcattgccatgccaagtaaaaaagcaatggacggtgagtacagagatattgcacatccgatcaattctaatacgagagaacggattcagtctatgattttagaaaaatatgagcaggcattagcagaagagccggatggggaaaatccatagataatgtatgatagatacctgataatatgaaatataaaacgtaccctaataaaagaaaacgcatatcaagaagcgtgtcggatcattagggtacgttttagttttatttattggctgacgatgactgtttgataaccggcgcttcgcagccgacgttctgtttctgccgcatcgtgaagtgtggggaaaacgcctaccatgactcggtataatccgtttccctcgacgacagaggcaggaaagtcaagttcggacaactcccggcggagtcgttcggcatacaggggattacgaaatgcgcctgtttgaactgtgtagcgaggcggaagaggaacgacaggaacgttgtcttcattaggaaaggcatcatcaggatatgtgttttcatcaggcagcggagcgaccggagcttcattttcatccggaagaggaacaacaggggtattgatgccgagtgtatcgaggatgccttcagctatggcaagggcgatatcgctgaagttatcgtcaaagagcatgttgtccgtgtcagaattgataaatccgacttcgacaagaaccgcaggcatttttgtgcgtcggaggacaacgagcccggggcgggcttttactccgagatttacaaaaccgatcccctcaagttgttcgtttatattttccgccatctccagtttaatgccggatttgtcgtagacaagagattcgactcccgagacagcgttatcttgcggaaaagaattacgatggatagagatgaaaaaatcgactccggcttcatttgcttccattgccttttgataaggcgactcgtaaatatctgtcgtgcgtgtatagagaacatcgattccccgctcctgcagaatctgtccgatggcaagtgtaagagaaagtgtatcgatcttttcctgtcttccgttgtatacagctcccggatcgcgtcccccatgtccggcgtcaagcatgattgagtacggcaaagtaatatcctcctgaattttttatctgatctatataaaatatgcgctcagataagtaatgttacaaaatggatcaatcccggaatgtgccttttggtactttcgggattgatccattttgtgctttgtttataaaaatccgccgtcaatgcctataatctgtgcggtgagataggcgggactttcggcaagggcaaggactgtccttgcaacttcttcacaagttccgaatctgccggcgggaatttcttcgcaaagcatatttttttcttcttcatttaagcgggagttcatatctgtgtcaatgacgccgcaggcaacggcgtttaccgaaatgccgcttggcgcaagctcttttgccaaagcttttgtcaggccgtggagtcctgatttggaagcggaataagcggcttcacaggaagcgcccgccgttccccacatggaagaaatattgatgattttcccgcatttttcagataccatatgagggatagcttctctgcagcagtaaaatgcagaagaaaggtttgtgtcgatcagatttttccattccgagtcggaaagatcgcttaataagccgaaatgggaaattccggcattgttgacgaggacatcaacaccttggcagactttttttattttgcaaaatatgctgcggacaacgtcgggatcgcttacatcgccggggagagctgtgcagccgccgccggaagcaagaatttcatgttcggtttcagccagttgttcgactgagtttttacaatttataaatacatgataaccgtttttggcaaaggcgacggcgcaggcgcgccctattcctctggaagatccggtgataaggacatattttttcttcattgttttcgtacctttcaaaataattgattgtcagagaacagtatatcaggaaaaattaagaggcgcaaatgaggaaaagctgaacgtcgtaattgtcttgtacttagattacggttgtgctaaaatttataaataaatttatcgagaaaagtgaattgtgcgaaaattaagaaagcggaggatgcggtatgataaatgaggcgatcgaatttgcggcaaaggcacacgagggacagttgagaaaaggtacgaagaaaccttatattgttcatccgatagaggtgtcagagattgtatcggcaatgacagatgatgaagaagtgatatgtgcggcggtgctgcatgatacgattgaagactgcagggggattacaaaagacgttttgaagctccgtttcggagacagagttgcagagcttgtagcacaggaaagtgaggataagacgcttagctggaaagaacgcaagagcgcgacgatcgccagattaaaagacgcacaaagagaagtacagttgatcggtcttgcagataagctctcaaatatgcgggatatcgacagagattatccggttgtaggagagaagttatgggagcgttttcggatgaaaagcaaagcggcgttggagtggtattataaaggggttcgggacgctttaaaagaaaacttttccgaagaggaagagtataaagagtattgcggtttgatcgagaaaaatttcggatcgtctgagatagacatgccatgggacaagcaggatgtctgacgcgacagagatctgtttgctcagatataaatgaatacaaataactataaataaccgggcagaatgcagataaatatttgtgttctgtccggttattatatttaattcggtcaaaataagtcaaaaaagattatatttgtgcaaattcaacgaaaataaaatgaaaactatgtgaattattatgattgaatttgactgaatatgattatataatgacatcaagaaaacaaaaagacgcaaaaagaaaaggaggaatggagatgatctatacagttacatttaatccgtccttggattatatcgtttctgtaaatgattttcagcttggacttacgaaccggacggattcggaattgatccttcccggaggaaagggaatcaatgtatcgacaattttaatgaatctcggaattgacagtacagcgtttggatttgcggcaggatttacgggagaagagattatcagagaagtagaagcgatgggaatccgttctgattttattaagatcgacagtgggatttcacggatcaatctgaaactgaaaaatattgacggtacggaaattaacggttcagggccggaaataagcgaagagaagatcgaagaactattgaggaaactggatattttgggagagggagatattcttgttcttgcgggaagcattccggcgtcgatgccggcggacatgtacagtacgatcatggaacggcttcagcataaaaatgtaacgtttattgtagacgctacaaaagatttgcttattaatgtattaaaatacaagccgtttttgatcaagccgaataatcatgaactgggagaattgttcgatgtcaaactgacgacaagagaagaggtgattccttacgggaaaaaacttcaaaagcagggcgcgagaaacgttctgatctctatggcaggtgaaggcgcggtactcgtagcggaagacggcagtgtgtatgaagctccggcgccaaaaggaactttggtaaatgcagtaggtgcaggcgactccatggttgccggatttacggcaggatggatcgagaagaaagattatagacacgcattttatatgggggtatccgcaggaagtgcaagtgcattttctgaatatcttgcaacaaaagaagaaatcatggatctgtacgaaaaggtttcaaaatgaataaaaacgaactatgtacagtaaagatgtaagcagaaaagaaaagtaaacagaaacaaacagaagtaaacagtaataaatagaaacaaacagagttagaaagaaacaaacagagccaaacataagcaaacagaatcaaacataaataaacagaagcaaataagcaaaaaaataaacggaagaaaacgaagatgaacaggaggttttgagaatgaggatcacagatctgcttgataaaaggagtatttcgttaaacgagactccgaaaacgaaaagtgaagcgcttgacaggattattgatcttatggttgcaagcggaaagatcaacgaccgtgaagcatacagagaacaagtatacgcaagagaagaagaaagcaccacaggaatcggagaaggaattgccattcctcatggaaaatgtgatgcggtaacgaaaccgggtcttgcggcaatggtagtaaaagacggagtagaattcgacgcattggacggacagccggttacgctgatgtttttgatcgcagcgccgaatacgaaagataacgtacatttggacgtgttgagcaagctgtcggtactgatgatggatgaagtatttgccgatgcgctgagaaatgcaaaaagcgccgatgaatttcttgatattatcgataaggcagatgcggagcagggcgatattgacgagcgtcttgcagatatgaacgaagcttctgcaaacggatttaaaattcttgccgtaacgtcctgtccgacaggaattgcccatacttatatggcggcggaaggtattgagaaagcggcgaaggaaaaagattgtttcgtgaagatcgagacgagaggctcgggcggagcgaaaaacgttcttacagagaaagagatcaaagaagcggactgtattattgtagcggcagacgcgcaagttccgatggatcgttttgacggaaagaaagtgatcatctgtcaggtatcagacggaatcagtaaagcgcctcagcttatcgatcaggcaatgtccggcaacgttcctgtatatcacagcggaaacgaaacgtcctcttcgacagcggtgtcttcgtcaggaaaatcaggaggaatcggacataaaatttatacacagcttatgaacggcgtttctcatatgcttccgtttgtagtaggaggaggaatcctgatcgcgatcgcatttttgatcgacggtttaagtatcgaccttaattctcttccggcggatgaaagagcggcttttggtacgatcacgccggctgcggctttgtttaaacagatcggaggagttgcgtttggatttatgcttccggtgcttgcgggctacatcgcgatggcgatcggagatcgtccggcgcttgcagtcggatttgtaggcggaatgatcgcagcaggcggaaaatcaggattcttaggagcgcttgtagcaggatttgcggcaggatacattatcgtaggtctgaaaaaagtgtgcggcaagctgcccgaagcagtcgagaaaatcgcgcctgtattattgtatccggtatttggtattttgatcatgggattactgatgacgtttgcggtcgaaccggttatgggaggcatcaacaccgctttgaatgcgggactttccagcatgagcggaacgagcaagatccttctcggaatgatcgtcggaggaatgatgtcgatcgatatgggaggtccgtttaataaggcggcatatgtgttcggcactgcgtctatcgcggcgggaaattatgacattatggcggcggttatggtcggaggaatgacggcgccgtgcgcgatcgcgcttgcgacaatgctctttaaaaacaaatttacaaaagaacaaagagacgcaggtccgacaaactttattatgggtcttgctttcattacagaaggagcgatcccgttcgctgcatctgatccccttcatgtgctcccggcctgtatcgcaggatcggcggttgcaggagcgctttccatggcgtttaactgtacgctgatggcgccgcacggcggaatcttcgtattcccggttgtaggaaatccgcttcaatatctgatcgcgcttgttgcgggaacagttgtgtcggcattgctgctcggagtattgaaaaagaaagcttaaaaagtataaaaatataaagaataaaaaactgtttgtcctcagcgggaaacagaaaaataagaaaaagcaaaaaaaagtgaagcatataaagtgaaaaaatgatagaatagtgtcaaatagtaaatacgagggtcatcaaaaaatatagattgaaagatgaccctcgtattggaaaaagagaaagaacatatagtatagtttattatatgcacagagggcattatgttaacagagcaaaggtttgaacggatattagaacggctgaaagtaaagaaaagtattacagtagctgaaattacagaagatctcggaatttcggaatccacggcaaggagggatattactgcgcttgataaggcggggaagctgacgaaagtgtttggcggagcggttgctgccgagcatacttatgagatgaaagaaccgacagtggcacaaaaagtgaacgtcaggaaagaggaaaagatcaaaatcgcacaatatgcggcagatatgatcggagacaatgattttgtttatcttgatgcgggaacgtcagtcggctatatggtagaatttttggcagagaaacgggcggcgtttgtaacgaacgcagtcgcacacgcgcagcgtctggcggctcagggaaatcgtgttttacttatagggggtgaattgaaaagttcgactgaggctgttgtcggagcgcaggcaatagaacttttaagaaaatatcatttcacaaaaggatttttcggaacaaacggtattacgaaagaggaagggtttacgactccggacgtaggagaagcgcaggtgaaacaaacggcggtacaacagtgtcaaaagtcgtatattcttgccgacagtacaaagttcggcaatataagcgccgtgacgtttgctcccttttccggcagtgtgatactgacggaagaaacagtagacggatataaagaaaatgaacggctgatcgtgtgcagataagacgattctaagagccggtcatacagaaaaaatcaacagacgtcaaatcagagatgagatgtctgttgattttttaattttttacggaagcaggtatccgtacattacaatgaagtggcagatgcttccgcccataacgaagaggtggaagatctcgtggcttccgaagtttttatgtttgttattgaaaatcggtactttcaatgcataaataataccgccgactgtgtagataatacctcctgcaagcagccatccgaaagcggccaaaggcatattgcggaaaatctgtgcaaatgcaaggacacacgtccatcccattccgatataaagaacggaagaaacccatttcggacaaaatacccaaaaagctttgatcagtatacctgtcaatgcgagagtccatacaacagcaagtaaaatgatccgcatacggccttctaagacaagtaagcagacaggcgtgtaacttcctgctatcaggacggagatcatcatatggtcgatcttttttaagacagtgtttcccttttcggaaatgtcaaatgtgtggtaagttgtgcttgccgcatataataagatcagacttgcggcataaacggacatggagatcaggtaaaccggatcaggctgcgccgcggcttttataagcagagggaaagcggcgataagcgccatgatcattccgataaaatgagtgatggcgctgccgggctcctttatataaaatttcccccgaagttcattcaaagaggcggatttcccggaattataaccggtttttttataaccggcggcagaatagctgttccctgcgtaattttgtatatgaagcgtaggatgtttttttataaaggttgattttttagcaatggcatgagtatttcccataataatatgcacctccgaattagttaaatgcaacatgtagtttttgaaactacattaagtatatgcatatattacaccatcaattcatggaaatcaaccacaaatttaaaaagttgctttaggaagataaaactatttttaacaacttagtatgaaaagatcaaagttaaaatgacatccgtaataaataaagaatttaagattacgcagaaaacggtttgtgtcttttttgataattttgaaaaataatttgtccagttcggggcgaggtagtaaataaacgcacatccgagtaacgcaaatgcggcagatcctccgagataaattctgccgttaatgttcagaaagaattcgctgaaatcccaaagtttgtatcctgaaaaaagttcaaccgtaaaactgaaaatatattgcaggaatgaaaacacaatgaaattcaggaaaaatacaaaaatcggttttttgagcaggcgttttgatgctttcagaataatgattccgtaaatgccgtaaaggggcagccacgggccgaacagcagatggatgtcggccacagttccgtcgcgcataaggtgtatgagcatttccatgatccatccgaaacaggatgcggcatgaaagaggaagatgcaggacaaaatatcgtaattccgaaatacacgggcggaaggttttactgtctttggctgaacggagaagagaaagacagggtattgttccggttcaaaataggaagtcttcgtatacggtccctgggaatcgtcataaagagctttgctgataagaagttcgtcttcggaaggaacatgttccaaataagaatcgcttagcatttcatagcgcggcgaccgcgagaggacatagtctctgcgaagcgacgcataaagttcagccttacatcccgtaatatatggattgacaaatatgaagtcaagaataccgagtgttaagattgataagatcttccatcctaagaaagagcagtccagcagaaacacacgccatttgtttttattcatgagctgtttggataaaaagaaggcgtcttttcggcttatttttggattttcggcgagtatgtacgggatcatggcatattcgtaatgttttatgattcctcctgcgatcgtgaaattccaaagaaactgaaatacagatctgcagaacatgacccacacaggggcggctatacaccgaagtttatataagaagaaaatctttgagatagaagttcttttgtatttgcgtacttcaagaaaaaaccgcatttctccgatgataagcacatagttcacaaacagttgatagagaaatgttatacacagtcctattataagaaatacaaaagatgtgcctaacggttctgtaaaaaatgcattgactgttctaaggacattaaaaaatatggatatgccggcggaacatagatcgatcacaaaagaaaatacatgaaatgcagtattttgtaaaagttttggaaaagcgttcccgcctaagatcagaccgagtgtttcggcaaacgcttcggaattcgtaatgctaagagaaaatgcggcgtctgtataggcaggaccggaaagtttctgcagatttaaaaatgttgtggaaacagggtatgctgtcgtaagcaaagagataatgaaacagacggaaaccatccttgtatacgccggtttcatgcatgatttagaagatttttttaatgttttttgtttccacataatgatagtccccctctaaagttataacaatatcggcagtctgcctgattggtttgaaaaaagtgttttaaggatggagcgcttcatgttcgcgacgaatctcgttgaagcagtcaagagcattccatttgctgttagttgcagtcaggacggctttatacgggaacgggccggctccgcttttgcgaagggctgccagaacctgatcgagacggctgctgcttaaagaagagaagagaaacattgtatccggaagttcctctccggcgtaattttcttcgacaggagagatatctttcatgtcggcaagatatccgagcggctgattgtactgttccggtttgataagctgtatgcggatatgcagaggcagcagggcggaacggattttcagcagttgttcttttgccggtggattaaataataagatcatttctttcatgtgtgaaatcctttcattttatataaatatatttttatttgttttactgatgttattgtatcgcataaactggaaaaaagaaagagaaatggattgcggctttgtgcatggcggaactgttcgttcatataataaattaagaagagcgtaaaatggcggtgaggcggtatgcggatttgtgaactgaaggaaaaagaagtgatcaatgtatgcagcggaaagcgtctcggctgtatcgcagatgtggagatcaacatatgtacaggagaaatcgaggcgatcgtaatacccggaccggggaaaatatgcggatttttcgggacagattgtgaatatgtgattcccttttcctgcataaaaaagatcggtccggatatcgtgcttgtggagattaaagaagaaaaatttttgcaaaaattttaaagcgtgtggtataataattgcgcatatagaaaatggaaagagaaaggcggaaatgctcatgagatgtccatattgtggaaatccggatacgagagtgattgattctcgtcctgcagaagataaaaactcgatcagaagaagacgttcgtgtgatgaatgcggcagaagatttacgacatacgaaaaagtagagacgattccgctcattgttataaaaaaagataataacagagagcagtatgaacggtctaagattgaacaaggtgtattgagcgcatgttataaacgccctgttcccgcagaagcaatccagaaaacgatcgatgcggtcgaacttgagatttttaatcgtgaggagaaagaaatcccgagcagtgagatcggggaaatcgttatggaaaaactaaaagagcttgatccggtagcatatgtacgttttgcctctgtgtacagagagtttaaagatgcgggcacatttatggacgagcttaagaagtttttgcagtagataaaattatgagaacatataaattgacgattgcctatgacgggacaaactatcaaggctggcagaggcagtcagatacagatcggacgatacaggggattttggaagagacgctggaaaactgcataggatatcaggtgcagatcgacggctccgggagaaccgatgccggagttcatgcaagcggccagactgcgagcgttgttttgccgggaaaagtggatacggctttgtttacggaaaaaatgaacgggtgtcttccgcctgatatacgcatccttgatgtggagcttgtgaagaacggatttcatgcccggaaaagtgcggtagggaaagtttatgaatatcggatcgatacggggatcaaacaagatgtatttacacggaagtacagcggtcattttccgggagaaccggatcttgcaaggatgagggaggcggccggatatttgacaggcacacatttttttgcggggtatacggataaaaaagataacagatctgtcagacgtacgatttactcgatcatgatcagagatgaaagaaaagactttttgccgtgcggaaaatccgatcagatcgggaatggaaactgtattgtcattcgatatgacggaacgggatttttgtatcatatggtgagaatattgacaggaactttacttgaagtcgggatgcgggaacgtaccgccgaaagtgtgaaagaggcgcttttgacaggagacagatcaaaagcggggtttctggctccggcaggcggactttttttgagagaagtacggtatgaatgagaagagagggacaggtagtgaaagcatctgtccttttatgctttacccggaaacaggttctatcagagtgatattaatattatgtgagagaggtggatgataatgaaatttgtttcgtggaatgtaaatggaataagagcgtgtgtgcaaaaaggttttttggattttttcactgaggcagatgcggatattttctgcatacaggaatcaaagatgcaagaagggcagttggaactcgatttgccgggatatcatcagtattggaattatgcggtgaaaaaaggatattcgggaacggcggtgtttacgaaaaaggaaccgttgtctgtaacttacggtatcggaatcgaagaacatgatcaggaaggcagagtgatcacatgcgaatttgaagatttctactttgttacggtatatacgcccaattcgcaaaatgaattggcgagacttgattaccgcatgagatgggaagatgattttcgtatgtacctgaaaaaactggaagaaaaaaagccggtcatcgtaaccggagatatgaatgtggcgcacaaggaaattgatctgaagaatccaaagacaaatcgaaaaaatgccggatttacagatgaggagagaggaaagtttaccgaacttcttgacgcgggatttattgatacgtttcggtatttttatcccgatcgggaaggaatttattcctggtggtcgtatcgcttcagcgcaagagcaaaaaatgccggatggcggatcgattatttctgtgtttcggaaagtttgaaagagcgtctgaaagatgcgaagattttgacagatgtgatgggatcggatcattgtcctattgagctggatatggattgaatataatatgggaggttgtttgaaatgacaaagattgatattatttcgggctttttaggagctggaaaaacaacgcttattaaaaaactgctttcggaggcgtttgcgggagaacaggttgttcttatcgaaaatgagtttggagagatcgggattgacggcggatttttaaaagaatcaggaatcgagatcagggaaatgaattcgggttgtatctgttgttctcttgtcggagatttcggcaaatctttgagagaagttgtggatacttatcatccggatcgtattttgatagaaccgtcgggggtcggaaaattatcagacgtcataaaggcggttcaagacgtacaaagtgagatcgacgctaagttaaatagttttacgactgttgtggatgtgacgaaatgcagaatttacagaaaaaatttcggtgaatttttcagtaatcagatagaatatgcgggcgcggttattttgagcaggacagataaggcaaaaccggaaaagatcgaagaaagtattgctattttaagagaattgaatccgaaggcgccgtttattactacacctttggaacaacttgcgggaagtaaaattttggaaacgatggaatccgtcagatcaatggaggaggaactccttgcggaggttgtctgcccggagtgcggtcatcaccacggagcgcatcatcatgaccatggagaggatgagcatcatcacgaacatcaccatcatgaccacggagagtgcgagcatcatcacgaacatcaccatcatgatcacggagagtgcgagcatcatcacgagcatcaccatcatgaccacggagagtgcgagcatcaccacgaccaccatcatcatgacaacggagaggacgggcctcaccacgaccaccatcatcatgactgtggatgtggtcatgatcatgccggtcaccaccatgcagacgaagtgtttacgagctgggggcgtgagacgatccatgtgtattcggaagaacaggtcggggagattttaaagagtcttgaaaatgaagaagagtatggcgatatccttcgagcaaaaggaatggtcaaaggagaagacggaacatggatctactttgacatggttccgggagaatatgaagtgcgtaccggagcgccggaatacacgggacgtatttgtgtgatcggagcaaagataaatgaagaaaaactggaaaaactgttcggcctttaatcggcgaacatacaaaggaaacgaatgaaagagcgagaaccggaaaatatggaatgaaaaaataaggagggaaaaataaaacatgaatgaaccggatgtaatggtttatttgatgacgggatttttagacagtggaaagaccggatttttaaaatttacattgaagcaggattattttcagatcgatggaaaaacattgctcattctttgcgaagatggagaagatgagtatgatgcgatggaaatgttaagatacggcgttgtaatagagcggctggaagacagagaagaactgacagaggagtatttggcggaattagatcgaaagcacgagcctgatcgagttgtcattgaatataacggaatgtggaaggtcagtgattttgaaaatatgaagcttcctaagggctgggggatcgagcagaagatcacaacagtggacgcaagcacatttcagacatatctgactaatttaaaaccgctctttgtagaaatggtaagaggcgccgagatggttctttttaaccgctgtgaagatattaagcctctggcgggatacaggagaagcgtcaaagtagtcagccctcaggcggaagttatatttgaagatgaacaaggagaagtggaaaatatttttgaagatgacgtgccgtatgatctggatgcgcctgtaatcgagattccgagagaagattatggtatctggtatgtggatatgatggaaaatcccgcccgatatcgtggaaaagttattgaaatcacagcgaaggtgttgaaaccttccggatttccgtcaaaagtgtttcttccggggcggatggcgatgacatgttgtgcggatgatacgacatttctgggatatgtatgcagaagtgcgtacgctccgaaattaaaagcaggacaatgggtaaaagtacgggcgaaagtacggtttgcgaatgtatcggtttatcgcggagaagggcctgttctcgaagcggaacatatcgaggcggcagaaccgatagaagaacttgtctattttaattagagatgaaatgagtattgaaaagacgaaaagaagaccggcagaagagtcggactggatttgaagaaaaaaagaggaacgcgagagaaaaggagaaaacctatgaaatttacaaaaatgcagggcataggaaatgattatgtttatgtgaactgtttgcaggaaacgatagaaaatccatcggaactggcaaagaagatcagtgatcggcattacggagtcggttcggacgggcttattatgatcaatccatctgataaagccgattttgaaatggagatgtataatgcggacggttctcgtggagaaatgtgcggaaacgggattcgctgcgtggcgaaatatgtatatgattacggcttaacagataaaacaagtatttctgtagagacattggcaggtatcaaatatcttgatctgactgtagaagacgggaaagttgtccttgtcaaagttgatatgggaaaaccgatgctgcgtccggaagaagtgcctgttgtttcggaaaaggaagaagtgatagatgaaccgattaccgtggatggacaggaatataggatgacatgtgtttctatgggaaatcctcatgcagtcgtatttatagatcaagatgtaaaagaatttccgcttgaaacagtcggagtaaaatttgaaaatcatgaaaggtttccaaagagggtgaatacggagtttgtaaatgttcttgaccgtcatacggcgcagatgcgcgtgtgggagcggggatcgggagagacgctggcgtgcggaaccggagcatgcgcagtcgccgttgcctgtgcgttgaacggattgacggaagatgaggtgacagtaaaactgcttggcggagatttgcagatcaagtgggacagagaaaagaatacggtatatatgacaggccctgcggaagttgtatttgacggggagtggaagtagcttctttgttgacagattttaaggctgccgctttgactgatatgatgccccccatataggacaatgatgtataaaagtccgatatgggggtatttttatgtccggaaaaactgagataatttttactttcccttttttttgattatttttttgataagcagtatgagcaaaaaataaattacgcatactacaattcccgaagcgcagctccatgaagtgagtacataccaaaggccttttactctctcgatttgataagcggctatttctcctcgttcaagaacagtaaaccctaatatagcgatcggaatgcatgcacctaaaatgaatgctataaccgctcccaagactgtcagtattttttgataaaatcttaccttttttaatggattgatctttaggtcaacgttggtgttttgaatgtctagctgtgttttcattgcggccatctttttttggcactctctgcactcggttaaatgtttatcaatatcttttttcgtttgttccgataatatatcatcttgatatagtggtaacaggtcggaaacgatgtagcatggaagtcttttattcatcttttaaaatctcctttacaattttttgttttcctctaaaaaaagttactcttgtccaattttctgttttgccgattatttctccgatttcggcaaaagacaagttgctgaccaatcttagatacatgacctctcgtatcggttcattcatgttgtgtatcaactgtaagatttctttttgttcccattgaacgtttacttctttttcatccgctatttcctgaatatgatcatttgtagacaagatttcttgacgttttcttaaatctttcaaccaaacatttttcgcgattccgcataaccaggttaatatggaactattccccttaaaccgatcgatgcattggacagcttgaaagaaagtttcttgagtaagttcttctgcaatatcttcattattcgtcttgctcaataaaaacaaaaagacttttcttgaatacatctcgtatatttcttcgatcacttgtgctttcaacctccttctgccagttagtgccgaattctttcattttgttacaattatcttagtaaaaaagtaaataaaaaagattatccaaacatgcagcttccaatttaagaatctgacatgcatcggataaccttaacgaaattcaatcagcttttacattatgaaaaataaaaaatcctccataaaatggaggatgaatcggagtgacaggattcgaacctgcggcctctacgtcccgaacgtagcgctctaccaagctgagccacactccgataaaataaggaatttgtttattacaaattccaagctacggaaaagggacttgaacccctactaacagagtcagagtctgctgtgctgccaattacaccattccgcattgtaccgttttgtgttgttttttgttgtttcccgtaagcaacatggttattatatcagactctaaaaaaaaatcaagtgtttttttaaaaaaaatgaaaaaatgaaaaaattgtaacaattcagcacgcgccattcgcaaaaccgcaccacgtgcttattgtggctgacgccactgttttactcataaatgggcgcttagcgcatacagatgtccgttagcaaaaacatgcagacatgttttgtgcttcccgtacactgtatggctgaactgttacaaaaaattgaaaattaagaaaacggtacatggaaaagcttccgatgcaccgttttttaagttagttaaatccgatcaggcgtcttgcaacgctgtatgcaagagaagatactttacgtccggatcttcccgggagattcatcgtctgtccgagtataccgtagcggatcttcatataagttttgtaatcttttcgttttaagtagctccacagttctttctttttagttaagttctccggttttttagagcggatacataaaatggatgaaacagtcatcatgatcgcaagataattaaccatatattttcgcagttttttacttgagatcatccgcagttcatacatggagatcattgtcttggttacaaataattgctgatctatccttccgatcatgattttttcgttgacggactgatcttcccgcccgataaaatagcggtagaaatcgacattcaggtaataaagggtgcgtacatgcggaagcggataatacacgtaaatattatcaacataaaaagtgtgcttcggtaattttaactggcacagtttcagcatctctgtccgataaagaacggagtgcatcaaaatatattggtcgagccggaaatgtccgatctcatcccagtgaaaaatcgtattttcgggaagcacattgtcatagcggatcacttttttatgttccatgccgactttttcgtaaacatagtttgagattaccatatcgacaagtgtgtcttctttcacaaatgtttttactgtttcaagaattttaaacagagagctttcgtcaacccagtcgtcgctgtctactactttaaaatattttcctgtggcatgagaaagtccgcagttgactgcatcgccgtgtcctccgttttctttttggatcgccttgacgatcgtcggatattgagcttcgtaccgttcggcgatttcctgcgttccgtcttttgaaccatcgttgacgataagaatttcgacatcttctcctccgataaggattgagttgatcgctttttccatataggcttctgagttataacaaggaattgcaaatgaaatgtatttcatatcatacctcctgattttatctgtcatgttgtctaaggtgtagtatacattagttattctatattgtaaaattcaattttttcatatatagtaaaagtgtttttataatagcgaaaagctaaaggccgggattatccgaaatcttggcagatgcttacaatcccggaatgtgatttttgaactttcggtgattaaaataaggaggaagagatgaaaaaaaatgtgatcgtaggacagtcgggcggaccgacggcagttatcaacgcaagcttatacggagttgtcaatgaagcgttgaacagaaaagattcttttggtgcagtgttcggcatgattaacggaatcgaagggtttgccgaaggccgggtcatggatatggaagaattgaagcgctcgggagaactggaattagtaaagacaacgcccggttcatatcttggctcttgcagatataaattaccgaaagatctaaacgacgaagtatatccgaaattatttgaaagatttaaggaatatgacatcggttatttcttttatatcggaggaaatgattcgatggatacagtgagcaaactgtcgcgttatgcggagatggtcggaagcgatatttgctttctgggtataccgaaaacgatcgataacgaccttgtcaatacagatcatacgccggggtttggaagcgcggcaaaatatgtggcttcaaccgtgcgggagattgcagttgacgcatcggtatatgataataaaaaatcagtgacaatcgtcgagatcatggggcgtcatgcgggatggcttacagcggcaagcgcattggcacgaaaatttgaaggagataatccggttctgatctatttgccggaagtggcgtttgatacagaacggtttatacaggatgtgagcgcgtctcttgaaaaagtgtcaaatgtgatcgtttgtatctcggaaggaattaacgatggcaaaggaacgtttatttgtgaacttgcaagcgaggtaggagtggatactttcgggcataaaatgctgaccggatcaggaaaatatttggaaaacctgataaaagaccgtctcggcgtaaaggttcgttctgttgaattgaacgtaagtcagagatgttcttcggcaatgctttctgcgacggatttgcaggaggcggttgattcgggagcgtatggcgtaaaatgtgctttgcatggcgaaagcggaaagatgatcgcctttgtgagagcggacggtgaagaatataaacttagttacgaggcaaaagatgtgaatgaaatctgcaatcgtgaaaaaggtgtgcctgccgggtggatcactaaagacggatcagacgtaagtgatgaatttatccgttatgcgaaaccgcttattcaaggagaagtacaagttccgcagcaggacggacttccgctgtttgcatacaggaagtaaacggacagaggaactaaagaaaaggaactaaagaaaagaaaatcaagaaaagaaaataaatagacgacgtaataaagaaaaaagaagatcatggtctttgccggagataaaaaggttggtaaagatcatgattttttatgttgaaagtttcctgaagtacatataatgcaaaaaatgaatgtgctgcagtcataggagaatgaatgagtcaaaaactggaaaatcttttaaatctggctctggatgccgatcagggagaaagagaacgctccgaagagctggatgttggatatgataaagaagaaaatgtgtgggaactgatcgtaaaatattcgggaacacttgaagcggtcaggcaaacggcgcgatcggttacggaactgttgaacggctatgcggttattgtcatcgaggaagaacggatcggacaactggctcagctcccggaagtggaatttatagaaaaaccgaaaaagctgtattttcaaactgatgtaggcaggcaggtgtcgtgcatagatattgtacaggatatgccgttatctttgagaggaaaagggactcttatcggaattgttgacagtgggatcgattatgaaaatgcagagttcagaaatgaggatggaacaacgcggattgtgtctctttgggatcagtctgttaatgggaggcctccggcaggatattcggcaggaacagagtatacacgggagcagatcgatgcggcgttagcaacagaggacaaagaggtaaggcggcagatggtgaaaacatccgatgtcagtggtcatggaacagcggtggcgggaatcgcggcagggaatggccggggaagtgagggaagaaggtttcggggagctgcgcctgaggcggaactgatcatcgtaaagatgggagcccccagagaaggcggttttccgagaacaacagaactgatgcggggagtagattatattgtccgtaaggctgtagaacttcgtcgtccggtggcgataaacatcagttttggcaacacatatggatctcatgacggaacttctcttgtagaacgttttttgaacgatattgcggacatgtggaaaaatgtaatctgcatcggaagcggaaatgagggggcgtcggcaggtcatgtgtcgggaaaagtgcggcggcagatatctgagacggtagaacttgccgttcagcaaagagaaccggcgctgagtattcaaatatggaaatcgtatgttgacgagatgggagtttcggtgatcagtccgtcgggaaggcaggcaggaccgttttatgaatttttgggagctcagcggtatatactcggagatacagaacttttgatttattatggagaaccgaagccgtacagcgtgaaacaggagatttatctgtcgcttcttcccggaaaacagtatatagaaagcggcgtgtggaaaattgttttaactcccggccgtattgtggacggggagtatcaaatgtggcttccgacacagtcgtcattaaatatggggacagcgtttttacagccgaacagtatgtcgacattgacgattccatctacggcgtcgcttgctgttaccgtggcggcatatgatgcccggacattttcgtatgcggatttttcgggaagaggtccggcggggatgtacgaaggtgagaacgtgctgaaaccggatattgccgcacctggagtgcgcgttacagcgcctgtcccgggaggcggatatcagtcttttagcggaacttcttttgctgctccttttgtgaccgggagcgctgcgcttttgatggagtggggaattgtcagaggaaacgatccatatctttatggagaaaaagtaaaagcttatttaagaaaaggcgcaaagcagcttgcgggatacgagcgatggccgaatgcgctgcttgggtatggagcgctgtgcgtgcgggatagcctgccgggattgggctcaagttaagtttcgttagtcaggcgctgtcctcgataactgatgatatataaaatattgcaaatatgacgatgaagtgcggaacattaatagaaaagagtaaaaagttctgatacaatgggaatgaaatattgcattgaatctgatctgtatgaaataaaaggaagtattaattgtaaaactccaagtgtgttaataacaaaagtgaagaataaggaagagtgatagacgatgaatgttatgccgataacggaattgattgataaagttacggaaatttgtaaagcaaatggtgtaaaaaggttggatctatttgggtcttttgcaacagggactgcaaccgatacaagtgacgttgattttgttgtatacagatgcaagttgacggattataaataaggagaagataaaagctgcatgaaaaagcgaaccgaagaaattttgaatcttttagatgaacaatatggacgggaatatatttgttatctgaattatgagacgccgtggcagctgctgatcgcaacgatgttgagcgctcagtgtacggatgccagagtgaatattgtgacgaaagatttgtttcaaaaatatacatctgtggacgcatttgccgacgcggacttaaaggagttggagcaggatatcaagccgacaggattttatcgcaataaagcgaagaacatcattgcctgtatgaaagatatcagggagaagtttggcggtgaagtgccgaggagtctggaagatctgacctctttagcaggcgtcggacggaagacggcgaatgtgatcagagggaacatctatcatgatgccagcgtagttgtggatacgcatgtgaaaaggatttctaacagactgggatttacaaaacaatctgatcccgaaaagatagaacaggatctgatgaaggaactgccaaaggatcattggatattgtataatattcagatcattacgtttggaagaagtatctgtacagcaagaaatcctaaatgcggggaatgcttcttaaagaaatattgcacagggagaaaatgacatgagatcactttttatttatttaaaaaattataagaaagagactatattggctccgctgtttaaaatgctggaggcatcttttgaacttcttgttcctcttgttatggctgcggtgatcgataaaggaattgctcaaaaagacagcccgtatattataagaatgtgtcttgttttgattgtattgggaatcgtcgggctgatatgttctcttacagctcaatatttttcggcaaaagcggcggctgggttcggaacaggactgcggcatgcgctgtttgaacatattcaacatttcggtttttcggaaatggatgaaatcggcagttctacgcttgtgacccgaatgacaagtgatgtaaatcaggcgcaggcaggagtgaaccttgtccttcgtctttttttacgttcgccttttattgtattcggcgcaatggcaatgtcttttatggtagatgtcaaagcggcaatggtttttgttgttgtaattcctcttttgtcggtagttgtatttgggatcatgctgattacaatgcctctttataagaaagtgcagtcatatttagatgaaattcttctaaaaacgagagaaaatcttatcggtgtaagagtgcttcgtgcttttaataaagaggaaaaagaaaaggctgaatttgaagaaaacaatcaaatgttgacaaaggaacaaaaatttgtcggaagtatctccgggcttatgaatccactgacgtatattatcgtgaacgtgggtattatagttcttatttatgtcggcgcggttcgtgtaaatatggggagtctgactcagggggaagtagtggctcttgtcaactatatgtcgcagattcttgtggagcttgtgaaactggcgaatctgatcattacggtgacgaaagcggctgcatgcggaaaacggatcgaagctgtgttggcaataaaaccggaaatgcagtcgggaagtttgttgtatacagaagaaaaaaggattcctgcggtggaattttccaatgtgtcattgacatataaaaatgcgggagcgccttcgttgagcaatatctcgtttcgggcaatgccgggagagacgatagggattatcggcggaacaggggctggaaaatcatcgatcgtaaacatgatccctcggttttatgacgcgtcggaaggagaagtgaaggttttcggacatgatgtaagagaatatgagattgaaagtttgcgcagtcatatcggcgtggttccccaaaaagcggtgctttttaaagggacggttgcggagaatcttcggtggggagatgaaaatgcatcggaacaaacactggaagaagcgcttgaaatttcacaggcgaaagagttcgttgattcaaagccgggaaagcttgaatttatgatagaacaaaacgggagaaatttgtccggcgggcagagacagcgtatgacgatcgcaagagcgcttgtaagaaaaccggatattcttatattggacgacagtgcgtcggcgcttgatttcgcgaccgacgcggctttgcgtgacgcgattaaaaacatgaaagaaaatccgacagtatttcttgtctctcagcgggcggcatcggtcagatatgcagatcggatcgttgtgctggaagatgggaaagctgtggcggtcggaacacatgaggagctgatgcaaaactgttcggattatcaggagatttattattcacaatttccggaggaggcggttttacatgcttaaaaaacaaacagtcaatgaagataaaatacagaagtcaaaagtgcaggcagagcagagtaagccgcagagcaaagatcggaaaatgagccggggagaaatattaaaaaaagtattcgggcatcttgggaagtatcgtatttttgttgttttttctgttttgctggcagcagtcagcgtcgcccttacgctctacattccgaaactgatcggttatgcggtagatgagatcataggaaaaggagcggtaaactttgccgggatattccgaattctgtttcagatcggaatatgtacgggtattacggcgctttcgcagtggctgatgaatgtgtgcaataataaaatgacttatcaggtcgtgcaggatgtgagaaacgaagcttttcggaagattcagatccttccgctgaaatacatcgacaatcatccatccggagaaatagtaagccgtgttattgcggatgtagatcagtttgcggacggacttttgatgggatttacccagttgtttacaggagctgcaacgattatcggcacgctgggatttatgttgtcggttgatgtaaatattacgtttgtcgtcgttttgatcactccgatttcattttttgtggcgaactttattgcccgcaaaacatttgcgatgtttcgtcttcagtctgaaatcagaggagaacagacaggtctgatcgacgaaatgatcggcaatcagaaagtagtacaggcgtttgggcaggaagaaaaagtgacggagcggtttgataagattaatgaaaaattaggaagcgcatatttgagagcgacatttttctcttccgttacaaatccggcgacccgttttataaacagtctcgtatatacgggagtcgggatcgcaggtgcgtttgcggtagtaaacggaacgctgacagtagggcagcttacaagttttttgagttatgcaaatcagtatacaaagccgtttaatgaaatatccggagttgtgacagagttccaaaacgcggttgtatgtgccggtcgtatttttgagttaatagaagaaattcctcagccggaagatgcaaaagatgcgtcggttctgactcatgtccggggacatgtactggcagagcatgttgatttttcgtatatgccacaacagaatctgatcacggattttaatttgaaagttatgccgggacaaaagatcgctgttgtaggaccgacgggatgcggaaaaacaacgctgatcaatctgcttatgcggttttatgatgtagacggcggctgtatttcagtagacggaaaggatgtgcgtgaggttacgagggaaagtctgcgctgtgcatatggcatggtgcttcaggaaacgtggctgaaaacgggaacgatccggggaaatattcttttaggaaggcccgacgcgtcagaagaggaaatgatagaagctgcaaaagcatcttatattcacaatgtaatcctgcgtctgccaaacggatatgacacgtgggtgacagaagacggaggcgggctgtcgcaaggacagaaacagcttttatgcatcgcgcgtgttatgctgtgcagaccgcctatgctgatcctcgatgaagcgacgtcatcgatcgacacaagaacagaagtaaagatacaggcggcttttacaaaattgatggaagggcggacgacgtttattgtggcgcatcgtctgtcaacgatccgcgaggcggacgtgattctcgttatgaaagacggaaaagttattgagcagggcaatcacgagagcttgatggctgcagacggattttacagacatttgtatgaatcgcagttccttaggggaaaagatgaggataaatgataaaaagtgaagaaaataaaaaagtctgaaaacggataaagatacaaatatagagaccgtattaaggaggatggctatgacaaaattaagtacattatgctatatagaaaaagacgataaatatttaatgcttcaccgtacggtgaaagaaaatgatgtgaataaagataaatggatcggtgtcggcggacattttgaatatggagaaagtcctgaagagtgcttgctaagagaagtgaaagaagaaacgggatatacgctgacttcgtgggcttaccggggaatcgtgacatttgtttacggtgaagatgttgtagaatacatgtcgctttatacggctgacgggtttgaaggagaaccgatcgactgtgatgagggcgagttggaatgggttgaaaaatcaaagatcgagacgctgaagttatgggagggagataagattttctttgatctgttggagagagactgcggcttcttttctctgaaacttgtttataatatagaagatattttaaaaagcgctgttcttgacgggaagccgcttcctcttaccgaggatggaaagtggattggaaaatgaaccggaaaacagactgaaaaatgaagtgaaagacagatagaaaaaagaagcaggcgtaagcggacgcggtatgaaaagtcatggattttgaaacagggcaatatccggctgaataaaggtaaatataaagaaaaggatggaatataatatagtcagtccatatatgaggaagcggaaacgtgcgatatttttctgctcatataatttggatgccattgaaaaagtgattccagtacaaaggtaaaaaatagcaatatcgatccagacaaccgtaaagccgagtatgcctgagtaagtataaaagaaaacagggataagtgtcgttcctgtcagaatgccggataaaagtggtaaagatacgtttggaacggcgtttttatatattagtttgaaaagaaagcagtagagcagagccggaaagaacaaaagtttcatatgttcccatgcagattcgctgattgggcagacaagacctataaaagttgaatcgccggaccattcatagaaaaagtgcgacagtgttccgagaacagacgtgaacagaaaaccggagataaagatgtatttaccggaaagtttataggaagcaagcataacaagtctcctttcataagcagaaaagtattttatatagtatatgcagaagttagaaaatcagccctcgaaaaactcgtcattatgcataaaaataaatgtattttatatggaaaatgatgaaaatacgacatatggagcgggggggggtaaaaataatgttgacacattgaacaaaagggtatatggttctgtatgagcatgtgggcaaaatgctaagaaaggaagggaaaatagttgtggaaaatgtcaaaaaactaatgcgaaaagcaatgggaattgttttaagtgttgtgcttacattagggtgtattctaggaagcggcacgatcgcatgggcagaaggtgagacggcagatgccgccgcgaagatcaaggtggcatgcgtgggagacagcctgacggaagggtacacttcgacgggcgcgaattcaggaaagaaaggaccaaatgcatatccggcacgtttgcagagtttacttggaagcggatatgaagtaaaaaactttggggaaacaggtgcgtttttgatggaggggacaagtaatccatataaaagcggtacagaatacgaacaaagtaaagcttataatgcagacattgtaattattatgcttggaacgaatgattccaaaaactggaacgaagaaaattataaaacacagatgacagcgttttataatgagtataagacggagaataacaaagttatttttgccacgtctccgaaatgttatcagacgacgggaaacgatatcactcaggaaaaggtcgaaaaagtctatcaggctcagaaggcattgattaaagaaaatgccgcatgggatttcattgatatgtatgaaaagaccgaaggaaaagaaaatctttataatacagataaagtacattttacagatgcaggatatctgtacatagcagaatgcatgtatgaaaagattacaggaaaaaaagctccgattgaagaaaaggtgaaaattccgcatacacagcagagcggagaaacaaactacttcacattcgcagaaggaaaatgggaggcaggagatgcgcagcatacatggtcaaaaaaagtagatccggcgcatcctgaagcaacctattatgaagtgaaatttacaggacataagatcgatatctattccggtaaaaacagaatgatgggaaaagtgaagtatctgatcgacggtgaggaaaaagcagagggagacctttataatgctactaatatcaattctacattcattacaacgatttccgatttagaagaaaaagaacacacattaaaagcggtggctacaggggaaagaaatgcatcaggaacaggttcggacattctgatcgatgccgctgaggtgtatgtatatacttacagagaaccggaagaagcaaaacttcacggaacaattacagataataatcttcagtatacccaggataaattaactgaggtaaaagcagcaaacaaaacagaagatactttgaatgcatggaagaatgatacggttacttctgagatttctttagcttcgatagattcttcttatacagatgtaacagcgacggcaagtgatttcaccggaaacggcaatacgattccgaaagcaaatgtggatttaaaatttattaaatcagttcaggcttatacaggaatgccgggatacggtgatcctgacagagaagttccgaaaggaagcagacaggaagcaaatgaagtgctttatcaggatgccggaacagcgatgaatattggaacgaacaaacttcagaatatctgggtatctgtgaaagttccggcaggaacagcggcaggtagttatacaggaacggttacggtaacggcaaaagaattagcagaaccacttacatttacttatacgttaaaagttgctgatgcagaacttccggatgcgacgaagtttaaagatggttttgatatggaattgtggcagaacccgtatcgtatcgcagaatattatgatgtaacgccgttttctgaagagcattttgaaattttaaaatcccacatgggattatataaaaatgccggcggacatgccattacaactacaatcgtagaagaggcgtgggcaggccagacatacggggaaggaactgttaaattcccttctatggttaaatggacaaagaaagcggatggaaaatggagttttgattatacggattttgataaatgggtaacgtttaacaaagacgttatgaaaatcggggacaagatcgtatgttacagtattgcgccttggacaaactcagttgtttattatgatgaagcgacaaagacaacagtaaaaaaacgattgactccgggttcagaagaatggacaacgatatggacggcatttctgaatgatcttgcagaccatttatatgaaaaaggctggtttaacgacgcttatatcggtatcgatgaaagaggatttaataaggcggcgtttgatttgatcgattcaattaaacgcggcattccgacacctttgaaattaaagagtgcgggagcgatggatggatttgttgagaaaaaagatcttgcaatgcgcgtagacgacctgaatgtaggttctatcgcggtaaaggcccatcctcagcagtttgaagaaataagacaggctcgtgaagatgcgggacttcgtacaactatttatacatgtacaggtcataaaccgggtaacttttcattaagtgcgccgggagaaagctactggacaatgatgtattcttattccgtaggcggagaaggatatcttcgctgggcatatgactcatgggttgagaatccattggaagatacgactcacaatgcatttgaagccggggattgtttccttgtattcccggatgattctgaagcaaaagttacaaaatcaagtacacgttttgaaaaaatggcagaaggtgtacgcgatgtaaataaacttattaaaatgaaatcagatgttccgagcatggcggcaaaagtggatgctttgatggattctgtaaaaccgacttatgcatcaagcgcgtattatctgacagatgcgggaaaacaagaacttgcgtcggatatgaatacgatcaaaacaaaaattgccgagctgacagaagaatatgtcgcattaaagaaagcgggagtgaccgaggttgactcagtatcgatcaacggagagaaagaggttgaattacagcagggaggtacaactcagcttgaagttacagtccttccggaaaatgtattgaataacacagtcacatggtcgaccgataatccggcagttgcagttgtgaaagacggagcggtaactgcgaagggatcaggccgcgctgttattacggtgacatctaaccaaaatgaagaaaagaaagattctgttacgatcgttgtaaaagaagctgaggttgaagaaggagcgcaggtttcttactattcatttgacgatgtgaaaggacagaagttagaggatgaatggggaaaacgtgacggtactcttgatgcttcctgcacaaccgaagccggcaaatcaggaaaagcgctgaacgtaacacaagacggaaaaggtgcagtgattacgcagacggcaggcgatctgaatgacaaagactggacgatttcgtattgggtaaagactacgtcagaatttaataaagagatttctgtattggaagattccacaaaagcattttccttctcattgaagatggcggcagacagagtatccggattccgtgtaggaaataatggcggagacgtcttgtcgtatcagtatgatttcgagaaagacaagtggtatcatattacatgggtgcaggataaagatcagggtcttgccatgtatgtaaacggtacaagagtcggtgatatcaatgcatggacaaaaaataatcctattaaaacacctgcggatgtgatcggcggtactggatttacaggtctgatcgatgaagtgaaagtttataaccgtgtattgaatgaaagtgaaatactttccgcaatgaaagtaaaaggattaaacattgcggatacgaatccaacggtaaatatcggagaaacgtatcagattacaacaaacttgataacagacgccgaagataagacgattacatatgtctcaaacaagccggaaattgcaagtgtaaatgaggacggtttagtaacggcgaacaagaaaggaaaagcggtcattactgtaacaggcggcggatatacggaaaaagttacagtaaactgtaagaaagtattgtatgcaaattcaaggattccacagtatgaattggcggataaatatctgaaagatattgaaaaagctccgaatacacctagacagtatcttggacagccggacatggttcagacaaagacaggcagactgattactgcttatccgacaggacacggtcatggaccgattattatgcagattagtgatgatgaaggcgagacttggacggagaagaaagatattccggcatcgtttgcaacttgtcaggaaacacctaccttatatacattggatatgggtaatggaaaagaaagaattatgctgatttcagcatgtccgaactgggatttacaaagaggcggatgggatactgcctactctgatgatgacggagaaacttggacagaatataagaatcactggccttcttttgacggagcagagaaaaaacatacaatcgtagcaatggcaagtcttgtgcagttaaaagatgaacagggaaattacattcagaaatggatgggtgttttccatgattatggttatgtcaacttcaagagctatctgacatttgatgaagacggaaatgaacagtggagcgagccggaaagatatttagctgattatagaagtatcgaaagcaaatatggaatctgtgaagtcggaatgttccgctcaccggatggaaaacggatcatggcgctggcaagaagtgataaaaaaccaaacttatccgtgatgttctattctgatgatgaaggaaaaacatggagtaaaccggaagaaatgcaaggttcgcttgcaggggaaagacataaagctgtatatgatccgatcagcggacgtcttttgatcacattccgtgagatcgtatacaaagacggtaagcttgataacaactggatggcaggcgactgggttgcatgggttggaacatatgaagacctgttagagcaaaacgaaggtgaataccgtatactgatcgaagaagactgggcaatgaatgcaaaatccggtgatacgggatatgcgggaattttagttctggatgatggaacatttatcatggattcttacggacactttgacgaagagttttctaagaatgcatttgaatcaggtaattataatgtaagaacagatttatgttatatcaaacaggcaaaattcaaacttggtgaaatcgagaatgaaaacggtctgattgacagaagcgccctggaagcaaaaatcaatgaagtaaaagatacgtcggcagaagggtacacagacacttcttatgcggcatttgcaaaagcgctgacggatgcacagacagtatttgcagattcttccgcacagcagattcagattgatgaagcgctgaaagtattaacttcagcatttgaaggtttggaagaaagaccggtagaaccggagaaaccgacggtagaaaaagttgaaattaaagcaaatcctgctaagacagagtacaaagaaggggagaaattcgacccggcaggacttgtgcttacagtgaaatataacaaaggcgaggacaaagaagtagcttacagtgatgcaacaaaggcagacttcgcatttaatccgtcacttgatacagcgcttacagaaggtgtgagcaaagttgatgtaacatatgcgggcaagacggtagaaatcggtattgaagtgaaagctgacacaccggtagagccggaaaaaccgacggtagacaaaattgccgttaaaaaagtgccagctaagacaacttacaaagtaggggagaaattcgacccggcaggacttgtgcttacagtgaaatataacaaaggcgaggacaaagaagtagcttacagtgatgcaacaaaggcagacttcgc

SEQ ID NO: 7647 - DNA, 1727 bp, Unknown
  gut microbiota DNA sequence
gccggtagagccggagacgccaacggtagacaaagttgaaattaaagcaaatcctgctaagacagagtacaaagaaggggagaaattcgatccgaaaggacttgtgcttacagtaacgatgtcagacggaacaacaaaagttgttgcatacggaccggagacggcaaaagatttctcctttaatccgagtcttaatacaaaactgacagcggatacgaagaaagtaacagtaacatacggcggacagtcggcagacgtagccgtatcggtgaaagcagatccgtcagaggataagaagccggtagatccggataagaaaccgaatacagagaaaccggacaaaggcggagcggttcagacaggagataattttaacgtaacgctgctgatcggacttgtagttcttgcaggcgtgactgcaggcggaacggctctgacaattttcaaaaggaacaaaagaaaataagcttcatccgtaaacagtacggaaaaatacagggttgtcacttagtggcggccctgtttgtatatggatttttatgagatcggtttttcgtacatttttaggggagtttctcgattgaaataacggaaaatatgtgaatttctgacaatgctctttcataaattgatgtaacttctcaaagccttgtatttactggtgttctgcaagattttgaaaaacggtaaagtggtgtattgtatcataaagtggtgtggtttgatatgaaaatggtgtactaaatggtgtagtaaatcggaaagaattattaaatttgatagcaaaattgtaagagcgtcagatttgacatttgaataggtatttgtttaaattatatatgtgtttttgactatctttttatatcttcttaaatgtccgcaaagccttattttatcggctctacgggcattttgcttttgtggtaaacctcacatatctaggtctatcttcttatattttctctatcaaacgtggttaaaatcgtggtaaatacttctatgcaattagacgctgaacctctgattttgcggtatctatggacgcatgagcgtaccaattcattgtgatactaatgtttgaatgccccatgatatactgtaaatcttttgggttcatgttcttgcttgccagccttgtgcagaacgtatggcgtagcgtatgcggtgtgatatgtggcaagggattgtctttgtggtgcttgttgtatttctttaccatacggacaaataaggcgttgtaatcaatcgcaacttttggcttgtccttatgattgacaaataggaaattgccccgtccgtctatcacaaatggttctgcctttgggcgtttcttcataacccgttgaaatgcctgtatcgtttctctgcttaatggtacttgccttattccgcttttcgtcttaggcgtttcaatataatagccttgttccttgctctttagtaactggtggtcgataatcacaacttcattcttgaaatcaatatcggctactgtcagtccgcacagttccgagatacgaagtcctgtttttaacagtatcagcacatcatcataatacttgtgatacacattgtccgtcttgatgaatgagagtaaggcttgttcctgttcctctgtcaatgcaactttctctttggtatcattttctaggacttcacttaacttgaaatcaaagggatttttccttacgcaatcgtcttgtatggcgatatagaatgacgctttt

SEQ ID NO: 7648 - DNA, 43216 bp, Unknown
  gut microbiota DNA sequence
ctgtttcttaatatctttttgtttgggaaacaccccattcccacttgctagtatctaccaacaaatcgccttgttggaacggtgatataataactttgttagttccatccgtatgtaatgcgttagatacatctacagaaatattgttagctccagcgccagatctttttatcatataaaatttttgacgaaatggaaatgcattctgtgtattagtggaagaataataagattcgtaatagtctaattctatgtccactacattccatccattatcgggtattgcaaaaacatgttgatcttgaactacgcttcctttttgcaatgactgacgtttggtttgagtttctaagtgcgttgcatggcttgtgatgagtggagagtaaattaacatagcaaataaaattggaattaatgtagtttttttaaaaaaatttttcatatctgttcccttcctcgtacatcaaatatttaaaagtagtgaatttaatgaaaactaaaagtaaagttttcattggcataactctttatagaattcttttttaattctaataggttgctttgtttatagttttttaatttctctaaatatgcccaaaacttttcgtcagttacatcataaacttttgcgattgctttttgataagtatcatcacgttccgatatatatgtgattgactttgtgttgctgtcaatttatttgagagtttgaatagatgatattttttctccttaattataacactatttttactcttttttttgaaatgtaacaaaatgcataggttatggtaataacttacatgttttagatgtttgtcatcgcttttcttttggtcaaggagtctttatagtattatataaaaaatctccattcttacttgaaggatggagatttttaaaagtaattaaatggcagtgtatacaatttctccgccgcatacagtcattttcactttcccgtacaattcccagccgataaacggtgaatttgacgacatggaagcgaagaattcaggaatccattttgcttcgggatcgaagatcacgaggtcggcaggagcgcccttttcgatttttccgccgtctaaatgatacagtctggcgggattgatcgtcattttttcgagaagctgcataagtgacagatgccctttgcgtacaagagaagtgatcccgagcgccagtgatgtttccaaaccgatgattccgcttggagcggcagtgatggagcgttctttttcttctttgctgtgcggggcatggtctgttgcgataatatcgatcgttccgtcggcgagtccggcgatgattgcctgacggtcagcttcggagcgaagcggcgggttcatctttgcaagtgttccatatgtcagaacagcctcgtctgtcagtgtgaaatggtgcggcgttgcttccgtgtgaatatttgcgccgagtgatttaaagtggcggataatgtctacggaacgtcccgagctgatatgctgcataacaacgtcggcgcctgaatgcagcgcgatcatgcagtctcttgcgacgagggattcttcggcgatagagggagaaccgtaaatgccgagctgttcagacaccgcgccgtggttgacgccgttgtttttaataaatgacggatcttcttcatgaaggctgatcggtacgtttagctgtttggatttttccattgcctcgtataaaaacgcggcgtttttcaacggaatgccatcgtcggtaaatccgcatgctccggcagttttcaacgcttccatgtcggtcatttcttcgccgcgcagtttatgagagacggaagcggcctgatagacgtgtattttttcgtctttcgctctttctaaaatatctgttaaagtttctgtattgtctacgaccggagacgtatttgccatacagatgacagaagtaaatcctcctgcggcggcggcctgtgaacctgtgtggatattttctttgtaagtaaatccggggtcacggaaatggatatgcgtatcgataagtcccggcgcgacagtcagaccggcggcatctgttacctgctcgtttggggcaggtgaaagagtgtttccgatttctgtaatgatcccgtttttgattcggatatcgtaatttccagattttttagtggcagggtctataagaaaaccgtttttaataagcatgaaaaaacctccttgaatataagattgctgtaataattattatgcgaaacaaagacgcgtaacggaaataaatggattcatatgtaatcatatataagtgaaaaacgcatctgtatataggtaaagtataaaggaagaataagaaagagacaagagaataaaaaggagcagtgttataaaaccggatataaaaaactgccgcatcctgatcgtgaacatatcatagatatcaggagcggcagtatgtgaattaatttttgcggtagaggtgacgcgggataccgtcaaccattaccggagatacatcaccttgaatgagcgggcgtacatatgaaacaaaatcgtcggttacataagatccgtcttctgtaacccattcgcgcggaacgactttttcgtcgtttgcaatcttatgcacatcttttacttctgttccgcattgatacggatcgtcggaaagacgctggagaacgaccatcttgccggaatctccttcatccgcagcttttactgccgcgccgcctacctgataagcttcgagaatatcgactctggaagcgcagtgggaagcggagcgctgcaacgtgctcaattcgatcgcacgggttttgcagccgaattctccggcgatatagcttgcgagatagttcgcagttcccgaaagctgtttgtgaccgaacgcatcgacaaaatcaacgctttgtccgagttcgcatacatatcttccgtcggcgagacggattccctccgaaacggcgacaacaaccgacggttttttcgccagaagatcttttactttttcgctgaaagcttcgatatcaaaaggaagttcaggcagatagataagatctggtcccaaacagtcctcgccctttgcaagagctgccgctccggtcagccatccggcgtttcttcccatgatctcaacgatagaaacaagcccttttccatattcaaggcagaagctgtcgcggatgatttcttttacagatgttccgatatattttgcggcgcttccgtatcccggagtgtggtctgtaagagcaagatcgttgtcgatcgtcttagggcatccgataaatcgggtgcggtaacctgttacaatggcgtaatcagaaagttttttgatcgtatccattgagtcgtttccgccgatgtaaataaaggcttcaatgtcaagcttttcgagaattgaaaagattttttcgtatacgtctttattctcgtggatctcaggcagtttatagcggcatgatccgaggaaagccgcaggggttcttttcaaaagttctgtatcaagatcgttcgtaatgtactcggacaaatcaatgtaacgctcttgaaggagtccctgaatgccgaaaagcataccgtatactttgtttgcgcctctgtctttggcagtgcggtatactcccgcgagacttgagttgattgccgctgtcggaccaccggattgtccgacaattacatttcctttcatgatgaagtacctccgttctgtatgtttgcccgcaggttgttgctgcggacggatatacaattattttagtgcataatgactaatttgtaaacaaaaaaatcaaaaacataggcaaaataacgaaaatgacaaaaagtgatacataataagaaaaattgcggaaaagatgttatgctgttaaaatacaggataaatcagcgctgatattttgcggcgcggaaagagaggcttggtatgaaaaaatatgattatctgatcgtcggtgcgggattatacggcgcagttatggcatatgagcttggaaaaaagggaaagtcatgtcttgtgatcgataaacgagatcacattgccggaaatatttactgtgaagatgtagaagggattcatgtgcataagtacggagcgcatattttccatacgtctgataaaaaaatatgggattatataaatcaatttgcggagtttaatcactatattaattctccggtagcagtttataaagacgagttgtataatctgccgtttaatatgaacacattcagcaggatgtggggaataaaaacaccggaagaggcaaagaagatcatcgaaagacaacgaaaagagtcggggataacagaaccgaaaaaccttgaggagcaggcgcttttcctcggtgggaaggatatttacgaaaaactgatcaagggatatacagagaagcagtggggaagaaaatgtacggaacttccggcatttatcattaagaggcttccgtttcgttttgtgtatgacaacaattatttcaacgacagatatcagggaatcccgatcggcggctatactccgatcgtggaaaaaatgcttgaaaaagcggatgttcttacgggaacagacttttttgaatttcgtgctcagaatgcggatattgcagacaagatcatatttacggggatgatcgatgaatattttggttacagactcggagcgcttgagtatcgttcggtgagatttgagacggagacacttgactgtgacaattatcaggggaatgcggttgtcaattataccgatggtgaagtgccttatacacgtgtgatcgaacataagcattttgagttcggaaagcaggagaaaactgtgatttcacgagaatactcctcggagtgggcagttggaatggagccttattatccggtcaacgacgaaaaaaacaacgctttatatgaacagtataaaaaactggcggacgaagaggaaaacgtgattttcggcggaagactcgggaattataaatactatgatatggataaagtgatcgcagcggctcttgaacagcttgaccggattgtgtagacgtaagaaagagacaaaagaaaaaggcaaaaaagcaaaagaaaaaagataatgcagacacttgcttttctgtataaattcaagtaagatacaaatacttattaaatgagtctgattcaagacacatcttttacggcagttgtttcgccggatttcgccaagaataataagctcattcgggaacggggcaggagggacgccccgcttccggttatgtgcacccgatgaaaaagtgaatatggaaaaaatgaatgcagtgaacttggaaaaaatgtatgaagtattgaaatttgtcgaatacggaggttactgccgcagaagcatggattgtgtacatggtatgctgcttatcgatcgtatgaagaatgaagcggtcgtcgataaagcagttttatttggatggttccgaaaaatggcagtctgtgcagagcagtatgagcgatgcggtgaaggacagaattataagtatttgaatccgtatggaattgtgttgtctgatgaaggagaagtgttgtttctggatacagaatcgagagaaaatgccgaggtgatgaagcagatgcagaaaagagctgtcagaagtcattttatcagaccggtatacgaaatggatacttgcggcagcagagagcctgatctgtttggatacgggaatacgcttcgttttatgctggcatatatgaaagtagttccggcgctgacaaaacgggaagaaatccgtctttttcgtatatgtgggaaatgcatcggagagacaagaaaaaaatacagctcgtttctgcaagttttaaaagaacttcctacagtgaggaacaaaacagaaaagacagacaaaaagcgtgtcggagtatggtcgggaatcgcggcaggtgcggcgggatgtattttggcggcggtttatatgggagacgctcacacagatctggctgtatcgaacggagaaaagattacaggggaggatataaaaacagatacgggaacagatatagaaacaatagaaacagatgtagaaacgacaaaaacaggctcagaaacgacagaactaggtgtggaaatgacagaaacagatatgggcaaagataaaagagcaaacagagaagcggaggtgcggtcagatagagacggagatacagaaaacgaggaaagaaaaaaagatacggcagatgcggatgaagtgaagaaaaatgtgacagacgagagtggaaaaacagatgccgctgcggaatggatggaattgtatttggatcaacatacggatagtggaaatcaaaaggcgatagagataggggaaaaagcgagattgtccgttttgtggaaactggccgatgcttatgagcggtcgggaatgaagacggagcagattcaaacatacggtcaactgatcgaatgggagcaagatccgatacaattagaagaggccggcgtaagaaaaatgaagctggaagcagcgcagggcgattataaacaagcggcggagaccgggaagaaagttttggaacggattgaggcgtcggaaaaaatcacaaagatgcttaaagggtatgagttatataaaggcgaagaaggagaatcgtaagcgtcagagtgaaaatacgaaatatggagaaaaatagttctgaaaagggaggatgccgggtaatcaatatgattcccggcatgtattatgaaaaagtttatgcaaaaacaacttgtaatcacctttaattcggtaagcttagtatatgcgatataaatgaagaaaacgtgaggagaaaatgaaagaatttaaaataataaatgaacaaaatatgaacatcccgctttaagaagagaaaagaaagtaaaagaccgatgggggagccatcggtcttttgaggggagtataaataattaataaggggttgtagaaaataacctttctacaagaaacagtataatataggaaaatggaaaaagcaagcaaaaaattaagaaattgaacaaaaatatttgaaaaatttaataaaatacaaagaaaaacacaaataaaaagaggaataaaaaaataataaggagaaatactagttttgaatcaaaaaaacaggaggaaaatacaatggcaaaaaactacagtaatgcaaacaattcagacaaaaacgcacagtcaaaaaacggagctttctcttcttattcagagtcacagaacagcagcaaaaattgcgataagaacacaacaaaaaatgcaagcagaaatgcaagtaaaaacgcaaacaaaaatgcagataaaaacagcgcaaagtctgctatgagctacggcggaaataaaaactgtggtaagatcagagacgcgtttgacgaatctgacaaatactaaagattaggtgaaaaacatctcgtatttacagaatacgatgtgaaatgttttattcggtaaaataatagtaaaacaatggcagggcggagtaaacttcaactttactctgccctgtttttatagtaatattgtaggaagaaaaaggtaaggacggataagttcatggataaaatagaatggatagccccttgtcactttggtttggaatcggtactcaaacgagaggttgaacaactcggatacgagatcgtacaggtggaagacggcagggttacttttcgcggaggcgcggaggctgtttgcagggcaaacatatttttgcggactgcggagcgtgtattgatgaaagtcggcagttttcaggcaaagacatttgacgagctgtttgagaaaacgaaggagctgccgtgggaaaattacataccgaaagacggaaagttctgggtggcaaaagcggcatcggtaaaaagcaagctgtttagtccatctgatattcagtcgatcatgaagaaggctatggtggaaagactgcggggcaaatacgggatcaagtggtttgaagaaacaggcgcgtcttacccggtgcgcgtgtttcttatgaaagacacggtgacggtagggcttgatacgaccggagtatcgcttcataagagaggatatcgcccggtggcgggaaaagcgccgatcgcagagaatctggcagcggcgcttattatgctcactccgtggaaaaaagaccggattctcgtagatccgttttgcggaagcggtacgtttccgatcgaggcggcgatgatcgcagccaacattgctccgggaatgaaccgatcgtttacggctgagacatggacaaatatcattgcgaaaaagtcatggtatgaagcaatcgatgaggcgacggatatgatagacgacgatatagagactgatatccaaggatatgacgcagatgcatctgtccttcgtgcggctcgcagaaatgcagaggaagcaggggttggtcatctgattcattttcagcaaagggaagtaaaggatctcagtcatccgaaaaagtatggatttattattacgaatccgccgtacggcgaacgtcttgaggaaaaagaagctcttccgaaattatataaagaattcggagacgcctttaaaaatctggatagttggtcggcgtatatgattacaagctatgaggaagcggaacggtatttcggacggaaggcagataaaaaccggaaaatctacaacgggatgctgcggacttatttctatcaatttcaaggtccaagaccgccgcggaaaacggtaagagagcaggggatggcattatgaaaagaagaattgtatttgcaacgggaaatgaaaataaaatgaaagagatacgaatgatcctttcagatctgaatacggagatcgtttcgatgaaagaagcgggagtggatatcgatattgtggaagacggaatgtcttttgaagaaaatgcagagattaaggcgagatcggtagcgagaattcttacaaacgatattgttcttgcggatgactccgggctggaaatcgattatctcgataaagctccgggaatttattctgcaagatttgcaggggaagacacatcctatgatattaaaaaccgtatttttctggatcgtctggaaggggttccggatgaagagcgtactgcgagattcgtatgtgcggtagcggctgtatttcctgacggaagcgtagacgtagtaagggagacgatcgagggaaggattgcgcatgagtcggcgggaacgcacggctttggttatgatccgatcttttatcttcctgaatatggctgtacaacggcgcagcttagcccggaacaaaaaaatgaagtaagtcaccgaggcaaagcgctctgtgcgataaaacgcaaattaaaagggaaaatcggagatgatttattatgaaagtactgatagtcagcgatacacacggcagacatacaggattagaccgtgttcttgaaaaagaaggaaagatcgatctttttattcatttaggtgatatagaaggcggagaaagctatattaattcggttgtggaatgtgagaagcatatggtaagaggaaacaatgattttttctcggatttgccgcgggaagaggaaatcgatataggtgggtataaagcctttattactcacggacatccgtattatgtgtctttggattcagagtatataagagaggaaggcgcagctcgaaaagtcgatatcgtgatgtttggtcatacacataagccgtattttgaacagaaggatggaatcactgtgctgaatccgggcagtttggcatatccgaggcaggaaggcagaaagggaagctatatgattatggagattgatcaggagggaaaggctcatttcaatcagaaatacttggattgacggaatgtccggcagagtaaaagacgggaaattgcgtgtaaaaacaggatgaaataaaaagtcattaaaaaaataaaaaaatgcaaaaaaaatattgacaatctaaaaaccttataatataataggcattgcgctacgggagagacaggaacgtaggaaatgccggggtgtggctcagcttggctagagcgcctggtttgggaccaggaggtcgcaggttcgaatcctgtcaccccgataaactctgcgggtgtagttcaatggtagaacaccagccttccaagctggatacgtgggttcgattcccatcacccgcttttccgtagaaatacggagagccttttgaaaaggggatattaaaatgagtctgtagctcagctggatagagcaacggccttctaagccgtaggtcgagggttcgaatccccccaggctcgttatggtgggtatggtgcagttggttagcgcgccagattgtggttctggatatcgtgggttcgagtcccactacccacccttttcttttataattcaaactggcatgcagtgtcagaaataaagtctttaatgggctatcgccaagcggtaaggcacaggactttgactcctgcattcgctggttcgaatccagctagcccagttatctcgggaagctgagaagaaatagtgagggcgtgtagctcagttggtagagcacttgacttttaatcaagttgtccggggttcgaatccccgcacgctcactgtgaaacaagcgaatatgcttgttttattttttgtataggcgacgtgctaaagtccggggatgcccggaaatttggaggttgcttacaaagtcccgagatatgccttttggcgttttcggtgatcgaaatataacatgcggatgtggcggaactggcagacgcgctagacttaggatctagtgggagaccgtgcaggttcgattcctgtcatccgcactacaaaagccgtaacctttgagtaatcagaggtcacggcttttttgttacggtaatgagccaaaatccggatttatccgagatcttgacggataagatgttttatccgagttttcgttttttgtgcattatataaagcaatcctatgatgctgcacattgtggcaagaggaagcaaaagaggtgtgctgtctcctgtttttacactggtatccgcatgtgaagtgtttgtatttccctgatttccgctattgggattttgtgggttttgcggctcgagtggttcttgtgggtctttatttccgccctcatcaggatcatctttgtatgcgaattcaaatgtatttaattgattcagtatatcggatacttccgcaggcgttgcgtttggatcggttaagatcgcatttgcaagctctcgaagtctggtgaaatcattccaggaagcatctgttgcgttgccttgagtcatatcttttattttgttatatttttcctgaagcaaagttttatctgcgcgtagatccttcatacgctgtattaaaacggcggttttttcatcgacttctttttgggtatatgtgccgtttaataaagcttctgcctctaaaatgctttgtgttaatgcttcaaaactttcttccgtatatccttcccgggaaatggattttgcggcttttaacgcgtcgtttaatgcggacgtatcaacttttatctcctgaagactatttcttgcattccgaacttcatttgccttatcattcatttcggaagtacacgtttcttcatcctttttgtttaggagttctctggcgctgttgactgccttttgtaatttgttccagctttcttctgtgtatttgtctttattcagcccgtcgcagatcgtcagttcttcttccaattggcttcggtctacgatttctttcttttctgtacggatcttcagtgttccgacttcgacccatcctcttttttccggtgatccgtttggactttttccgacacgttcaaattgaattgtgtagctgccctccggaaagtctttctgtatcagttcggcgccctctatgcgtttttcggcatatgtatcaatttcttctcggcagatctgtttctcgttttgatctaggatcgtcacccggataacgccgtgatcatctcctttgaccgtggaaacttgtatcgaatttccgttgaatttataagtcagaggccccgcatcatctgcttctgttgctttgaaatctcctgcctggatccactttccggaaccttgcagatctcctgccgggatggatgtttcggaaaaaccgccttgttcgagactgtttaatgctgcctgtagtttttctgtcatttgatcgacggctggttgttttacgttttcgtcatcggctgttttcttagcgtctgagagaacttttttcagttggtataaagaatcgtttgtatagtttccgtttagttcctgttctgcttttgtgatcagcgagtttaattttgacttatctgtcgttccgaatccgagacggtgatatctgtcagataaaaattcggtacgggaatcaataatatcctgcgatgctttcagttgttctttcccgtctgaaatactttcttcaaacgcggtttttaatgtttgcggcgcgtttacataatggtcggcagttctgtcggcttcttctgccgaacgtatcattttttctaattctgacgtatctccggcgccgtctgcctgtacgcctgtgtaaagaggcgctatttcatatagagacggttcgcctaagaatcccggttttaatattacctttacggattctgtcgttgtttcgggaaattcggcgaagtaataagcgtgatatccgccgcttccgccgtcgatatcgccgactttgtcgtcgatatttcccatttttgttccttcatacacagttcgatatgttccgtcagaaagcgcctgaatttcaaaagcgccgattccgttatttttggatacgaacagatcgaaattcatttgatcgagcgtttctttttcggagaaattcaatgtgatttccaacggtttagaagcgtctacgtttttggatgcccaccgtgtcgaagtgttttgatcgatcataccggcttttacatagttattgccccagtcctctgtatgagatacggttacgtcttggatctttatgctttttgctatgtatttctttgtgtatacagggctgactctctgttcgttataaaacagcgccgctctgacaacggtattttctttattgtctaattgcagagggtgttcataccggtcagatgtatgtctcggaatacttccgtctgttgtataacggatctcaaagtctttggcgtctgaactcttactcaaagtaagtgtccggtcgtttcctgtgatgacaccggaatctttgctgaatgaaatgatccggtttgccatcggtttttctaattgtgcgctaagatctgtaaattggttctcggcgttttgataatcctctaaatctccggtgttttccaacagagtcttgcgcagtttgcgaagctgattgtaaagcgtgtcgatctgtgaataggttaagttatctttgtcggtcagataatatatgttttctgccttattcagataggagcgatataactgatccattagtttgacttttgtcagaactgtacctaattcttttgaagaaagatcgattgctgtctgcagttcgtttttggcattgatgagatcagggtgaagctgatttaaaaatgtagacgcctgctcttttagttcgtttatatttgtttcggatatatcgatcgtatatgtcttgccggcgtctgcctcaaaggaaatacgatctttatcggtatcttttgtcacctgaacttctttgccgtcttcgtagatctttgcagaagtaatatttttatatgatcctgtgaaaacagcgctgtctttattgccgtcataacgtacggtaaaggcttccgcaatgccgttcgcccatttttcgccgatcgtgaagttacctctggcctttagacctctgacctctcctttttcccatgcgtctggaattgcggggaggaattgtgtgtagcctgactgcgattgaacaagcatttctgctacgccggaagtaagaccgaaattgccgtcgatctgccataccggagttccgttcatcattgtgtctcctccgccggatccgtgagaatcgaagagattatgctggagaccggaagaatttcctccgatcagattgttcaaaagcttatatgccttttctccgttttcggctctcgcccagagattgatcttgtttgctttcgaccagcctgtagaatattctcctcgttcggtcaatgattgaatagcggcgttcatgtaagtcggattctctttgttgatcaatgttccgggaaagagtccgaccagatgggaggcgtgtctttgctctccgttatgtccgatattccatccgctgttaggtactgcgatctctgccagatctcctgcttttgcataagatttgttatgtccggtttcctgacctacacgggtttcttcgtaccattctttaattccgtttgtagcgttgatttcaatcggatcaagtttttgcatcttttcttcccaagattgcagaacagcttcatcttctccgacgattttgcctgcctggatacattcgttatataattcccatataagagattggtcgtaagttgttccgattgcggtcggtccttgttcctctgaaaaactaggcgctgctacaagtctgttttcaccgtgataaggcgaagtttcgtcgttgattttctggtattctgacgtccagagataagagtcccaaaattgtgccgcctctttcatgatcggataaatagtattttttaaatatgcttcatcctgcgtaaactcgtaatgccaccaaaggttttggacagcccatgccgctcctgtcggattccagccgtattcctgcgcgttagtaggagcggtcatgccgaaaggattgttttccgtatgtacggtaaatccggtgtggttatcgacagcccctttaataccgtgaactctttctgccgtcaggcgtcccggttctcttaatttatccatgtaatctacaaaagttgttccgcattcggcaaggttcgttgaatataccggccaatagttcatctgtacattgacgttaaaatgataatctcccgtccacgcggaaggacctactgtccataagccgacaaggttgcttgggagcgtacctctggaaccggctattgtcagataacgtccgtattggaatgcaagagtttccaggtagtgcgagtagctgccgtttcgatattcgtctatcaactgatctgtcggaacggatgtctgaaactctcctaagtctaaacttactctgtcgaaaagactttggtggtcttctatatgcgtctgctttaattcatcgtaagattttttcgagctgtcattgatccgggtgtcgataacattcgacagatttttctctttgtcccggtaagtaggataatcgtttttgtaatctgtctcggcagccattatgattgtgacctgatctgcatttttaatccggtaaacctgatttttttcatctgccgttatctcgccgccggttagaaggagtttcatagttgtacggaattttaaatcattatcttttacttttccttcgatagtgcaagtttgattccggacatcgaatgtaagctttccttctaagttatcgttgtttagttccatttttgcgctgaaattaagttttcctttttcagaagcggagaggtttgttaccattacctgatccggactgcttacaaaatgctctcttttgtaagaaacatttttataagaaaattctgttgatgcaattccggtttgtaaattcagttctctccgataattctgcacattatcgtcagtgattcccattgcggaaaaatcaagccaaatatcgccgaaatcttgataactgcctttgtttagattgtcttcgcccggaaatctgatttttgcccccataccgtaaccgccgagactttggtcatcgttaaatacattagaagatttgtcatcaagcagttttcgataattttcaatctctgtggcagtatatgccgttgctttatttccgaactggtagttgggacggctcgatgaaggaccgcctgtccaaagtgttttttcgttgaaatggattctttcttttgagattccgccgaaaatcaaatttcccagattcccgtttccgagaggcagagattgctgcatccattcgccgccgctggattcggcagtattaattttggcaggagaaccgtaccatagttttaatgtctgatttaccgctttttctacggatatcgggaagttttgttccggctcttcggcaagaacagtttgcgcggaaccgatgggaagtatgagaaccgcacacatccccgcaagcaattttttcattcttgttttcatcattgtctcctctaatttctgtagattcataaataagtataaaattctattatgaatatatcgtttggagaggagattgtcaatttaaaacaggatattaaaagctgttttttaacacattccggattgaaatggacaattaacaaaaaattctgaaaattcaaaaactgagtttgtggtcattgtttttttgagcattgataaatcgagttataactgtggaaaccggtgtcggtctgcagaatttatttttgctctttgttgacaaacatcatgaaaaatgcaataaacaaaagcgctgaacatacgaggatcgatttctcatgaaagcgtttgatgacgaagtttccgaggactgctccgattataaagcagaggataatgccgtagaaaataagggcgttgtagaatgctttacggtcatgggttcgcagaaagcggtgcagattctcggttccgtttcttaagtttccgatacacatagttgtagccgctcctctgttgcggatcttgcgaaagctttcgacctgaatgccgcaggcaaaagaggtgagtgagtttgcgaggggatttaaagagtgagggaaaaaggctacacatattaaaataacagcttccaacagaacggaaagctgacgccagtggagtcgtatgttgaggcagcgcacagtatcggcaagtaagatgccgagagtaaacgcgagaacagggaggagatagctgagcatggcaaaatagttcccttccgcgagatttacaccgaataggagcagatttccggtttgggcgtttgcgaatacgtttccccgttcaagataagagtaggcgtccataaatccgccggataaggcgaggatgattcctaagcggagtgtttcagacatttgcaaagagtgtttcatagggaaatctcctttcggtaattaaaatggttttgctgaggatgtcgtattatatagaaggagcatcccgtcaaagaggcgagaatgctccgttttgatatttttttaataggcagaacgccgcggcggaagcgcagagctcacctacagggaatgagatccatacgcccgtaggtccgaaaaagcgggtgaggatgaaacttaacgggattgttatcacaaattggcggagcaaagagatgatcagagaattccgcccgtttcctatcgcctcaaatacgccggaatagatcagaccgacagaagaaacaagaaatccgaggctgatgatgcgaagagcagtgactccggcgctcattaaagcggcgtctgcatcgaacagagcgagaatctgtttcggaagggcaagagcgaggatcgttcctgtcaacatcaatcctgccgcagtgagcaggctgtatcgtattgttgatttgacgcgggaactttcaccggcgccgtaattgtacccgatgatcggacgcattccctgtacgattccgtttgcaggcatatagatgaaagtctgaagtttgaaataaacgcctaaaactgcgacataaacgtctgaaaatgcagtaagtatactgtttagtacactgatcaatatagacggcaggagcatcataacagtagaggggattccgacactgtaaatttgtctgatgatcgctttatcaaagacaagatgcttgaagctgatgtgtaccgcgtaagagtttcttctatatacgatgatgtataagagtaaggcgctgatctgtccgatcacggtggcgatggcagcgcctgcaacgccaagcgccgggaaaccgagcaatccgaagatcaggatcggatcgagtataatattgacgacacagccggcgatgagaaggtacattgtaatcttcatttcaccgattccctggaagatcttttcaaatgcaatttgaaaaagagagccgaaagaaaggcaaagtacgatttccgtatatatggatgcgtcgtttaatattttcgggttgtctgtaaaaagttttaaaaacggttcggagatcgtcagacctgcaatgataaaaaagatgcagtggatcaatgtaagggcgattcccagagtcgccgcccggtcagctttttcccgatttcccgctcctaaatgaatggagatagcggagctgatcccgacgccgattccgaccgctgcggataagatcgcgttttgaagcggataggcaagcgaaacggcagtcagagcatctgtgccaagtctggaaacgtagatactgtcaacgatgttataaagcgattgaataagcatggacagcatcataggtacagacatagaaagcagaagagaaaaaacaggtttcgtctgcatgaatgaatttttcttttccataataataaaagtctccctgatgtaatacttttgccgataaaaatatcggatcaaaagtttgtcatttaaaatatgccgagatgttcgagcaggatcttaacgccgagaagaatcaggatgatacctccggcaagctctgctttcgctttgtatcttgtcccgaatatgtttccgatttttacacctgcggcagcgatgataaacgttattacgccgataaatgaaacggcaggaataatatgtacatttaaaaaggcgaaggtgatgcctacggccagagcgtcaatacttgtcgcaacagccagagggaacatcgttttgcaatctaaaaggtcgtttgaagattcttcgtcgccggagaaagcttcgcggatcatattgattccgatgatggaaagcagcataaacgcaatccagtgatctatagcggtaatgccgtctttaaaccggatgccgagaaagtagcctgctgcaggcataagagcctgaaatccgccgaaccaaagaccgacggcggtaatctttttccaggtgactttcggcatagcaagtcctttacagacggcaacggcaaaagcatccatggaaagtccgactgccaggatgaaaagttctgtaagtcccatataaaaaactccttaggaattataaatcttaaaaataatagcactaaaaatactgtttttcaagagaaaggaacgggggttttgggacgagaaataaaacaaattcacaggattgacatatttgtatggtaatctgaaaataaaagagaaattatcggaatatttttgccggtacatttttatatgagaggtggatattgtggaaaatataaaagtgcttgttgtagatgacgagagcaggatgagaaaacttgtgaaagactttcttacccgggaaggatatgctgtgcttgaggcgggagacggcatggaagcgatggacattttctatgaagataaggagattgcccttgtgatccttgatgtgatgatgccgaagatggatggctggcaggtttgccgggagatcagagagacgtccaaagtaccgatcatcatgctgacggcaagatcggaagaacgtgacgaacttcaagggtttgaacttggagtggacgagtatatatcaaagccgttcagcccgaagattcttgtggcgcgggtaaacgctatcttaagacgaactctcggaaatacggccggagatgtgatcgaagcgggagatatcaagattgataaggcggcgcatattgttaagatcaatgacaagatgatcgatttaagttataaggagtttgaactgttgtcatattttgtggaaaatcaggggattgcgctgtccagggaaaaaatattgaataatgtgtggaattatgattatttcggtgatgcgagaacaatcgatactcatgtgaaaaaactccgtagtaaattaggcgacaggggcgagtatatcaaaacgatatggggtatgggatataaatttgaagtcaattaaccggaggaaatacaaggatgataaagtattcgatcaggcgtcagatgacggcgatttttatcggattgttcagtcttattttaggtcttgtccttattataaataacgcttttttaggacattattatctgtctcacaaagcggatgatctgatccgaacatacaatgacgtcaatgcgaagctggagtccggaagtctgtcagattctgattcggtgagggatattctgacacagcttgagcgggcgaacgttgaccttgtcgtggtggacggaggtggaaatgcgatccttacgacacttggagaaagcgatccgcgtttgaaagaaatgttcagcggcttattcggaatggaaggagtcgatcatgaaaacatactgaagcggaatgaggactacacgatttacagagataagagcagtcaagtacaaagagatgtagagtatttgaaaatgtggggaagatttatggacggctcatggtttatcatgcagtgtccttatgcgagtattacggaaagtgcatctcttgcaaaccgctttttgatctatctcggatgtatcggaatggttatcggaggtctgttagtatggatgttttcccgaagtattacaagaccgatcatggaacttgccggattatcccaggagatggcaaacttaaatttcgataccaagtatacgcgcggcggcatggatgagatcggtgtgctcgggaataatttcaataaaatgtcggagaagctggaaagaacggtgtcagaactaaagcaggcgaataatcagctgcagaaagatatcgaacagaaagaaaagatcgaggatatgagaaatgaatttctcggaaacgtgtctcatgaactaaagacgccgatcgcccttatccaggggtatgcggaagggctgaaagaaggaatcagcgaagatcccgaaagccgcgaattttactgtgatgtgatcatagacgaagcggcgaaaatgaatgtgatggtgaaaaatcttctgacgctgaatcagttggaattcggctctgatgaagtacagtttgagcggtttgatatcgtgcgccttgtaaagggggtaattgtaagctgtgagatccttgttcagcaggcaggggcaaagatcagttttatttccgatgaaagtatctgtgtgtgggcggatgagtttaaaacagagcaggttgtacgaaattatcttacgaatgcgatccaccatgtcggcaatgagaagcgcatagaagtccgtatagaaaatggggacggaaaagtgcggatcactgtgtttaacagcggaactccgattccggaagaagatattccgaagttgtgggataagttctataaagtggacaaagcgcatacaagagaatatggcggcaacggaatcggtctgtcgatcgtgaaagcgatcatggaatcgttccaccagaaatacggagtagagaactttgataatggagtagcgttttggtttgaattggatgcaaaagcgtgaaaaacttataagttcaatgctttacgttagcgcgtaaatgtgctaaaatgcaactaataattcaaggatagttgcgtaagagggcatacggcatgccggctgtcagcggtcggtatatcgtatgccctttttgcaatagtaaaaaatgtaaaaaagagtgtaaaagtaagaaggagggcgggataagtatgtatgataaaatatacgagatcattcaatcggcagacgatttcgtatggggctgggggatgatcgcacttttgctgggaacgcatctgtttttgacagttcgcacaggacttatccagagaaagacaattacaaaagggattcggctttcggttgcaaaagaagagggggcagacggagaagtcagtcagttcggagcgcttgcaacagcgcttgcctccacgatcggaacgggaaatatcatcggtgtcggaacagcgatcgctctgggcggtccgggagctgtattctggtgctggatcacgggcattttcggaattgcaacgaagtatgccgaatcgcttattgcggtaaagtacagagtaaaaacagaagacgggcgaatgcagggcggtgcgatgtatgcgctggagcgcggactgaatatgaggtggctcggtttggcgttcgcttttttggcaggttttgcttcttttggaatcggatgcgcgactcaggtaaacgcgatcgcggaagtgtgcagtaagaaccttgggatcgatccgtttgttgtcggcgttgttgtggcagggatgacggcggttgtgattttcggaggaataaaaagtattgcgaaagtatgtgaaaagcttgttccgtttatggcggctttctatgtgataggctgcgtcgttatattgtttatcaattatgattacatcattccggcggtcacgacgatctgccggcttgcgtttacaaaaggagcggccgcaggcggacttgtaggcggaggtatccggtatgccattcagtatggagtcgcaagaggacttttctcaaatgaatcgggacttggttcggctccgatcgcggctgcggcggcaaagacaaaaaatccggtccgtcaggctcttgtttcttccacgggaacgttttgggatacggttgtcgtctgtttgatgaccggacttgtgcttgtgacaacgattatgaaaaatccggcgatcaatattgacgaggcggtaaacggaggcgaactgacaacgatggcgtttggtcagattccctttttcggtcctcttattcttgttgtcggtattatctcatttgcgtattcgacgattttgggatgggcgtattacggtgagcggtgcgtagaatattttgcgggaaaagcgggacttcttccatatcggcttctctatgtagcggtgcttcttgtcgctccggtgcttacgcttgatcttgtgtggaaggtggcggatatactgaacgcgttgatggcgataccgaacctgaccgcagtgctgctcctttctccggttatcgtaaaagagacgaaaaaatatattaaaaatctggatgcggtagatcatacgccgattccggtcgtaaaaacaggaagaggaaaaagaagatagaaacacgaaacgaaaagcggaaaactgccgtacggaataaagaaacgaaaaagagaaatatagaatgaaaaacaaaagcagggagaggaaaatatgatcgcaattatagactatgacgcaggaaatattaaaagtgtggaaaaagcgctcttaagtctcggacaggaagtgacagttacggcgaaacaagatgaaatactgggcgcggataagattgttttaccgggggtaggcgcgtttggagacgctatggagaatctgagaaagcgacaacttgacgctgtgatccgggaagcagtggaaaaggaaattccgtttctggggatatgccttggacttcaggtgttgtttgaacaaagcgaagaagcgccgggggtggaaggacttgggattttaaaaggaaagatatgcaggatcccgaatgcagaaggattaaaaattccgcatatggggtggaattctctgcatttagagaataacggaaggctgttcaaagggatagaagatgatccgtatgtttattttgtgcattcttattatttgaaagcagaggatgagcaaatagtgaaagcttccgctgaatatggtgtacatatccatgcgtcggtagaacaaaaaaatgtttttgcgtgtcagtttcatccggaaaagagcagtacggcgggacttcggatattgaaaaatttcgtggaattataagaggtgaatgtgatgtttacaaagagaattattccctgtctggatgtaaaagacggacgggtcgtaaaaggagtcaactttgtaggtttgaaagatgccggagacccggtggagatcgcgaaggcatatgacgccgcaggagcggatgaacttatatttcttgatattacagcgtcttccgatcagcggaaaacggtagtcgatatggtcagagaagtggcaaaatgtgttttcattccatttactgtcggcggaggaatccgcacggtcgatgattttcgggcgcttcttcgcgaaggggcagataagatttccattaactcttcggcgatcaatacgccggagctgatccgcgatgcggcggataaattcggcagtcagtgcgttgtagtggcgatcgacgcgaaaaaacgtcaggacggttcggggtggaatatttataaaaacggcggtagagtagacgttgggatcgatgcggtagagtgggcgcaaaaagtggaacaactcggcgcgggagaaattttacttacaagcatggactgtgacggaacgaagtcgggatacgatctggaactgacaaaagcgatcgcgcaaagcgtgtcgattcctgtgatcgcctcgggaggagcggggaaattagaacattttaaggatgctcttgcagaaggaatggcagatgcggctctggcggcgtcgctgtttcactataaagaactggaaatcagacaggtgaaagagtatttggcaaaagaaggcgtttctgtaagattgtgatcttagaggaacaaggggaaagactgcatgaagagacaataccgataaaagcggtggagatacaaacggaaagaaagacgagggtgataaagatgtcaggtataagcggagactggtatgaagcgctgaaaggtgaattttcaaagccatattacagaacattatttcagacggtaaacgaggaatatagaacaagattgattttcccgccggcggaggatatatttaatgcatttcatttgactccgctgaaaaaggtgaaagtagtgatactcggacaagacccttatcacaataacggacaggcgcacgggctttgcttttcagtgaaaaagggagtggatgtgccgccgtctcttgtcaacatttataaagagcttcatgatgatctcgggtgtacgatccctgatcacggatgccttacaaaatgggcaaatcagggagttctcatgttgaatactgtgctgactgttcgtgctcatcaggcaaattcccacaggggcatcggctgggaagaatttacggatgcggcgatcatggcgttaaacggtcaggaccgtccgatcgtatttattttatggggcgctccggcgcagagaaaaaaggcgatgctgaacaatccgaagcatctgatattgacagcgccgcacccgagtccgctgtcggcatatcgtggatttttcgggagcagaccgtttagtaaaacgaatgagtttttagagtcgcaaggcgaagagcctattgactggcagatcgaatagaaaagaaagcagaaaggctgcagatgttttgcggccttttttgttatagggggaaaacagaagttttgcgcagatgagattcggatattaagaaattattcataaaatacatagcgaaatctaacaaaacatatgatacgatacaaataacaatgcatcgctgtttcgtaaaaaggcagatctgactgccgaagattcgtatgtgttgagacaggagataaaacaaacagacagaatgagtaaagaaagcaaaaaggaggagacagtgagggagattatcagtgtgaaaaacctgtataaactgtatcgtgtcggcgattcggtcgtccgggcattggacggcgttagtttttcagtgtacgagggagaattttgtgcgatcgtcggaacgtccggttccggaaaatcgactcttttgaatatgcttgccggactggaaaaaccgactcgcggggaagtgatcgtagcggggaagcatatcgagcagatgaaagaaaatgaacttgtaaagttcagaggagaaaacgttggttttatatttcagtcgtttcatctgatgggaacgatgaatgcactggaaaatgtggcgcttccgcttacatttcgcggagagccgagaaaagaacgaataaaaaaagccgacagaatgctggatctggtgagcttggaaaaacataaaaaacatctgccgaaccagttatcaggaggacagcagcaaagagtaagcgtggcaagggcgcttgtgaacgatccgaagattatttttgcggatgaacctacaggagcgcttgattcacatacgtctcaagatgtgatgcgcctgatgcaaagactcgtaagagagcagaaaagaacgcttgtcatggtcacgcatgatcgaagtcaggcggaatatgcagaccgggtattggagattatagacggaaaaattgtacacattacagaaaacaggaggaaagaggaaaatgagagagcatagaaaaatgacgttgaaacggatcggaatcggaattttatgcatggtgtttgtgttgtctatgcttgctccgctcgtggcatttgcagaggaaaaaacagagtccggaagtcaggtgtcaaagagagagcttgcgtacattcagatcagtgtcggcgacgggcaggagacgcctgtgtttaaggcggggcagaaggtatccgagtttcggatcaatgtaaaaaacaacggaaatgtagacgcgcacaacgtgcggatagaaccggatatcaagaatgcatccgactggccctttgaacttgataagctgaattatgaaaaagagttgtctacgatcaaaagcggcggacagactgcggctgtgtgggggagtgaagagaaacctcttatcgtaagaggagatgtgacagggaagtcttataaactggaatttaagatttcttacgatgacggagagaaatcctatgagacggataagtatgtctttgtaaaaacgaccgcaaaagaaaagccatcggaaaatcagggtggaaatgcaaacggcggagagataaacaacggaaataccggaaacggaagcggcggatcgggaaatgcgcagggaacgccggacgattcgggcgcggtgttcggaggagtatataccagcgatccggtcatggcaggcggctcggcaggcggcgcggatgcgtcaagcgcatctgttccgcgggtgattgtaacaggatttaatacagagccggcggaagttcgcgcgggaagtaattttaaattgatcgtccacctgaaaaatacttcttcaaaaactgctgtttcaaatatgctttttgatatgcaggctccgtcatcaggttcagaaggtgcggcggaagctccggcgtttcttccggcatcgggttcaagctctgtttatcttgacggaattcctgccggaggaacgagcgacatttcaatcgaattgaatgcacgggcagatcttgtgaaaaagccgtacagtatcagcatgtctatgaagtatgaagacagcagcgcggcgcagtatgaggcgcagtcaagccttgcgatcccggtcatacaggacgcccggtttgagttcagtaagatcgagatcgcgccggagacagtagcggtcggagaagaggcgaatatttcctgcagtctgtacaatctcggacgggtgaagatgtacaatgtgaaagctcgttttgaaggcaagatgatcgagtcagacgaacagtttatcggaaatcttgattccggcgcgacaggcatgatcgacgccatcgtgacggcgaaagaagagacgatggacaatacagagtgtaagctgatcttaacttatgaagatgatgcgggaaatgtatcgacagcggaggaaaaatttgaccttactgttatgccgatgtcagatgccggagacctggacgctatggcagatataccggaagaacagggggggctgccgatcggaatgatcttggcagcagccgtagttgtgatcgttgctgtggctgtggcaatcgtgcttattatgaagaggaaaaaagcaaaacgtctggaagcggaagaggaggagttgtttgatgaggtggagcgatctgctgaggatgagcgttagcagcctgcggcgcagaaaattaagaacgtttcttacggtactaggcgttgtgatcggaacggcttctatagtagttatgatatcgctcggactcggacttcaggaatccatgtataaagaggtggagcaaaacggaggaacgacaagtattaccgtgacgggaaaagattcgggcggaatgatgtacggttattcgggaatgtcttcggacgaagaagaatcgcagaaatacatcacagatgatgtgatcaaagagttgaaaaacgtagcccatgtgaaaagtgcagagccgatcttaagcatatcggtaatcgcgctgaaaggaaaatatgaaggctttatcgaattgacaggaatgacgcctgaaggtttgaagacattgaatctggagctggaggatggcgggcggcttcctgatccgaacagcgcccagctggaacttgtatatggaaatacagtaataacgaatttttatgaaaaaacatcaggaagaggatattgggattcgggagaacttcctgatatagatctgcagacggattccgtttttcttatactcgatcaggacggctattatcagtcgcagagcgcggcttcggatatcggcggctctgccggagaaagcggagaaggcggaacagcgtcggcaaaaacgccgccgaaaaaacatgtcgtatctgcaagcggagttttaaaaggcggaccggatacctatacggtgaattcttatatgacgttttgcgatatcaataagctgaggacgtatcttgaaaaagaattcagaggaagagcgattccggggcagccgacgacaaagagcggaaaaccatataataagtttgtatattcgtcggcaaaagtacaggcggacgacatggaaaacgtagaggctgtctcagacgcgattcgggcgatgggatataatgtgtcgtcgaatatcgaatatatcgacagcatgaagaaacagtttgcaatggttcaggcggtgcttggcggaatcggagccgtttcgctgtttgttgcggcaatcggaatcgcaaatacgatgatgatgtctatttatgagagaacgaaagaaatcggcgttatgaaagtgatcggatgcagtcttggaaatattcgtcagatgtttcttttggaagcggcgtttatcggacttggcggaggtgtgatcggaaatgttttaagtttccttatgtctgcggcgatcaatgctcttgtgaagggcaaagagatgggaatgacaacagggcagatttcttatattcctttgtggcttgttcttgtttctcttgggtttgcaatgcttgtcggaacggcggcgggatatttcccggcgagaagggcgatgaagttaagtccgcttgcggcgatcagaaatgaatgacaaccggaaacaggcggcggttagaaataagtgacgatcagccgatgataagaggcgcagatagatcggataataacgaaaaatggtaaaagacagaggtgaccggggattattcctcgatcacctctatttctaaataatcaaaatcaatgctgtctacaaagttatcctgataaaaccgagcttttgcgtgccgtttgaagtcggcgatcgttgtgtcaagccagataggcttgcttagatcgaactcatagcagatggcgtccaaagcgttgaaaatcttatgtgtgcgggtgtctgttgtctcatcgcaaatgacagtatcgcgcagaagcctgttttctttaaattcttttccccataaacgaaacataacgaagctcctttcaaagtttatgaaatttatcatacaaaaatcccgttgcttgtgcaagccctttttgatatattagtatcagttcgggcgctcggacaaaatatacatgcagggaaagccggcaagtttatatcgtgtctgtgcggtgaaatgaaaaaagaaaacatgatgtgacgcaggagtttgtaaaggagtaaaaagatgatcagagtatgcacgataaatgacaaagaaatattggaaaagtatttacaggaagagccgtatgccggagcaattttggcggcgatcgaggagtttggatttgacgaaaagtttcagacagtatatcttgattcggaaaaacgaaatcttgacaccgagggagagcaagaaacagaagagacggtaaaaggggtgtatttgtggtttcataaaaatcttcttttgtacagtaaagaaaataaagtcgatatagattttcttgaacagatgatttttatggctgcgccggactgtgttgtgggaaggaaggacaatgtaaatatcgtaagctggcttttgacggattatcattttaagcagtcggacatgatccccgaaatcgtggacgcagaaggaaaaacgactccgtgttttgcggcaaaagaagcgtatgcaggcgagtgggggtatcttaagaaatgaaaaaacttttagatcggatttttatagatggtctgggcggcatggcacagggactttttgctacgctgatcataggaacgatcattcagcagatcgggttgtttatgggaggcggcacaggagatcttatttatgaacttggaaagattgccgcaggtttgacaggtgcaggcatcggagtcggtgtggcgcgaaaattagaagcaggacatctcgtaatcgtttcggccgcggttgtcggtatgatcggtgcatttgccgggaaaatcttatccggacaggttcttgtggatggaaatctggttctggcagggccgggagagccgttaggcgcttttgcggcggcgtatctggcgatcgagatcgggatcttgatctcgggtaaaacaaaacttgatattatactgactccgctggtctgcatcggaacgggatcggcagtcggtctgtttgtcggtccgccgatttctgaatttatgttatggcttggctccttgatcaactggggaacagagcagcagccgtttttgatgggaattgtcgtttccgttttaatgggaatgatcctgacgcttccgatcagctcagcggcgcttggagtaatcctgaatctgtcgggactggcggcaggggcggcgacgatcggatgctgctgtaatatgatcggatttgcggtggctagttggagagaaaataaattcagcggatttctggcgcagggaatcggaacgtcgatgcttcagataccgaatatcgtaagaagacctttgatctggcttccggttattttgtcaagcgccgttttaggtccgatcggaacaatgcttcttcatatgacgaacaacgctacgggatcgggtatgggaacagccggacttgtcggtccgcttatgacatggcaggtaatgacgcaaagtgaagcgggagtgatcgtgctcggaaagatcattttgatccagtttatccttcctgcggcggtgacgcttctcatttctgagtttatgcggaaaaagaagtggatccgtcagggagatatgaaattagagttgtaagagaagtcttaaaaaacaatgaaatctatgacatgccttaggatttatgttagaatgaaaaagtaaaataactggcggaggcagtctgaaatgacgagtgaacaacaagtagaagctgcgctgaaaagctatgaggatgtcgatagctggaagacgatcatttttctgtataacgcagcgctgaaagaagtaggaacaaagctggagattttgaatgacgaatttcagcatgtacatcaatataatccgatcgagcatataaagacaaggataaagacgccggaaagcattgtgaagaaattaaggcggtatggccatgagacgtcgatcgagaacatggtacgctatatcaatgacattgcgggggtacgtcttatttgttcctttacatctgatatttaccgtttggcggagatgatcggcaatcaaagcgatctgaaagttctttcgatcaaagattatattaaaaatccaaaagaaagcggttataaaagttatcatatgcttgtatccgttccgatctttctttccgacagcgtagtcgatacaaaagtggaaatccagatccgaacgatagcgatggatttttgggcgagtttggaacataagatttattataagtttgaagggaatgcgcctgattatataagcagagaattgaaagagtgtgcgaagatggtgtcggaacttgacgacaagatgctctctttgaatgaggcgattcaggcctgcatgatcagagacgatcagagaaaagaaagtatggaagatgtgtttgacaatgtgatcggcgaaagaagaaaacagtaaagaaaatcttaagtaatcttaagttttaagctttgggggcaaaagatattgatgcttttgcctcttttcgttatactgtatatttggagggaaaagacgaatgcaggaagaaaaaacagaaatagaacgctgcgattttatacatgttcatgaagatgtagtaaaaaaagtaaaggaacacattccggcagaaagagagctgaatgatcttgcggaattttttaaagtgttcggagatgtgacgagactgaaattgttaagcgtgttgtttcattcggagatgtgcgtgtgcgatctggcaaagacgctgaatatgactcagtcggcgatctctcatcagctccgcattttgaaacagatgaagctcgtgaaaaacagaagggaaggaaagacagtattctattctcttgcagacgggcacattaaaacgattattaatcagggaatggaacatatacaagagtaataaaagaaaagccggcgggcagggaaagccggcaaacaggagaaagccgacgaacaaggggaagctgacgaacagggaaaagttgacggaaaagggaaaaagggatgacgagagaaaccagaaaaagggaattggagatcggtatcggtcttgttttatatttgctggcattcttaataagcatgcaggcaaagatgaaatcaaaggcggagatgcttttgtttttactgccgtatattgtatcggcgatcagtatttataaagagcaggcagagaaatttttgaaaaagcagtttctggatgaaaacttactgatgatcatagcgactgtaggagcattttttgtaggacgttacaaagaagccgttgcggcgatgctcttttatcaggtcggaaaacttgtagaagaaatctctctgagcaggacgaaaaaatctattgcgaaatttattgatattcgtccggaatatgcgaacctgaaaatcggaaacacagaaaagattgttccgccgcaggagctgaatttgagacagacgatcgtactgcatccgggagacaagatcccggttgatgcggttgtgacaagcggaacgggaacagttgatatgaaagcgctgacaggagaaccggatcctgtcactgtgcggatcggagacaggctgttcagcggaagcatcaatctgaacagcgtgttggaagccagagttgagaaactgtacaatgattctactgcggcgaagattatgcggcttgtagaaagcgcaaatgaaaacaaatcggagagcgtacattttgtagataaattcacaaaatattatacgccgatcgttattttgatcgcgcttttaactgtcattctcccgcctatgatgtttgtggaggcgaaggctgagtggatatacagaggattgatcattcttgtggcggcatgtccgtgcgggttgatggtttctataccgcttgcgtttttgggcgggataggatctgcttcaaagcagggcgttctgataaaaagcggagctgttttggaagatctgatccgggtagacacatatgtttttgataaaacgggaacactgacggaaggcgtatttcatgtgaaagatattgttccgtataagtttgaaaaggaaagactgttggagcttgcggctttggcggaaagttattcaaagcatccggtggcgctgtctcttgcggaagcttatggaaagccggctgaaagcacgcggatcaaagatgtgaaagaagaaccggggtacggcgttcatgcgtttgtggacggactggaagtttatgccgggaacacaaggctgatgaaccgggaaggaatcctttacgcacagacggaaaaagacggaactgccgttcatgtggctgttgacggaaagtatgcgggatacatattgattgcggatacgattcgtaaagatacgggaaaactgatgcgctggatgcgaaagaaaaatatgggaacggttatgctgaccggagataacgagcgtacggcggaaaaagtggcggcagagctgaaaatcgacagcgtttatgcggagctgatgccggaagataaagtgcagcttctggaagagttttgcaatgaccgcatggaaaatgaaaaattggcgtttgtaggagatggaatgaatgacgcgcctgttttggcgcttgcagacatcggcatcgcgatgggcggtctcggcgcggatgccgcgcttgaggcggcggacattatccttatggaagatgagccgtcgaagattataaatgcggtgcggatcgcaaaaggaacgatccggtctgtacgggaaaatgtattgtttgcgatcggtatgaaagtatttttagtcatacttgcgtttttcggtcttgtgacgatgcaaagcgctattatagcagacatggttgtgatggtaattaatattttgaattcattttggatgatgaagtatccggaatcggaggtgtaaacgaatcgtgaaaatcaaaaaacagatcgtgttggcggcagttctttgtatggctgtgccgactgtggcatcaggctgtgcaaacagtgcgaaatcaggtgtagaggcattggaggcaggagattataaagaggcgcaggcacagtttgaaaaactgactgaagaaaaggataagaagaaatcggcagaggggtatcggggacttgcgatgacatattatgagcaggaggagtatagctcggctctcgatgcgtttaaaaaagctgttgacacaggagtagtacagacgactcagatctataatctgatgggtgtttgtgcaatgaagacagaggattacgaggcggctcttgaatatatacaggcgggtcttgccatggcggaaacagatatgtcaggtgaagaagagaagaattcggaaaatggaaaagattctgctgaaatgattcaggagatgagatataacgaagttgtctgttatgaaaaactggctgattgggaaaacgcgaagcaaaaagcgtccgagtatctgatcgaatatccggaagatacggcgatggaaagagaagccgagtttttggaaacgagataaacaccgtttggcaaaagaaagtcctcatgaaagggaatttttcgtgaaaggaaaatctacgtaaagggaaaatctatgtggagggaaaatctttgtgaagggaaaattctcataaaagaaaaatcctcataaaagaaaattcggagaaataatatgtatgagatggagcaaatcgacgagagggtgatcctcgtcggaatcgatacgggaaatgaagatgcggcaaaccgttcgcttgacgaactttcggaattggcgaaaactgcaaaagcggctgtagtcggcaggctgatccagccaagagagagcgcgcatccgggaacatatatcgggaaaggcaaattgacggaactcaaagatcttatatgggagactgacgcgacggggattatttgcgacgatgagctgacgagcgcacaattaggcaaccttgaagaagaactgtcatgtaaaattatagacaggacgcttttgatccttgatatttttgcggcgcgggcagtatcgggagaaggaaagatccaggtggagcttgctcagcttcgatacagagcgtcaagactggcggggcttggcagatctttatcccgtctcggcggggggatcggaacgagaggtccgggagaaaaaaagctggagatggacaggcgtttgatcagagaacggatcagcagactgaaaaaagaactaaaagacgtggaaaagcatcgggaattaatacggacacagagaaaacagtcgggattaaaggtggcggctttagtaggatatacatcggcgggaaagagcagtatagaaaatgtgctgacaaatgccggcattttagaagacgccatgctgttttctacattagatactacaacccgctctcttgttctcgataatacgcaggaaatattagttacagatacggtcggttttataagaaaactgcctcatcaccttgtggaagcgtttaaaagtacgttagaagaagcgaagtatgcggacattattattcatgtggtagatgcgtctaatccgcaaatggatgagcaaatgcatgtcgtttacgatacattgcgtcagcttggagcggcagaccgaccggtgatcacactttttaataagcaggataaactcgagtcggcaggcagctatcgggattttcaggcggaatattcaattccggcttcggcaaaaacaggagaaggtcttgcagaactaaaaaaggcgcttctcgagatcgtacgaagagaacagatctatgtggagcgtttgtatgatttctcggaagcatcgaaaattcagcttatccgaagtcgtggacaacttttgtcggagaagtatgttccggaagggattgaagtgaaagcgtacgttccgaaagatatttatgggaaggtttgtatataattaccaaaaataaagggggaaatatgagggaacgatagttttaaagctgtaagatagtaatgaaaccggtagggaaagtggtgcaaaaagcggaaaataatttgacatttttgttgaaaattggtaacattatttagatgatacaagaaaatatgtgacagagtattgctgtacagagcaggcaagacctttttaactgattatatggttggtaaagcagggattgccttttttcttgtattatgaggaaatcaggggattatttccgagaaaaagttatgaaaaaggaggaacaaggaagcaatgcataacgtgaaaaagtcattcaaaagactattggcggtatcattatgcgcaagctgcgtcttgtcaaatgggatgctttctcttgcggaaggggcagaggacaaggcggtgaatctggctttgggatgtcaggcgactgcaaatgcccagtacaatcaaaacggtaatgatatgagcgcgtcaaaggcagttgacggcaacgatgaaacgcggtggtcttctgaaggtgcggccccgggatggctgcaagtggacttgggagaacaaaagtcctttacgcagttccgcatcttaagtgaaggcggtacaggagttaccgtaggaaaacagttgatcgggaagttcaaaatcgaaggttctaacgacaattcaaagtggactttgatccatcagtcggaggataaacaggcggaaggttttccgcaggatacagtggtaacgctggaaaaaccggtaagttaccgatacgtgaagctgacggtggagtcgttgaaaacaggagcttttgacagcgtttcgattcgcgaatttgagatccgtgataaagaagagacaactccggaaaaaccgcaagacccggaagaaaacgtggctctgaaaaaaacggcagcagcagattctacagaagataatagtttgatcgcggcgaaagcgtttgacggcaacacaaaagatcgaagctcaagatggagtagcgcggtagcggacgccccgcactggatttatgtcgatctcggaaaagaaatggatgtaaaaacagtctgtattttctgggaaacaagaaaagcgacggactataagatccagatcgcaaacacggcagaagcgccggcggaatccgattggaaagatgtgaagcacgtacaggatcgtccgaaggcattgaaagatgcaatcgtgttggataaagttgagaaagcaagatatgtgcgcttgtacatcaattcatttacaaagaatgatcctgataatgaaggggcaagctggaattcgatctcgatttatgaaatggaagtatacggcggcgagcctaaggtagatatcgaggaaggaatctcggttgatactccgaaaaagggtgataagaagctgacagtccatattccggaagaaacaaaaacggaaaaggtaacatataacggaacggattatgaacaggttgtagatgcggatttgaatctttatcagccggttgtagatacgacagtgaaagtttcctttaaaatcgagaataaagaaaacggctcttatcgtttcaaggaaattccggtaacagttccgggagaatatgaaacgaaagaaggagataacgcagcgccggacgttttgccggaaatcagagaatggaagggaaatgccggaacgtttgctccgaatgcgggaagccgtattgtcattaaagatgcagaacttcaggaaatggcagatgcatttgcaaaagattatgaggcaattatgggacagacgctccctgtagtaactgcagattcggcgaatgcaggcgactttttctttgcgctgacaaaagaaggaaagggactgcaggaggaaggctaccttatgacggtagatgaaaagactgcggtagaagcggagacaacaacaggagcattctgggcaacaagaacgattttacagagcctgaaagcgaacggaaatattccgcagggtgttgcaagagactacccgctttataaagtgcgcggattcattttggatgtcggacgtaagacgtttacaatggactggctggaagatacggtaaaacagatgtcatggtataagatgaacgacttccagatccatctgaacgataacctgatcccgctggagcactattcccagatcggagaagatccgatgcaggcatattctgcattccgtctggaatctgatattaaagaaggcggaaaagacggtctgtataaggcggatctgacgagtaaagacgtattctatacaaaagacgagttccgaaacctgattcaggaatcaagggtatacggagtggatattgtaccggagatcgatacgccggcacattctcttgctttgacaaaggtaagaccggatctgcgtcacggtacatacggaagagacaacgatcatcttgcgctgaaagaaaaatatgatgaaagtctggaattcgtacagagtattttcaatgaatatatgggaaaagatctgtccgatccggtattcgataaagatacggtcgtacatgtcggcgcggatgaatatacggcggcgccggaagcatacagaaagtttgcggacgacatgcttaagtatgtgcaggacagcggacgtacgccgcgtatctggggaagtctttccacgatcaagggagaaacttcggtgcgcagcgaaggcgtgcagatgaacctgtggaactttggctgggcaaatatggacaagatgtacgagcagggttacgatttgatcaactgcaacgacggaaattactacattgttccgaatgccggctattactatgattatctgaatgaagatacattatataatctggcaatcaactctatcggcggagtgacaattccggcaggagataaacagatgatcggcggcgctattgcggtatggaacgacatgacagactatctggaaaacggtgtcagcgaatatgacgtatatgatcgtatcgacaatgagatcgcattgtttggcgcaaagctgtggggaaaaggaaataaagacttaagcgcggcaaaagaagattatgcggcgcttggaacagctccgcggacaaactttacatacgagacagagaaaaacgaagaaggcgcggcagttcattatccgatggataatatgaaagatgcttccggcagcggacaggatcttaaagaaggaaagaatgccgctatcgaaagcgtagacggaagaaacgcgctgaagctcgaaggcaaagaaagctatgtaagtacagatcttgcgacggcaggacttggaaatgatttgcgcgtaaaagtaaagaggacaacagacggcgacgaagaacagattctctttgaaagcagctacggaacgatcaaagcagttcaaaaagaaaccggaaaggttggtttcacaagagaaaatcatgattattcctttaactataaactgcctgtcaatgaatgggtagaactggaatttaaaaatgagcagaataagacatatctctatgtcaacggagagttaagagacgtacttggagacgatgaacgggtagagggaagaccgctgcttgcgacaacgatgttcccgatcgaaagaatcggaagtactaagaatgcgttcacaggttacgtggacgacgtccgccttggaacgaatgctgattttgcgtctacaatgccacttgattacgcagtgcttactgcaaatcaggtaatcggaaaaacggaaaatgcacaacttgcccagcttgtaaaagaggcagaggcgatatttgcagcttataatcctgacgcgtcggcaatcaatgacttggcggcagagataaaagcagttttagacgacagcgattacaaagaagcggactacagcagaattgaaacgctcaagaagacaatcccgtcggatctttctccgtttacagaagaatcggcggcatggcttgagtacgtgctttcgcagattcgtaccggactgccggaagaaatgcagagtacggtagacggttatgagaaaatgctggcagatgctctggcaggtctgacactggttgaagaaagaaatgtcaactatgtagataatgcaaaacttacggcgacagcatcctcgcatcaggataacggatctgcgccggataaagcgctggatggagacacaaacacaatctggcattcaaagtgggatatcacaactatgccccattggatcgatcttgaaatggaagaaccaatggcggttgacggacttacttatgtgccgcgtcagacaggaacaaacggaaatgtgactaagtatgagattcagatcagcaatgacggaacaaattatacgaagcatgcagaaggcacattgaaaaataatgcggatacaaaagtaattgattttaacaaagttactacgaaacatgtgcgtctggtttatctggaggcggcaaataacaatggcgctgcggcagaattaaaactgcatcaggccgacgttccggcagatattgaaggtttgactgctgtgatcaccgaggcaaaagcaatcaagaatgaaggatttacaaaagaatcatgggatgcgcttcagaacaagattgcagaggcagaagaattggcgtctgcggaaaatgcagatgcgaatgatgtggaaatcatgaagagagaattatcaaaagcaatgacatctctcattttagaggacaaggtaacttcagatccagaaccgggcaaagtggataagagcaaactgcaggagctttataataaatataaaggtatcaaagcagacgggtatacagcagaaagttggacggcatttgctgaagcacgtacagaggcggaaacggttcttgcaaatgaaaaagcaacacaggaaaaagtggataaagcggcggagaatcttgaaaaagcgtttaaatcactcaagaaagaggaaacgaagccggatccagacccgacaccggatccagacccgggcgctgcagatgtaagcggactgaagaatctttatgaagcgtataaagacattaaatcggacgggtacacagcagaaagctgggcggcatttgataaagcccgtgcagaagcagaaaagatccttgcaaatccgaatgcgacacaagatgatgtgaatgcggcgaaagcggctctggaagcagcttataaaggtcttgttcctaagacgcagccgaatccgacaccgggcggaaacggcggaaacgttggcagcacagcggttgtcacaggagacagcgcaaatatcgcaggatatctgacagttcttctggcagcaggtggaatcgctgtagtaacattctttagaagaaaaagagtgaaataaaaaacatctgattcgtaagatgctgtatgaaatacaaaaggcggtgcgtgtaaagcatcgccttttgtgtatgagtaatcccatatcagatcttccgatatcgaaatagtagttcgtacaatcgaaataagatacagacatctcccagatacagattttgtaatggtgaattaatgacaggaattctgtcattgaaaaaagataaaatatttgtgcaaaaatagaagatgtgttattcttttatcacaaattcagttttctgagaatgtgggaagaaaaagaaccggttttatttcgttgaattctaataatcttgcggcagtcgctgcagtgaaaatcaaatttgtaaaaaaacatgagaaaagaaaaagggataaaggcgctgaggaaagcgcgtatttttgattgcttcatataattatgtttgctacaatgaaggaggaaatcggttgaaaaataaaagaatacacaggaagtataaagacagggttttccgtattatttttcgagataaaaaggaacttccggagctgtataacgtggttaatgacagcgcgtatacgaatcccgatgaactgacgatcacaacgattgaagatgttgtgtacatgggaatgaagaatgacttgtcctttattatcggtgatgtgatgaatttatatgaacatcaaagttcatatagtccaaatctgccgctgagaggattgttttactttgcgtcgctttatcgggaacggatcgaagatgtgaaacaaaagctctatatgaacgttcctttacatatcccgttcccgcagtatattgttttttataacggaacgaaacaagagccggaacgacaggaactgaaactaagcgacttgtttgttaagacgggaaaagaagtgccgccggcgcttgaatgtaaagcggttgtgctgaatattaattttggtcacaacagagaacttatggaaaagtgtgtgacactgcgggaatattcccggtttgtcgcaatgatccgtcagcagatgtcaggagaacttccgtttgaagaggcggtagagcgggcggtagacacttgcatccgtcagggaattttgtctgaaatacttcgtaaaaatcggtcggaggtaatcgatatgattttgacggaatataatgaggaagagttttctttatcggaaggtgaagcggaacaatatgtgaaaaaatgtaggtttgtcaaacatatgttacaccccgat

SEQ ID NO: 7649 - DNA, 10646 bp, Unknown
  gut microbiota DNA sequence
caagaaatgaacgattttcacttcctatcccaagaatcctgcatgacaggagccttcgcctgttttcagtcaggattgcggacttgtttcgcaattacctaattttctataacaaaactgccgcttgcatataaaatcgcaagcggcagtctgtataattgaatctctttcaatcgcttttacagttcttctattttgttacatacaaatctcaatactttccttaaatctttaatgtttataactccgtccttttccacatctgcggcaagtttctgctcctcgtccaactcaaccttctgacatacatacctcaaagtagtacgaacgtctgagatcgtcacttttccgtccgaatctgaatcaccttttatataatccggcttcatcgcctcgaacgtaaatccgttttcttttgcgtacttctccgcagccgatcctgctactccccggattgtaaatccttctaccttatatccctgctcatattgcttgctcgacaaatatcctaaagcctctcttccgatcacttttacagattcggggattgtgactgtcttcaaagattcacatcccataaacgccacttctccgatattattgacactgtcaggaattgtaacattcttcaaagatatgcagtccatgaacgccgcttctccgatattattaacactatcaggaatcacaacttctttcaaatttctctgcatataaaatgcatatcctgcgataccttttgtaccgtctttgatcgtgactactgtatccgtcggtacttctcctttatatttgtagtaaacttttcctgcatatacatctccgtcagcttgcgcgtcataccatgcagtatttcctggatttatatcactttcaaatgcaaaaccaccgattgcctcgaccgaatcaggaatttcgatatcgctcagattctcacatcctgcaaacgccccttactcgatctctgttacgctgtttggaatcgaaactgtcgtaagatttttattctgggcaaaagccgattttcctattttctcaatcttgcctccccacataatctccgtcagagcacatgaataaaatgcgctatacgctacataagcaagattatttccgattaccgcttttttcaatgatccacaaccgtaaaacgcctcttctccgatactggtcactgaatccggtatctcaacagacgtcagtcctgcatagctaaatgctctatccgaaatatacgtaatattatccggtatctcaatctgtttcaaattaccgcagccagaaaatacgctttcttcaatgcctttcaaaccgcttccgagaataacattatccaaagaacacccagcaaacgcacacttaccaacctctgtcgtgctgtcaggaatacgaattcgtgtcactcccgaatggtaaaatgtatagttatcaatctcttttaatccatttccgagatcaactgttccaagatttttacaataagcaaatcctttttcttcgattgtctgaacactgtcaggcaggctgatcgactgaagctttgaacaattttcaaatgcccttgccgcaattttctgtaatttgcttcctgccttaaatgtaactgtttccaaatttgcacatgacgcaaatacgccgtactgtaaatctgtaacctgcgccggaatcgttacaccgacaatattttcattctctgcaaacgctccgtaaccgacacatttaactactttattatcaatcttatcaggcactgttacattgctctctgcaccggaatatttcaaaatttctactgtattatcagacagcacacgatatgtataatccgatgactcttttacttgctcgatcttccattttgcttctttatctgataacgcaatgcccaaatgatatgtttttccctgttccaatgaaactttcacaccaaattcaacagctccgttataccagtatccgtctatttctttccaatcggagctgtatacttttcctgttcctccatcttttgaagaaaacatatattctcctgacttacttggaacgaaatcatatactggagtttcctcttctgtcgttgtatactcagttccttcttcaacagcttttacagatgcctttgtaatgctccactgaacctctcttgaaccatctcctcctattgaaaattcatatgtctttcccttttcaagcaaagcaaaaaaattaatttttccactgctattaccgaacccaattatcttatcagattctttcatgctcagattcatcttatcctgctgagacttgaacctataaactgccgtcccgtccggggtaaacgtataattaacatatctctcttcttcgagagacgctgtatatgtttttcccgcctgtaccgctattgcttcctgttcgcttgccacatatttttggatactccaatatcgagcttccactgtaatgtaataagtttttcccgcctccatttgtacagcggcaacgtcggatttacgttcgatttctttccaattttcatcataaatagttgatctttcttttacgacatatttccctgtcgtttccggcacgaacacataataaatctcttttaagttctcattccgataaacttgtcccaactctaccggaatcgcttttccttttttcacactccatttatttgataacaccccagttgtatttctattatttacaccgacataataagtatgaccctgttctaatttacagaacgaccacgaagaaatatattcgccggtctctttatctctcacgctcattgacaatgcgtcatagctaaagcgataccatcccgtctcatccactgtcagattgtaaaaaatctcttctacattttcgcttaattccgcttcaaattctcccggtttaatatctcttacttttccggcataccactttaaagtttccaacgcttcttccgaagatttttctatctctaaataataatttccatctttacgaagctcatagctgtaagattcatttgacaaatagttgtctccctcatctgttctttcaaaaagagaaacatacgcacttacattccaatctttaattaaaccaaagtaatactgcccgtcttcctcgatattcaaacgataacgaaccattgtctgttctgtcgaaaaagcaacttctccatattccggtgttccgtcttttttcagagtgattgttcctgccacttcttcctgctgatcgacattcagcatctgaggtgttctcgtttcttcctcatatggcgctgtcggctgatcttctttttcctttgccgcaccacccgcctcaactgtatcctgttgtaccttttctgatgcctcatcacctacagttatgtcgtgcggtacatcgcccgcctcatcacctgcaattatatcatgcggtacattttctgacataccatccggtatctgtacatccttcactgtctcattctgctgtacgccgcttactgcttcatcctgtgtccgctctgcttctgcatttaccgaaactggaactgcaaatatcatcgacagacacatcagaaaagccgtaagtcctgcaatcacttttctctcaaattttgtgatcatgttcttttcctcccttgtttcttttcataatatttcttttttataagtaaaaatatcgcctccttcaaaacatactttttaacacttattcgataaaatagtattgttctatacggtataaatattatcgacattcctcgcacaactttgaaaatgttccttctttataatatccgatacctgtttcttgacactgttctcctgccaaaagtccgctctttttgcagtatacttcttctttcacaccggttggaatcgaatattgctccgatgcatctgccccgattttttcaaagacccctttgcatatccgagcggcgtctgcagtttcagcgtccatatctttatcagatttataccataccgcacatacatttcccggaatcattccgacaaaccaatggtctccatactcgctcgttcctgttttcccacacacgtcaagtcctgtcacctgtgctgatatacctgttccgtctgtcacgacttcccgaagcatccggttcataatataagccgtatcttcactgaacacctccgattctttctgctgcggcgtccaataggtctctcctgatttttctatttctttcacagcacaaagaggcgtatcttttccttcatttataaatacctgatatgcgtccgccattttggaaaccgtcacgccgttctccagatatccaagcgctatgttgcttaaaattctgtcttctccttccgccagatatccactcgctatattgcttaaggttcggtcttctccttcctcctctaaaatctttttctcattatccacatcataaccgagcgtatcttccaaaaaacgaaccgacttctcaacaccgtaatctttcagtactttcacggctactgcattatttgactctttcagtgcatctgcagccgtcacatttttccctgtaaacggcacgacattttccggccattctctggcaatcccgttgtctcctgccacaactccataagcgctatcttcgtacaacgatgaccaacatatcgttccgtcctcaatcgccaggccatatacactaagcggtttcatcgtcgatcctgcaaacgccggctttgtcacattgttatagttgtcgtttccttttgtatcactgtaacacgccgtcagatgcccttctttatcagtaaccgccgctccgaaccgctcacatgccattccttcaccgtcattataagagccgatcaccgcatccaaagtttcccggtcgagccatgttttcactgttatttctctgtctgccagtatttttgccgcagttttttcattcacaccttcgcgctcttgaatcattttgaccgcttcctgcgaaacgatatccgcataagactgatatttgtcttcacactcataactgatctttccgtcctgcaatataagttttgcaatctcatttccggcctgatcaagcacgaccgctccactttttttgctaagcatcatccccgccgccgcaaggactccacatgctccgacagccaatgcgaccccgacaattctctttttattcatccatccgcctcctcatgtcctcaatgatctcaagattctcatgagacaatgtcacttgcggacgatctacgatcttccagcccagcgcgctcgtattttcttttacctgctccagcatcttcgggatttcttctgccttttccacgcaaaatcttaccccgtctttatcgcccatctggtgatacaggtcattgcagtatactaaaacttcaagataattctcgtattcttcatactgatacggcgcaagttcaatcgcttttaatttatattccgtaaactgttctacgtccccatccgcaaaagccgcctgtgccaatgcactatatggaagagacacagactgattatccacgatcactttttccgcaatcgctttcatttcctctgccttatccgctttcgtaagaagagccagctgcgccattgtatttccactgtaaactttttcagccgctttataatttcccgacgtatagcaaacgtccgaaaccccgcacataatcgaaagcgccgctgccgccgccccggtcagacctacaaccgttccggttaaaacaggcactttctgcgtcttaatattccgcatgtcaagaaacaggatcagcacaaatcccatcgccagaaactgaaagtcataatcgaacaagctatgtaagatcataatgctaagaacgatcctgttccggctttgcgtcctcttcgtaaatacagaacgtaaaaccgccgcgcccataaataccgccgggatcacgcctgcatcaagcaagatctgaatcaattcattatgtgcatttacaactgtatacacaccagtctgtactgactgctgtataaagtaataaccataatatccgagtccgaaaggatgttttaatataagcgggagcgcatcctgcacatacaaaattcttccgagaaacgtacttgctccgaaggaaatatttgtaaatcgctcaagaatacctgcgcttcctgctgcaacagccaatatcaccgccacaacggcgcctgccgcaaacactgaaataataacttttttccccgaggactttgccgcaaacacccatataacggcaacagcagttaatacgaataccgtacggcttccgctcataataattccaaatacagcggcaacaccatacacgatatcgagccagtcaatttttttgtaatcaaatctccacattacaagaatcagacagattagcataaacaatgcatatgtattcggatattgaaaaaatcccgacaacctgcctgcaaccgatacccattgttcaaaaacttcaaactgcatcataacaaatgaaaaagcagtcataagacatccaagcatcggaagagacgcgatcattttctctctttcgtccgtcagacccgatacaagtacgtagaacaataacaacggaaggaacttcacgactcccataagagccattcccgaatccaccgcccataaacaagacagaagatatccgaacacaagcacggcaaaggcagccatattcagatcccacgctgctgtgatacgcttcttcacatacattctgtaaaacaaaactccggtcagtacgattccggttaccgcagacaccgatacataatacccgccgcccaatattccgactatcactatacacgtcattaaaatcagcatttttatcccgcccccgctctcgcagcttttacttgcttttatttgtttatcgctattttctgattttatttttatcactgttttctgacttgtttttacttttgtttgtttccgtttttcttctttatcaagtaaacaacgacgcctgataaaatcataactccgaaaaatgcagccagcgctttaaaatcttcagctgataattttttcgatttcttatctttatccgccttatcagcatcttttttcccgctgtcacctttccctttctcacctgattcggacgaatcttttttatcatcgcttgattccttttcagattttgacttgtctttatccttatctgattttttgtccgatttatcgtccgacttcgatctgtctgatttgttctgatctgttgaaactacggcaagatctcccacaactttctcctgaaattctttatccacaccggaaacttctcctgtaatcgggttactggactccgtattgtctaccacttcatccggcttcattccgattgggagcttctccgtacagtctttttttaatttaaacttcaaatcaacgatagatccttcatttttcactgtatccggaactacatacacaacgattatttctgatgattcttcaatatggttataatcaaatattccgcctccggctttttcaatcaaatctcctgcctccagcgactgaaattccagaacttctttgtcataataaatagagatctgaaagccgccgacttcctggcctgtattaaactctaccggaactgttacgacgtctcccgcttttcctttttgattatctacatgaaactccgtatatacatcttccgcctgaacattcattccgaaaagacagaccatgcataaaattaaaataaactgttttattctttttcctctcatcaacctctattctccttacgctctttcccttttataacatatattttttgcaccttttcggagctttttggtatcaaaagaaatacaatatcatctactgtttttctttcttctgataccaaaaagctccctgtcggtcagtcgccaacaaggagctttcttttaacttttatctatgcgttctttttttgaaaattactacgcctacaatcgctgctatggataaaagcattgctactacgaaacctgagatgtggttgctatctccggtctttactgcaccgccgtcagccggtttctcattcttattgtttgtaccgtttgcttttgctgttactttcaaagcgtactcagccgtcttatctccaactttcgctgtgatctttacatttccggcttttacagctttaacaacaccatttgcatctactgttgctacttttgtatcagagctgctccatacaactgttttgtcatctgttgtatttgtcggattgaatactacgttaagttttgttgtctttccttcttcaagagaagttacatcacctttgatttcaatcgactcaagcggaatttcttctactgttatatcataagtaagtgttttctcaaagtctgtgtttgttgtttttactgtaatagtaatcgtcgctttgccgtttttcaaagctgttaccataccatttttatctacagaaacaactttttcatcagatgatgcaaatgtatatattacattatctgttgtatcgatcggattcagtccgattttaatttgatgtttctcacctttgaaaagttcagacggattcttcatctcatcaagcttaacatctgtcaggtgaatttcttttactgtcactgtacaagaagctgtatgttttccatcggctgttgttgctgtgattgtagctgtgccttctttcagtgcttttactgttccgtttgcatcaactgcagctatatccgccgcgctgcttgtccattttacttcacggctatcttctgtattgctcggaataaacgatacttcaagtttctctgttttacctttcagaagatctgtaatttctgttttattcagcgcaatactttctgtatggatcggaacttttacttcacatactgctgtgatcttattgtttgcttttgctgttgcgataacttttgtttttccgcctgcaactgctgtaacaacaccattttcatcaactgttgctacgctctcattttcgctcttccatgtaacagctttttcatctgttgtatctgccggaagatatgttacattcaggtttgctttctgacctttttcaactgtcaccttgtccggtgtcactttgatgcctgtcaattttgcattaaccgtaactgtacattcagctttatgtgtacctactgttgccgtaatctttgttgtgcctgttgctttcgctgtaacgacaccattttttactgttgcgatcttttcatcggcgcttgaccatgtaactgtcttatcatctgttgtatctgccggtgtataaatcactttaagagcttcactgctctgacctttggaaagttccaaagctgttttatcaagtgaaattcctgtcagtttcttctcctgtactgtaagtgcacaagttgctgtaagttttccgacctttgcagtaattgttgcgctgccgtcttttaatgctgtcactttaccgtttgcatcaactgtcgctacgctcttatcgctgctctcccatgttactgctttgttatctgtcgtatctgccggatcatatttcactgacaatgtctttgaagtaccttttttcaatgtaagagttgccggatctacagtaatttttttcaacggattgtttactgtgatctttacactgtcgctcttgcctgctgctgtcgctgtaattgttgcgtttccaactccgacagcctcaactttaccttttgaatcaactgtcacaacatctttattagaactcttccatgtaattgtctgaccttccaacgcttctgcaggtgttcctgtcactgtaagtgtctcggaagtacctttcgtcattgtaaagtcttctttgttgatcttaagagaagaaagttcgattgcaaccgggatttctccgttttcaatcttattaccatttttatctaatgttgttaatggaacatctttgccgtcgatatcagttctgtcattatcatttgttcctgtctgaattcctacacaattaaagcccataagacctgagccttttgcattctcattaactgttacatcaaacgtaaaaagtaatacatctttatttaccggattaccttccttcatttcaagcagtactgaaaatccacctgctgtatatacgtcttcctcatctacaataaacataagattctttttgagaacattatttggatcttgctccaaactgtccttcacatatgtatatacctttgtgtcaaaatcaaatccgccgacaacctgcatcacgtttccatttggcttaagccaacattcaacatgaaccttatcaccgggtttcatgtttgtgacatccgtcttagttataattgacggtacatcgttcgcagcctgtacatccatctgcggaactgccacaaatcccgtgatgaccatgaccagagccaagactaaagctgcgatcttgtttagcttctttttcatccctttttctcctctcctatattttgatgatgtgactagtattcctagtaaatccacttaaacataattattataggactttatttttatttttgcaacgcctataaatgaatatttacctctgcttcttgtaggattacaatacatgtgttacaactgaataattaaaaagcggaaataccttttctgtgttatgctttaagctaccaaacctaaacatttaagaaag

SEQ ID NO: 7650 - DNA, 30429 bp, Unknown
  gut microbiota DNA sequence
ctcgcattgaaaaagtaatcaacgcaaggcaacatttttttcgcattttatcaagtgcttttagacatttttattttatatttttgatatatcttaagttgacgacattgcccgttggacgggttgtcatgattttgccaataataattatactctaagtctttcttaaagatcatccgttttattttgtagttatgtatctttgtaaatataatccgcgcaaagtttattttttctctgtctctttctgcgtggtttttggctttttctttcaaaatacttgacaaattctgtatgtaaaatttcttttagttcttttggcagcatatctgatttttagcagtatttgtagcaatgatgttcgcattaaatgtgtgtggggaaaaacagagttgaataagttacagagagaatggaaaggcagagatgattgaagaggttgaaagtgtgttttatgagtgtctgattcaactcttgtttgaaaaatttgaggagaggtaaggggatgttttcagaaggaaagattttatcggaaatatggatttacaaaacatcttatttaacattggaaatacctgagtatcagtaaataaaaagctctatcaaaaagaatattagttaatagtcttctaacaacatattgaccatctcgtttctttttttagatagtcagttaaaatctctttttcaatacatttcatgcaggaatgtggatacggtaagcgggattgcgcctatcatttacataaaatgacaactgtgatagaatagaaacaattcgatttgaaaattaaagaatgttttatcatatgttagggggcgtttgtattggacagcaagcatttttcaactttgatcaatgattttaagcctgggattttcggggcgttaaatgagaagaaagaagagcttttgaaagaaggaagaaaagtatacaatctttctgtaggaacgccggattttgagcctccattgcatgtaatgaaagcgatggaggaggcgtgcaaagatccgaataattataaatattcattggcagatatgccggaattattggaagcggtgcagtaccgatatgagaaacgttttggggtgcatgtagaaaaggatgagattatgtctgtttacggttctcaggaagcaatggctcatatcggtatggtattttgtgatccggacaatgtgattcttgttccgaatccgggatatccgatgtttgagatgagcggaatcctcgcgaaagcgaacgtagaatattatacgattgaggaagagaacggatacctgccggatctggatagtattcccgaggaagttttaaagaaaacgaagtacatgattgtttcatatccgctcaatccggtctgtgtatgtgctccggatgagttttatgagaaattgattgcttttgcgaaaaagaatgagattgtaattctgcatgataatgcgtattcagatattacatatggagacaagccgggaaaatcattcctttcgtttgaaggggcaaaagacgtcggagtagaattctattctctttctaagtcttataatctgaccggagcaagaatttcttttgttgtaggtaataaagaaattatcagtaaatttcgtcttttacggtcacagattgattatggtattttttatccggtacagtatgctgcaatcgcggcattgatcggaccggacgattttattgaggagcagaggcggcagtatgcgtctcgcaataaaacattgtgtggaggacttcggagaatcggctgggatgtcagagacagtcagggaacgatgtttgtttgggcgaagataccggaagggtatgcatcgtctgtggatttttgtatgaagcttatggagcgaacaggcgttatcgttaccccgggaagcgcttttggaagcaatggagaagggtatgtcagaatggcgcttgtagtaaatgaaagtgtcattgaggaaattgtagatgttttggatgcgtctggaattttcaaaaagaacagcattaaggagtcagatatatgaaaagaatagcaagatttgaaaaggtaagtttcggacaattttcagatggctgggatgatacatttcaggcaatagaaaagggagaaaataaagatcaaagcaaagaaacacttaaggaaatttacgatcggatcaagctgcctcgacgtgcaacggcaggaagtgcgggatatgacttttttgctccggttgacattatactgaatccgggagaaacgattaaaattccgacaggcatcagggtttggatggaaccggaatgggtgttaaaatgttatccgagaagcggacttgggtttaagtttcgtctgcaactgaataatacggttggaattattgacagtgattattataattcggataatgaaggccatatttttgcaaaactgacaaacgacagtaatgaagaaaaaacagttcagatcaaagccggagagggctttatgcaggggatttttgtggaatatgggattaccgttgacgatgctgcaactgatgtgagaaatggaggattcggaagcacgacaaaataaaacacggctctgacatttagggcagagaataaaagtggatcagggggatgttttttcggcttacaaaaatgtaagagtctcccggtgaaacgtaagctaaaaggatggaagaaagcggatagattttatatattgaatatgcagcggggaaatgcttttacgaaagaggaggatacgtttcagatgaaaataataaaaagactgctttcttttatttttttatgtgtaatcattgcagggggagttcttggatataaaggctatgaggagtataaaaaggctctgtcagaagaaagtgtgaaagagatggctgcaagaattgaagagcagccgaattatacgacgatagatgaattgccgcagacttatattgatgctgttttgtcagtggaagataaacggttttatgaccatttcggggtcgatccgattgcggttggaagagccttttttaatgatatcaaagcgggagcttatgtagaaggcggcagcacgatcacccagcagcttgcaaaaaatcagtattttacgcaggataagaagatcgtacggaaagtggcggaaatgtttatggcgtttaagatcgagtccgagcttgacaaagatacgatttttgagttgtatgtaaattctattttctttggaaatggatattattgcgtggcggatgcctcaaacggctattttggtaaagttccgtcggagatgaattttgacgaatgtacccttcttgccggagtgccgaatgctccgacaaactataatcctacagccagtcccgaacttgcacggcagagacagaaacaggtcatcgagaaaatgaaaaaagccggatatcttgaagaatccgttgattagcatggtaaaccgttatagcgtaaaaagaaataatatattaaaaagccgatcgaataaaaaaataaaaaaagggtattctaaccatagaaaatgtactgtcggtatccggcagaaaaaaggggaagtttctatggtagaaaaaaatacgaaaaagttaaacagttcatttgaagaaaatataagatatatgaatgagattcttccggttaaggaaagttttgatattatcagaagggagatcataataggcggaaaggcgtctgtgttctattacattgatggatttataaaagatgaagcaatgttaaagatcatggactcctttctttctgtatccgaacaggatatgccgaaagatgcagaaatgtttattcagaaacatgttccttatgtggaagtagaaatcttggaagattttgatcaggtgatccgcaacgtcctttccggtcctgcctgcctgtttattgatggatataaggaatgtattgctcttgactgcaggacatatccggcgagaggagtcgatgaacccgataaggataaatcgcttcgcggatcaagagacggatttgtagaaacaatcgtatttaacacagcactgatgcggagaaggattcgggatccgcatcttgtcatggagatgacggaggcagggcagtcttcgcgtacagatattgcgatttgttacatgaaagacagagtggataaggaacttttacaaaacttaaagaaaaggattgaaacattggaattaaatgatctgcggatgaatcagcaaagccttgcagaagctctttttaaacgaaaatggtttaatccttttcctaaatttaaatatacagagcgtccggatacggcagcggcatgtctttttgaagggaaagttgtaattcttgtagataattctccgtcggcaatgatccttcctacttcgatttttgatatgatagaggaagcaaatgattattattttccgacagtaacaggaatgtatttaaagattacaagaacgctgatcacagttgcaacggtattttttacaccattatatttattatttatgcagaatattgaatggctgcctgaagtgtttcgttttgtagaggtgcaggatacagtaaatattccgcttgtctttcagtttattattttagaattgtcgattgacggacttcgtctggcggcaatgaataccccgacaatgttgagtacgcctcttagcgtgattgcgggtattgtgatgggcgaattttcggtacagtccggttggttcaacagtgaggtgatgctgtacatggcgtttgtagctgtggcaaattatacacagcctaattttgaattaggatacgcgctaaaatttatgcgtcttcttcttttggttttgacggcatgtttcaatctgtatggatttataattgggtgtattttggtgttttgtttccttgtatttaataagacattatcaggacgaaattatatgaatgtaaaattaaattgattttcggtttttgcggcagacaagtttttgtgtatggaagaactgttattacaaattttaatttttgttaaaaaattttgcgtaatgtctaaaaaaatggtattatatgtaaatataagaatacagaaattatctgtgttctgatatttgtacaggaggcatgcaaaaatgagagattatgtgattacagtaaacagcacggttgatgtgccgaaattatggttggaagaaagacatgttccggttgttgcattaaaatatacgattgacggagaaacctatacagatatggaaggattgactgcaaaagagttttttgagaaactccgcgaggggaagatgtctgttacttcgcaagtgaatccggaagaggctatggaagcattagaaccatttgtgaaagaaggaaaggatattttacatcttgggttttcgtccggtttaagcggaactttaaacagtatgcgtcttgcaggggagatgttggaagaaaaatatcctgaggcaaaagttatcgtagtcgatacgctttgtgcctgcatgggagaggctctactattacacaaagcgctgcagaaaaaggcggaaggcaagacgatagaagaagttgcaaagtggacagaagaaaataaacttcatatttgccataatgtgacggtggatgatctgaatcatcttcatagaggaggtcgtgtatctaaaacaacggcagttctcggaacgcttgtccagatcaaaccgatcattcatatggataatgaaggaaaattacaggtgatcggaaaagaaagaggacgtaaaaaatctttgaataaaattgtagatatggcagtaaaacagtcagaaggctgggagaatgatttgattatgattactcacggagactgtatcgaagatgcggaatatgtggcgcaacttgtacgtgagaagatgggtgttgaaaatattttgatcaacaatatcggaacagtgataggaagtcatacaggtccgggtgtagtagctgtgttctgtatgggaaatgaaagataggaatcttatttttgatctgtaaaatatttgtgtgttttgtttggaaaacagcaaaaaagatgatgaaagagcaggaaagaaaggaatgctgccatgggatgcattcctttctttcctgcctttttatcttgtagaatatattattcggcaagttctccccatttttcgtacaattcttcaagacggagttcgttcttagttcgctcggttgaaagttcctgacatttcacggagttagaatatacttcttccaatgtcatttgaaaatcaatttctccgtttctgttttcgagaagtgcgatttcatcttctgtttttttgagttcgctttttctctttcgttcttttgcctgctgttctttttgttcttgccagctcaatttggaatctgataaaaaagctccatcggcaggaagtgtttcactgccgttttgagaagtggaaacttgcctctgtatctgacttgaggcgtaagtttgcgtcagttcatcctttttttcgagatagtagtcataatttccgatataatttacaaaagtctgattgacaagttccagtattctggaagcagtactgttgataaagtaacggtcatgggaaacgtagaggatcgttccggtgtaattgttcagggcttcttcaagtatctccttcgaggcgatgtcaaggtggtttgtaggttcgtcaagaattaggaaatttgcttcggaaagcataagttttgcaagtgatactcttcctttttcgccgccgcttaatgaatggattacttggaatacttcatctcccgtaaattggaatgcagccaatgtatttcgaatctctgtattagtaagatgagggtagtcgtcggatatttcctcaaatatcgttttatcatcatgaagaacatgatgttcctgatcgtaatagccgatctgtactttggctccgagagtgaaagagccattgtcggctttgatcacttgatttaatatctttagaagcgttgtctttcctgttccgttatctcctatgacagctacatgctccccgcgtttgatctcaaaactgacatcttgaaaaaggagttgggtatcaaactgttttgaaagatgctcaactgtcagtacatcgtttccgctgacacagtacggttccagagaaaaatgcatttcccggactgcctcttgaggtttatctacaatggtgattttttctaataatttttcacggctttctgcccggcggatggatttttccctattgaaagagcgaagtttttcgattactgcctgttgatgtttgatttcacgctgctgattgaaatattcttttagtttcgcatcacggatctgctgttttttttcagagtaggcgcggtaatttcccatatacatagaaagagcgccgttttcaatttcaattacttttgtaactactcgattcaagaaaaagcgatcgtgagatacgatgaatacagcgccgttatagttcattaaataagtttcaagccatgagatcgaatttaaatctaaatggtttgtaggctcgtcgaggagcaggatgtcgggatcggtaagaagaagtttcccgagggcgacacgggttttctgtccaccggataaagtatctgttttttttgaaaattcttcttcggtaaatccaagtccttttaacacaccgataatctcactttcacacgcatatccgttttgagattcaaattgcgactgaaggcggttgtatgtttcgagacgggcatttaattcctctccggataatgattgtagttcgtgttcgattgagcgaagctgttgttccatttcgatgatgtctgctttggcagatcgaagttcttcgtaaatggtaccgtttggaatcaggttttgatgttgggcaagataaccgattgagcggccttttgcaaggattatttctcctccgtcagaaggttcttctccgatgatcattttgaagattgttgattttccggcgccgtttaccccgacaagagctgctttttcacgttcctctatatgaaaagatccggtatcgacaatgattcggtctccgaatgattttttaagattatgacatgcaagtatcatgatataattcctctttcataataacgattatagtaatggtctgttttccaatctattatagctgaatgtcctgtaaataaaaagtaaaaattgacataatattaactattttatataatggaacggaagtgtcggcacgtccgacgtgtgaaacaatatagatacaagcgcgagtatagacggcgcggtggaaaggtgataaacgtggagcgtagaaaaatatccagagcggtaatttcaagactgccgagatattatcggtatttgggagatctgcttgaaatcggggtcgagaggatctcttccaatgatctgagtaagaagatgaatgtaacggcgtctcagattcgtcaagatttaaacaatttcggcggattcggacagcaggggtatggatataatgtgaagtatctttatacagagatcggcaagatattgggacttgataaaacgcataattttattattatcggagcgggaaatttgggacaggcgctcgcaaattatgcttcttttgagaggagcggctttgttttgaaaagtctgttcgatgtaaatccacgttttgagggaatggcaattcggggaatcgaagtgcgcatgatggatgaactggtagattttttgaaaaataatgacatagagatcgccgcactgacgattccgaagtcaaaagcgattgaagttgcggatcttctcgttgcgaatggaatcaaggctatatggaattttgcacatacagatttaaaccttccgaaagatgtgattgtggaaagtgtacatctttcagacagtcttatgaaattgtcttataatatcagtcagcgagaaggcggacagaaaaaatagatacttgaagacagaaccccgcaggaaactgcgggcgttcccatttaaacagcataataaaggcggtgagatcaatgagatatcttcccaatggagcgcagatgaaagcggcagatacatatacgattgaaaaagtagggattccgtcactcgtattgatggaaagggctgcgcttgaaacagttagagttttgaaagacagaggagtagatttttcagatacacttgttgtatgtggaagcggaaataacggcggagacggatttgcggctgcacgtatattgaaggaatatggtttttgtgcagaagtattatttgtagggcaagatgcgtctatgagcgaggaatgccggacgcagaagcaaattgcagaacggctgggcatttctgtgttcacagattttcctaaaaaggaatatactgttataattgacgctgtgtttggcgtaggattgagcagggctattgagggcaggtaccatactgtaattgaatggatgaatgataagaagtgtgaaaaagcagcgatcgacattccatccggcatatgtgcggagagcggcagagttttgggaattgcatttcgtgcagatattacagtttctatggagtgtgtgaagttgggatgcgaattatttccggggaaactgtatgccggggaaacagtatcagttccgatcggaatcgatctttctttttttgaaaaaaacaaagatgtatgtattacatatgatccggaagatattcctttgcttttgccaaaacgagcagcggattctcacaaaggagattatggaaaaattttaatgattaccgggagtaaaggaatggcgggcgccgcgtatttgtcggcaaaggccgcatatgcggtcggcgccggacttgttcagatttatacggcggaagaaaacaggactgttttacaggaattgctccctgaagcaattatatcgtgctataacgaaacggccggaaagcctgatgataaagaactggaaaaattgattcaatgggcagatgttatatgcatcggatgcggacttggaacaagtgtgtttgcgagccggcttttgaaaaagacgatggaaatattaagagaaaatggcagtgaagaagaaaaactccgatcttgtccgtgtattatcgatgcagacggactaaatcttctcagtatggatatggaacagttgcagggagttcccaatgtgattttgactccgcatatgaaagaaatgtcaagattgatcaataaagagatccctcagattgcagaacgtcgtttttctgtcgtgaaagaatttacggaacaatatcaggttgtatgtgcgttaaaagacagcagaactgtcgttatgaaggaaggacatcatccttttttgaatctcgcgggaaacagcgccatggcaaaagcaggatcgggggatgttcttgccggaatgatctcagggcttgctgctcagaaaacagatattttcgacgctgtatcggcaggggtatattttcatgcatgcggcggagatgaagcaagaaaaaagaaagggagttacagtgttttagcaagagatctgatcgatgggatagggcaatgtttgaagaatgcggaagaaaggctttgacagatcaaaaagagaaacagatgagtgatataaggagtaaggacatggatcaacataatcgggtatgcgcgcagattgatctggacgcaatcgcttataatatggaacagatgaaagatcaaatcggaaaagaggcgcgtctgatcgctgtaatcaagacggacggatatgggcatggcgctgttccgattgcgcggatgtttgaaacattttcatatgtatgggggtatgccgtcgcctgtattgaagaagcggtgtctcttcggaaagaaggaattaaaaaaccgatccttgtacttggctgtgtttttccggatcaatatgaaacgatgataaaaaacgagatccgtgcggctgtctacacaaaagagatggcggaagggatgtcagacgaagcggttcgccaggggaaaaatgcttatttccacattaagatcgataccggaatgggacggataggatttcctgtaaatagcgaaagtgtaaatttgatcgaggagatcagtaaacttccgaatatacatatggaagggttatttactcattttgccaaagcagatgaaaaagaaaaatcatatacgttaaagcagcatgaacgttttttgtggatgaaggaacagttggaaaaacggaatgtagatattacgtattatgactgtgataacagcgccggaatcattgattttcctaatttgaagcatgatcttgcaagagcaggcatttctacatatggaatgtatccgtcagacgaagtgcaaaagagcaatgttcatctgaaaccggctctttcattgatcagtcatattacatttgtgaaagaagtagaggcaggaacaccgattagctacgggggaacatttgttgctccggaaaagatgaaaattgccacgatcccggtcggatacggagacggatatccacgttctctttctaataaaggcagtgtgcttatcagaggaaagcgggcaaaaatcgtaggaagagtatgtatggaccagttcatggtagatgtgaccgatataccgggggcggcatttatggatcgggttgttttgatcggaaaagacggaaaagatgaaataacagtagaggaattgtcaaaattaagcggaagatttaactatgaatttgtctgttgtctcggaaaacggattccgagggtttacacaggcggtgattttgatctgatgaagtaattgtttggtgaatacatccgatgacaaagggaatactgataaatgaacatgaccgggaggttatgaggagaatattagtatgaaatcggagagtgaaaaatttgatgatcagacgcggagacattttttatgccgacttaagtcctgttgtcggttcggaacagggaggggtaagacctgttcttgtcatacagaataatgtcggaaacagacatagtccgactgtgatctgtgcggcgattacatcaaagatgaataaggcgaagctgccgactcatatagagatcagtacaagagattataaaatcgtaaaaaattctgttatattgctagaacagattcgtacgatcgataagcagcggctgaaagaatatgtctgtcatatagacagtgcaatgatgcagaaagtagataaagcaataaggatcagtcttgaaattgctacatagactgttctgacttctttacagaagatcaaaagagtgataaaattgtaaagcaaaatgtgcggttgagcgaaacggactgtacaagagaaaaagaagaggagaaaatttatatgtctggacattcaaagtttgcaaatattaaacataagaaagaaaaaaacgatgcggctaagggaaagatttttacaaagatcggaagagaacttgctgtggcggtaaaagaaggcggcggaccggatccggcaaataacagtcgtttgcgcgatgttattgcaaaggcaaagtcgaataatatgccgaatgatacgatcgagagaaatattaaaaaagcagcaggcgaaggagcgggcgataattacgagcatattacatatgaaggatatggtccgaacggaacggcaatcatcgtaaaaacattgacagataataaaaaccggacagcttcaaatgtacgcaacgcgtttacaaaaggaagtggaaacgtaggcacgccaggttgtgtatcatttatgtttgatgagaaaggccagatttttgtggcaaaagaagactgcagcatggatgcggatgaactgatgatgcttgcactggatgcgggagcggaagatttcgcggaagaagaggaaagttttgaaattttgacagatccggctgcatttagtgaagtgcgtctgaaattagaagaggcgggaattgtaatggcaggagcggaagttacgatgatccctcagacttatgtcgatttgacaagtgaagaggatattaaaaatatccagaaaacattagatcttctcgaagaagacgatgatgtccaggacgtatatcataactggaatgaataggcgattcagggaatgcaggcatacaaacaggaaaaacgcaggaggacaaagaagatgagcgattacagaatcgaaacaaaatgtatacagtcgggatatgaacccggaaacggagaagcaagagtacttccgatttatcagagcactacatttcgttatacgagcagcgagcagatgggaagactgtttgatcttgaagagtcgggatatttttatacgcgtcttcaaaatccgacgaacgatgcggttgctgccaaaatatgcgatcttgaaggcggatatgcggggatgctgacatcttccggacaagcggcgaatttctatgcaattatgaacattgcggaacagggagaccatatcgtatgcgcgtcggctttgtatggcggtacatataatctttatgctcatacaattaaaaaaatgggcgtagatgctacatttgtagatccggattgttctgaggaagaactggaggctgcatttagagaaaacacaaaagcggtgtttggagagtcgattgccaatccggctcttgttgttcttgattttcaaaaatttgcaagtgcggcgcacagacacggagttccgtttattgtggataatacgtttgcaacaccgattaactgccgtccgtttgagtggggagcagatattgttacccactctacaacaaaatatatggatggccatgcggcgtgtgtcggaggtgcgatcattgacagtggcaattttgactggaatgcccatgcagataaatttccgggacttacgacaccggataagacatatcacggaattgtatatacagaaaaattcggaaaaggcgcttatattacaaaggcaacagctcagcttatgagagaccttggttccattcaggcgccgcaaaatgcatttttgctgaatatcggacttgaaacgcttcacttaagagtgccaagacattgtgagaatgcgttgaaagttgcaaagtatttgaaaggacatgataaagtagcttgggtaagttatccgtcgttggaaggagataagtattatgatctggcacagaaatatatgccaaacggtacgtgcggagtgctgacattcggtctgaaaggcggaagagaagcagctgtggaaatgatggataaattgaaaatggtagcaatcgtaacccatgtggcggacgcaagaagctgtgtgcttcacccggcaagccatactcatcgtcagatgaacgagcaggagttgaaagaggcgggagttcagccggatttgatccgtttcagtgtaggaatcgagaacgccgaagatattattgccgatgtagagcaggcattaaaataattcttaaaaaatggtatggatgtatacaatttacatctgtgccattttttgtatagacgacgagtgaaagtttgttccccacctatactttggtgactgcctacaattctgaaatgtgttttttggaaaattgtttcctccaaaactgcataaaatatctcgatttttttcatactgattttaaagatatcggatatcttttgatacgaatattttttgcggtatgaaggaggaggcaaaatggctgaagagcagcaaaaaagagaagacgaaaataacgagatcaaagaaatgggaactcttaatatgaaagagagcggttcgaaatacggaattcaattactgacgatcataggggaaatcgaaggtcatgacagtgtttcaggaaacacgaaagcaacgaaatacgaacatcttcttccgagacttgcacagatagaagaagatgatgaaacagacggagttttaattttattaaatacgcttggaggcgatgtggaagccggactggcaatagctgaaatgatcgcatctttaagcaagcctacggtgtcgctcgtacttgggggaagtcattcaatcggaggcccgctggctgtgtcggcagattattcctttattgtgccgacgggtacgatgatcgttcatcctgtgcgttctaccggaatgtttatcggagtgatgcaaagttatcgaaatatggaaaaaacgcaggatcgtattacaaaattcattgcgtctcattctaacatcactcaggatcggcttttagaattaatgcttgattcttcgcagcttgtaaaagatgtaggaacaatgcttgaaggagagcaggcagtaaaggaagggatgatagatgaggtcggaggaatcaaagaggcttttgcaaagcttcactcattgatcgacaaagagaaagagaaacaagagaaaaatttgatgacatgattttcaaatgatgatatactaaatatagtatgtttaattaccaagggggaattatatggcttccaagactacaaaaggaagaaaaaatacaagatcaaagaaaaagacgagaacgaaagcgaaaagcagcaatgcaaaaaatacagaacttgcgggggaaattacgatacttgttatattgacagtgtgcattctgcttgttttgagtaattttggtattggcggaattgcgggggaggcagtttcttctgtactatttggtttgtttggatatatggcatatgtattgccgtttcttgtttttgcggccgccgctttttttatttcaaacagaggaaatacacatgcttatataaaaatcgcggcaggagtatttttgttcttatttttgacggcaatactggaattgatatttaattcttatacgccgggaacaaaactgatttcatactatactgctgccagtgagcatcataatgccggaggtttgaccggaggctgtatgattagtatgctctgccctttgatcgggaagataggaacatatgttgtcttagttgttttatcggtgatatgcatcatattgattacagaaaaatcattgttagctccgatcggccgaaaaagtaaaagagcatatgaggatgtgcgaaggaaacgtcaggagacggcagttttaagagcaaagcaaaaggaagagtcaaaaacactgtctgagagtcggaaatcgggacaatctttgaaaaaagaagaaaacgagccggagaaaaggatcgatcataaagtgtccggtgtttcatttgcaacgactcttatgtctgaagcagaaataccgaaaaaaggcagaaggaagaataaatcgccggatgtgtgcgaattgatacctgataacgaagcatttgtcattaatcgtgaagaaccttttatggaagcagaacctattcggcaagaggggaaagaacagcagtatgaggctttgcagcagacagatacattcacgcctttagaagaaaaggcagaagaggatcttcagaatcagaaaaatacgtcaggaagaaaaaacaaaaaagaagattcccaagcagtggcaagggaaactcagaacgtggccgatgcggtgagaatagaagagcagaaggaacatcctgtttatcatacacctccgatcagtcttctgaaaaaaggaaggaaagccggtggagattcagatgcgcatcttagagctacggcgcttaagttagagcagacattacgcaatttcggagttggcgtacatgtgacgaatgcaagttgtggaccgtccgttacaagatatgaactgcagccggagcaaggggtgaaagtaagtaagattgtcggtctttcagatgacattaaattaaatcttgcagtggcggatcttcgtatcgaagctccgattccgggaaaagcggcagtgggaattgaagtgccgaacagtgagaatacagcggttatgcttcgtgatcttttggaatcaaaagaatttcaggcaagcgcttctcccatttcgtttgcggtcggaaaagatattgcgggaaaagtagtcgtttcggatattgcgaagatgccgcaccttcttgtggcaggagcaaccggatcgggaaaatcagtttgtatcaatacgttgatcatgagtattatctacaaagcggatccggaagaagtcaaactgatcttagtcgatccgaaagttgtggagttgagcgtatataacgggattccgcatctgatgatccctgttgtaacagatccgaaaaaagcggcaggtgctttgaactgggctgtagcagagatggagaagcgttataaactgtttgctgattataacgtgcgtgatctgaagggatttaatgaaaagatagaacaaggtcagacaggagaggatattcagaaaaagcttcctcagatcgtaattattattgatgagctggcagaccttatgatggttgctccgggagaggtagaaggtgctatttgtcgtcttgcacagcttgcgcgggcggcaggactgcatttgatccttgcgacacaaagaccatctgtcaatgtcattaccggtcttattaaagcaaatatgccctctcgtattgcattttcggtttcgtcaggtgttgactcaagaacaattatagatatgaatggcgcggaaaaactgctcggtaaaggggatatgcttttttatccgtcaggatatccgaaacccgttcgtgtgcaaggttcattcgtatcagataaagaagttcaaaatgtagtcgattatctgatcaatcacagtgaaagagtttcttataataatgaactggaagagcatatggtcactaatattgtgtcatcgggaaatggaatgcaggcaggtgaaaacggtgatgaccgtgatacatattttatagaggccggaaagcttattatagaaaaagaaaaagcatctatcggaatgcttcagagaatgtttaaaatcgggtttaaccgggcggcaaggattatggatcagcttgcccaagccggagttgtaggtcctgaagaaggaacaaaaccgagaaaagtattaatgacaaaggaagagtttgaaaactatttacaaaagggaaattaggaggtagaaaatgaagacagatattcagatcgcacaggaagcaaaaatggaacacatcaaggatgtggcggcacgggcaggaattgaggagaacgagctggagttttacggaaagtataaagcaaaactttcagatgagttatgggagaagattaaagatcgtgaagacggaaagcttgttcttgtgacagccattaatccaactccggcaggcgaaggcaagacgacaacatctgtcggtttaggtcaggcaatggcgaaattgaataaaaatgcgattattgcacttcgagaaccatctttaggaccttgtttcggaatcaaaggcggagcggcaggcggcggctattcgcaggttgtgccgatggaagatctgaatcttcattttacgggagattttcatgcaatcacgtcggcaaataacttgcttgcggcgatgcttgacaatcacattcagcagggaaatgaacttcagatcgacccgagacaggttgtatggaaacgctgtctggatatgaatgatcgtgtgctgagaaacattgttgtaggacttggaaataagatggatggaatggtgcgggaagatcattttgttattacagttgcgtctgaaattatggcgattctttgccttgcagatgatcttgcggatttaagagctcgcctgggcagaatcattgtagcgtataattttgcgggagagccggtgacagcagatgacctgcatgcaacaggggcgatgaccgctttgttgaaagatgcggtgaaaccaaaccttattcagacacttgaacatacacctgcgcttgtacatggcggaccgtttgcaaatatcgcgcatggatgcaacagtgtgcgcgcaacaaagatggcgctgaaattaagtgatattacgattacagaagcgggattcggagcagatctcggagcagagaaattcttcgatatcaaatgtcgtatggcagatgtcaaaccggatgcagttgttttggttgcaactgtacgagctttgaagtataatggtggggttgcgaaagcagatttagcggaagaaaatctggatgcactcgcaaaaggaattgtaaatcttgaaaaacatatcgaaaatatacaaaaatataaggttcctgttattgtaacgttaaattcttttgttacagatacagatgcggaaaatgaatttatctgcaggttctgcgaagaaagaggctgtgaatttgctttgtccgaagtatgggaaaaaggtggagaaggcggtattgcacttgccgaaaaagtattggatacattggaaaacaaaaaatcagactttgaacttctttacgaagattccctttctttagaagaaaagatcgagaaaatcgccaaagaaatttacggagcagacggtgtcgtatatgagccggcagcaaaaaaacagattgcaaagatcgaatcattgggattcggaagttttccggtatgtatggcaaagaatcagtactctttgtctgatgatgcaaaaaaactcggaagaccgcacggctttgacatccacatccgcgaagtatatgtaagtgccggagcaggatttgtagttgcgctgacaggtgcggttatgacgatgccgggactgccgaaagttccggctgcaaacggaatcgatgttacggaagacggaacgataacaggcttgttttaaaggagaaataaatgccatacattattgatggaaaagcaatctcaaaacagattaaagatgagttgcgcgacgaagtagaaaaattaacagaggcaggcataaatgcctgccttgcagtgatacaggtgggaaatgaccctgcttcaactgtatatgtgaataataaaaagaaagcatgcgcgtatgtcgggatcaattcccggtcatatgaactgccggaggatacatcggaacaaacattgttggatcttgtacagaaattgaatgaagatccggaagtaaacggcattcttgtgcagcttccgctgccgaaacagatcgatgaggacaaggttatccgtacaatttctccggataaagatgtggatggctttcatccggtaagtgtgggaagactctggatcggagagaaaggttttttgtcatgtactcctgcaggagtgatccaacttttgaaacgatcgggaattgagattgaaggaaaagaatgtgtgatcatcggcagaagcaatattgtaggaaagccgatggcggctcttttgctcagagaaaatgcaactgtaacagttgcccattcaaaaacaaaagatttgaagagtattgccaaaagggcggatatcttgattgtagcgatcggtaaagcaaaatttattacaaaagattatataaaagaaggagctgttgtcatcgatgtaggaatgcatagagatgaacagaatcatctctgcggagatgtggactgtgaagatgtatcttcggtcgtttcggcaatcactccggtgccgggcggcgtcggaccgatgacgatcgccatgttgatgaataattgtgtggaaacaatacgcggtcgggaggaaagagcatgaaatgcgtgcattgcggagcaaatattcctgatgatcaaatgatctgccccgtatgtggagccgaagtacagattgttcccgattataacccgctggatgatgtacttgcaagagaagtaagagggtcggttgaaggagcaacacgacagatacggacagatgatatcagaagatacagaagagaagatctgacaaaaaatattaattctacccgtgttttaagcgaggacgagatggagcgtattcgctcaaaccggagaaaaagtacaaataatactgaaagaaattcggcagaactgcgccgacaacgtcaagcccggcagcaaaaacgtctggaagcggcgaaaagaaagaggagaaggcttttgcttacactggcggcagttgttatattgatcggatttggtatttatgtggcatatcagaattcttatacaggaatgctgaaaaaagggtaccgtgcagttaatgagaaagaatatatggcggcagaaaaatatttcgatcgtgcgatcataaaagataagtcaagaccggatgcatatgtaggtcttgcggaaatttatctggatcaaaatgatacagacggtgcggaagatgtttatttgagcgcgattgaaacacagcccacaaacgaaaaattgtatcaggcagcaatcgatttttatatggagacaaaacagcctgaaaaggtggcatctcttcttgaagactgtgaagatgataacgtattggcttcggtgtccgaatatgtttgtgaagctcctgaatttaaacccgaagagggaacatacaaagaggttcaggagattacgatcagttcggatacggaaggtgaaatctattatacgacggacggaacagatccgactgcgaagacagggaaaaaatataaagaacctatcttactggaaaaagaaggaacaacggagattcgcgctattgttgtaaatatgaaagggattccgagcggagtgatatctcagacatatacgattgaatttcccattgcagatgcccctgcggtgacaccgtctaccggccgatatacagatcctcagaagattacgatcacagtacctgacggatatactgcttattatacgacagacggatctgaaccgacagcttcatcggaaaaatatacaggaccgatcgatatgccggcgaatacaacgactacatttaacgctgttctcatcaataaccgaaatggaaaagcgacggaagtgacaacgcgaagctacattacaacagcagaatagagtatgtgaaaaacaaccgtgatattatgtgaaagttacatatgttttatgcaatttttacaaattcagggttgtttttttgaattaaaagagttataatatttatgttaagaaaataacaatattcaaataaaggagatgtcggaaatgagcagattttgtttaccaagagacatttatcatggaaaaggatgtcttgaagagttgaaaaacctgaaaggaaaaaaagcaatcctcgtagtaggcggaggatctatgaaacgtcagggatttcttgacagagcagttggatatttaaaagaagcgggaatggaagtgcagttgtttgaaggcgtagaaccggatccgtcagttgagacagttatgaaaggcgcagaagccatgagagcatttgagccggactggattgtatctatgggtggaggctcaccgattgatgcggcaaaggcaatgtgggcattttatgagtacccggatacaacatttgaagaattatgtacaccgtttaactttccggagctgagacagaaagcaaaattctgtgcaattccgtctacatcgggaacagcgactgaagttacggcgttttctgtcattacaaactatcagacaggcgtaaaatatccgttggctgactttaatatcactccggatgttgcgattgtcgatccggatcttgtcgcaggtcttccggtaaaacaggttgcatatacaggtatggatgcgctgacacatgcgattgaagcatatgtttccacattaaacggaccgtttacagatccattggcgctgcaggcgatcgagatggtattggattatcttccggcatcatataactgcaatatggatgcaagagaacagatgcattacgcacagtgtctggcaggaatggcattttcaaacgcacttcttggaatcgtacattctatggcacataagacaggcgcagctttctccacaggtcatattccgcatggatgtgcaaatgcgatttatcttccgtatgttatccagtacaatgcaaaagattctgtagcggcaaaacgttatgcagagatcgcgcgtagaatgggactggaaggaaattccgaaaaggctcttattaacagccttgtagctaaaatcgatgaattcaacgcaaaactgaacataccgaaaacattgaaagatttcggtatcaatgaagaagaattcaaagagaagattgctaagatttccgagcttgcggtaggagatgcatgtacaggatctaacccgagagcgatcgacccggcagctatggagaaactgttcacatgtacatattacggaacagaagttgacttctaaaatttaacacaaaaatacactggtaattgataaacaataaagtgatatcaaccttttaaatagtgattttacacaaaaacggttggcaggtgtgaactgtaaagtcgctgtcttgatagaagtatcgtgacagcggctttttgtaatggagtcttttggcacttacggagatttgaacttgccatagagtggattttggcgtattatagttaagagtgaaattttcaaggaggaagaccatgtataagataatgaaagcagaaaaactggcagacaagatctttttgatggatgtgcacgcgccgcgtgttgcgagtcattgtgagccgggtcagtttgtgattgtaaagatggatgagaaaggcgagcgtattcctctgactatctgtgactacgacagagaagcggggactatcacgatcgtcgttcaggaagtgggcgcttctacgacaaagatgggaactttgaaagagggagattatttccgtgattttacaggaccgcttgggtgcgcttctgagtttgttcatgaagatctcgaaactttaaaaaataaaaaaatgctgtttgtagcaggcggtgtcggagcggctccggtgtatccgcaggtgaaatggctcaaagagcatggtatagaagctgatgtgattgtcggtgctaagacaaaagatatgttgattctggaagatgagatgaaagcagttgcgggaaattattacccgtgtacggacgacggtacgtacggacatgccggaatggttacgacaatgatcgaaaaacttgtaaatgaaggcaaaaagtatgatgtctgtgttgccatcggaccgatgatcatgatgaaatttgtctgtattttgacgaaaaaacttgaacttcctacaatcgtcagcatgaatccgatcatggtagacggaacgggaatgtgcggagcatgccgtcttcaggttggagatgaaatcaaatttgcatgtgtagacggaccggagtttgacggacatcttgtagattttgatcaggcgatgaagagaagccagatgtataaaactgcagaagggcgcgccttactgaagcttcaggaaggtgatacccatcatggaggatgcggacattgcggaggtgacgagtaatggcagatgtattgaaaaaagttcctgtcagagaacaggatgcaaaagtacgagcaacaaattttgaagaagtttgtcttggttataatatggaagaggcgatggaagaagcttccagatgtttgaactgtaagaatgcaaagtgtattcagggctgtccggtttctattgatattcctgcatttattcaggaagtgaaagaaggaaacatcgaagaagcatataaagtgatcggaaaatcaagtgcgcttccggcaatttgcggacgagtatgtccacaggaatcgcagtgtgaaggaaagtgtatccgcggaattaaaggtgagccggtttcaatcggaaaacttgaaagatttgttgcggattatgcgttggatcatgatattaaacctgtcggtgcagaagagaagaacggacacaaagttgctgtaatcggttccgggccgtcgggtcttacatgtgcgggagatcttgcaaagcttggatatgatgtgactgtatttgaggcgcttcatgagctcggcggagtgcttgtatacggaattccggagttccgtctgccaaaacagaagattgttgcgaaagagatagagaaagtaaaagaacttggcgtaaaatttgagacaaatgttgtgatcggaaaatccacaacgatcgatcagcttatggaagaggaaggatttgaagcggtctttattgggtccggagcaggacttccgatgtttatgggaattccgggtgagaatgcaaacgaagtattctctgcaaatgaataccttacgagaagtaatctgatgaaagcatttgatgattcttacgatacacctattgctgccggcaagaaagttgctgtagtaggcggaggaaatgtagcgatggatgctgcaagaacagcacttcgtcttggcgcagaagtacatattgtgtacagaagaagcgaagcggaacttccggcgagagttgaggaagttcaccatgcaaaggaagaaggcgtaatttttgatcttttgacaaatccgaaaaagattaatgtagatgataacggaaatattacaagtatgacagttgtaaagatggaacttggagaaccggacgcttccggaagaagaagacctgtagagattgaaggctcagagtacgatattgaagtcgatactgtaatcatgtctttaggaacttcaccgaatccgttaatttcatctacgacaaaaggtttggatgtaaaccgcagaaagtgtatcgttgccgatgaggaaaacggacagacatcaaaagaaggtgtgtttgcaggcggcgatgctgttacaggtgccgctacggttatacttgcaatgggagcaggaaaggccggagcaaaaggaattgatgagtatttgaaaaataaagaaaagtaaaaagcaataaaaagcaataaaaagcaataaaaagcaataaaaaggggctctctttccgggtttggagagggagctttcttaatactttttaaatgaatggaaaagtaagcaaaaaagactttgcatttagtcggcattttggagaatcacatgatagcagaagagaaaaaaatctggaagataagggaacaattagaagatcttacagaagaaaattataaacaatttaatgagaaactccttcccggagtaaaacatatcataggagtgcgccttccggctttaagaaaaattgcgaaggaaactgcaaaaagcaattacagcgaatatttgaatgaggcagggacaatgcttggagaggcttcatatcacgaagagtttatggtatgggggcttgttatcgcttatataaaagcggatagaagtgaagtggaaaggcatttggatgagtttgttcctaaaatcaataactgggcagtgtgcgacagctgtgtgacaagttataaatttatgcagaaagaatcagatttttggtttgactatgtgaaaaaatatgcagaaagtaagaacgagtttgaacttcgttttatgattgtttcacttatgtctcattttctggataaggaacatattgatgaaatactcactatttgcggaaagatagatcatgacggatattatgtgaaaatgggaaatgcatgggcgctttcggtatgttacgtaaaatttccggaaaagacaagggcttttcttgagaaggatacgttggatgattttacacataataaagcaatacaaaaaatcagagaatcttacagagtcagtaaggaagaaaaagaacaactgacttgtttgaaacgctgaaaataaaatcaaagaaaagacagactggagaatcagatggaagcagataacaggcagtttgacggaaaactttttctgaaagatgtgaatagaaagctaaacgaccggttggcagaaattcaaaaagatcttaatcagggattaaaagaaattgaaaatatgcatgaatattactgggaaaattatacggaaatggatcagtacggatatgaggactatgacaatcagcaggcgctcttacagcaggtaaatgcaaacagagataagtcaaagttgatgaaaagacttgaaaaaatgattgattctccgtttttcggaagggtagatttcctgtttgaagcagaagaagaggaagaaccgttttatatcggtatcggaaatttcggagagcgtgcgggaatgacgcctcttatttatgactggagggctcctgtgagcagtctgttttatgactttgataaaggtgaggcattttacgaagcgccatcaggagtgatcaaaggagaggttgtttcaaaatggcagtataaaatacgcggcggcaagatgatatatgggtttgaaagcgatgttaagattgacgatgagatcttaaagcatgagcttggaaacaacggagatgtcaaactgaaaaatattgttcgaacgattcagaaagaacaaaatgcaatcatccgaaatacgaaggataaaattcttgtcatacaaggcgcagcgggaagcggaaagacttcgatcgcccttcaccggatcgcttacttgctttatcacgacaggaaaaatttaaaatcatcgaatatattgattctttcaccaaacagtgtgtttgcagattatatttctcatattcttccggaacttggcgaggaaaatataaaagaaatgagttttgatctcttcgcttataaagaacttcaggacacggcggcagactgtgaggatagatatgatcagttagaacgtatgatgaagtttgatgatcgaagagcgcaggaacgttttgagtggaaacagtcggcgggatttgtaggcgaggcagaaggttttttcgcggtacttgaagatgagctgatggaatttcgagaggtggagttcagggggatgcgtttttcggaagaagaaatcattcatttgttttacgataagttttatcagataccgcttctgaaaagaatggatgcggttatggaatattttattgattcttatgagacgttaaaaggcagaaatattgaagaggaagacagagaatttcttcagagaaagtttgacaaaatgtatgtaacgaaagatatttatgctatttacaataaactgcttgcggtatgcgggcaggaacaaatggcagaactgccttatgaacgaaggaaaatccaatacgaagatgtatttccgatgctgtatgtaaaatacagactgacaggaaagaatgagcataaaaatattaagcatcttgtaattgatgagatgcaggactactcttatttgcagtatcttatcttgaaggaactgtttgactgtaaaatgacaatactcggagatcgtgcccagactttgggaaaagaacaacaggatgttttaaaattccttcctaaagtatttgggaaaaatataagaaccgttattctgaataagagttaccgcaatacgagagaaatcgcagattatgccggtaagatcgcgaatgtgaaagatattgaatttttggacagacatgggaaagatgtggcagaaagaaaattcaaaactgacgaggaaatgtttgaggctgtcagagcaaatttaaagcttgaaaaagaagaaaaaactgatcatacagatgatgtcgtgaatgaagaagtatatgagacggctgctgtcatagccatgaccgaagaagaagcatcagatatttacagacttttggaaaatcgcggaatatctgctttttatgtagacagggatacgtcggtatttcataaaggtttgactgtgacaacatattatctggcgaaaggacttgaatttgatcaagtttttgtcgtaaaaagtaaaaaagaaaatccgtttgaaaaacaggcattgtatatcagtgcgacacgggctcttcacgaattgtatgtgtacgaagaataagaagaaaaaacgaaggttatattgatttatggggaataaacaaaaaagatgaagattacattgatcactgtaggaaagataaaagaaaaatatttaaaagatgcgatcgcggaatattcaaaaagactgagtaaatattgcaaattgactatcgtagaagttgcggatgagaaaacgccggatcaggcgagcgaaacagtagaagaagcgatacgaacaaaagagggagaacgtattttaaaagttataaaagatgatatgtatgtgatcactctggaaatcggaggagcaatgctttcatcggaagaactttctgcaaagattgaaaaactcgggatacaagggaaaagcagtattgcatttataatcggcggttcgatcggtcttggaaaaactgtgcttgcaagatctgattatgctcttagtttttccaagatgaccttcccacatcagttgatgagagtgattttgctggaacagatatatagaagttatcgaatcataaacgcagagccgtaccataaataacaaacggaaaattatatttttgattcaagttttcgttctgttacagtgtgaaatattttttcaaaacaaagagcgtacaaagacccgaaaatgttttgagcgattctgaaaaatacggcttgcggaaaaccgatgacactgacggcaatcatcattgctcccaaagaattaaatacagcctgccatccatagcttgcggaaaatccgactccgatgcctccgacgataccgactacactgtaaagcccggcaggaagatgaggaaaaataaggaaaaagatcagtcctccgagcagattcccgggaatacgcccgcatacatgcttcttaatatctgttcgaaacggaagcaggacggacattgcggcgattcctgcccacatcgctcttggaagatttaagatcgaggcgataaaaattacgcttgaaacggcagaagccattaaaagctgccaacggcttctggaagaatgaagattaaattcgttaaaaagatcacgcagtccgcgtttatatgttttctttctatgattgcgccagaaaacgactcctgtcagtataaatccgaataacatggcaaaaaggcgcattgtataggcgcttccggatgcatcatatccaaagagaagaagatatccgagcacaagggttgaatgattgtaataaattacgttgtggcatcccagtaccataagaatccatatgcatacaaagtttataagaagtcctccgaatgctcccaacagattagccgctttcggtccgaatgtaagaataaggaaaatagcggaaagtgacaaaaggctttgaggagcatggatgcccaaatcgacatttcggaatacaagaatacagagaaggattacaacgcctacgatactgttatcatttccgaaaatcatactgtatgcagtaacaaacgcaacacagaatgctacatttataaaaactttaaagatataaataaaaagatgatgtagtttttcttttggcgttttacaatttttaataagggattttgatcccgcctgattaagctgaagttcttgataaaatgtcatgctgttattcacctcgattgaatttctgatagtcaacgaggcattatactagcggacacatactttgtcaataaaaaatatccgattgttatggaagccttgtagcagttcggttcgcgccattcataaaaccgcactgcgtgcttattgtggcgggatattcaagaaaaatgaataatgagaaaacagatgatgtatgagaggataaaattttaaagaaagtctaactattaaaagtcaaggttaaaatgaagattttttgagtaaattgcagaaatgcttttcagatatatttgaaccttgaaaactgcatgaca

SEQ ID NO: 7651 - DNA, 6824 bp, Unknown
  gut microbiota DNA sequence
gtcatccttactgccggttgtgcaaaatataaatataacaagttgcctttaggcgatatcaatggcatcccacgtgttctggatgcaggtcaatgcaatgattcctattcccttgctgtaatcgccttgaaactcaaagaggtctttgggcttgacgatattaacgatctgccaattatctataatatcgcatggtacgagcaaaaagcagttatcgttcttctggctcttttatatcttggtgtgaagaatatccaccttggccctacacttccggcatttctcagcccgaatgttgcaaaggtcttggtcgagaacttcggcattgcaggaattggcaccgtggaagaggatatggagaagtttttcggtattaacgcataaataatactccgtcaaaaaaatagatccaacaggcataaagaaacctcggaaacccttgtaaaatgggcatccgaggttttctgtctgttattcgaatctgacaacgcctaatcaattttgtttagatattattcgttatcgtgtttatagttcttttgattatttgatttatccatattatcctgcctatacgagctaatattatcattttgttttcagacttgctttccaccatacaccttttcttattgataaatcatctcattatccacaatctccctcgcacacgtttgtatattactcattctccctatccattttaaggtatcatctgcctttaactattctgtaatcccctgccccctgcgcctgtttcatctgctctacaatcctttcaaagcgttcttgtgcctgttcttctatatctgcaagataactattcagcctgccacttgtaagcagagtaatataagccgctctcttatgttctttcaaatagcgtttatgcctttgtccccatacaccgataaatctctgttcttcttcctccggcaaggtaagacaggggataagataatccccgtgtctgatataaatgccgcccatttcttcaaatattgttttcttcataatcgtttccacctttcttatcgttctctatccatagattttttcttaactgaccgtttcggttgctgcctgccttcctgctgatagcggtgcaatttttccagtacactcgctttttggggctgttctaacggattctctttcttcggtttcgtctgatttttccacgctctcagttcttcattgtattccataatcagttcttctgccttgttataaaccttctgaaaggattgcacattgggataaccttcccgttttacgatccgccccatactcctgtgcaaacgcttttccaaatcctctaacagctcaattttcccttccagagattttcgttctttgcctttaaatagtcctcgtaactctgacagttgctttttcaaagaagaaatatcctgttgtgtgcgttttatctcccttgactgtccctgtaattcatacatgagcttctgcatatccttccattcctgcaagtcaatctttggcacagttcttggcggcagcttaaatttgaaaatcacctcctgtaaaaagtcttttgctcctcggataatctgacggaacatatccggcagccaaccgtgtgtcctgatagattgcagcgtttcgtctgtgattttttcctgcttaatcttcaaaatatcttcttcaggaacaccctcaaccaatgccacatcaactgtccgattccattcctgccttgccgcattgtctgcctttatctcctccgctttcggattgttctttccgattttcttcattgccagataaacaccgccctgttggaatacagaaagtttttctgattcttcttttacataacagttaatcgtatcggtaaacagttctttaacttctttggtaaaggctttgttcttaaaccattcctctttttttgtgaagatatgactttcatatacttcccctttagggataatactgcacccagctcggatatttccctgcacgtctaaaatctcttttttcgtgcgtctatgctttccctgctcatcataaaacatatttcgggtggcaatcttcacttcgggctgctccaacattttccgttcactgaataccagatgaatatgataattcgtctttgtcttgttgtgatgaagggctgcgctgcactccacgccatatcttttatggaaagtttccgtaaaaagtcttaccacatcatctgccctatactgaacaaaactttcgggaagtgcaataataaactcacgcccttcgatacatttccctgccgttcctctcgccttaaaatccaactgattttctcttgcaagatttttccaaaactcaggtgttgccccttccgtctgataggtagcatagagatgttcctgccttttgggattggaaatataatcaatacgccctgccacatcggacagcttactttgtctgataaatgaatgtctgcctataagcatcctcctttctcggcttgcgccggctttactgtgagtaggtgcataggcacctgtttacgaacttatccgcctatcggcggcttgccccctgcaagggcgaaatacgccgagcataaacgaagtttgtgcgatgggtgtatttcgctctcaaacgccgagggcttgtttttgtttaacaaaatccgattacttctcggactcatgcttagatttatgggcgtatccgccctttttctctgcccgtatccgggctgctttttctatgactgacagcagattatctacggtactttcttcccatccggcaagccagatcagagttttttcctctgcttttgtcagttccacgtctgtccagatattcttttcttgcccgttcccgttcttcctttgtcggtgcagtttttgattttccaaacaggtcacgcatgaccatcttgtccaattttttctccaactccttcttaatttctttctcgcaactctcatcttcaatcaaatgaaagcggagcagctgcataaataattcctgtgatatttgcacatttctcatcgtatcccatcctctctgtgacggtatgtgacagttgtgacggttattttaatactgcccccgttgtcaaaaataccgtcacaactgtcaccaactgtcacgctgtttccgtatcgtctttccaaaaccgtatttttcttccatcatgggtacggttgttcttataataaatgccatgttctgcatacaatctccctgaaagaatgttcagttttcttgtaataacgtggggctgaatttctacctttatcagagaaaccagttccgttgctgaaccttcccaagaagaaatgtccttcataacaagttcggcaatctcatccagtaaaggttcaggcggctctttccacaattcggtttctgccctttgcagctcccacaacaaagtttccgtattacggacaaggtatagtttttggtcttgctgatccctgcctgatacttccaaagttgctgcattgcctgtccgtttttctttctgaaggagaaacgctccgtctgccgcaccaagcagtccacttgtccccgaaatcatatcaaacttatcatccgccgtctgtttccttgtgtggtgtacaagcaggatacaaagaccgtgggcgtctgcaaaacttttcaatcttgccataatctgataatcgtttgcataactataattatctccgccaacttcacgcactttctgaagggtatcaatgataatcaatttcgtgtccgtatgctctgccacaaaccttgcaagctgttcatccaatccttttcccagctgaccagccgaaacagagaagaaaaggttgtctgcactctctgttccaaacatccggtacaaacgttcctgcaagcgacggtaatcatcttcaagggcaagatacaataccgttccttttcgggtggtataattccaaagtggtgtgcctgtgctgacatggtaggcaagctgtgccatcagaaaactctttcccaatttaggagaacctgcaaaaatataagtgccggggtagagcagaccgtcaattaacggcggcttgctctgatactgggtgtcaaacagttcattcatggaaactgctttgagataagaggggtctaaactcaactgcatttctctttgcatttcctcaaaactcttgatattttcttcatactcgtatatactattttcagcgattttttgaatcggctgctccgtatctgcgccaacagatacattcggggcagtcatttcttttttattttccattctcatcctctcctttcagaccgccaagaataatggaaatcagttcaattacattcatcagttcctcatccacgctgtttcccgcttcaatcctttttaactctgtaaggacagaatcaagttctagtttgagcgccttatacactctcggattgccctgtaccaccacatcctgattcaaacagcggcggtaacagtattcctgttttggcaatcccgataaggcaaccgccttgttaataagttcattttcttcgggagatacccgaaaccctaccgtaatgtttctccaacgatttttgttatccctgttcttagctgacattttcaacctctcctttccctaaatcatctaatctatctgccatttccgtctgttttgacgggaacagatgagcgtactggtaagtgatgtcaatgctttcatgccccacacggtctgcaatcgccaccgctgaaaagcccatatcaatgagcaaacttatatgactgtgacggagatcgtgaatgcggatacgctttacccctgcggcatttgcccctctgtccatctcgtgatggagataactttttgtgactgtaaagatacggtctttcttctttaatccgtaaagcatactcagatattcctgcatttcctcacaaagaaacttcggcattttgatcatgcggttgcttttctttgttttcggtgtggtaatcacatcttctccgtgtagccgctgataagatttattgattctgacggtttctttctcaaaatcgaaatcggctgcggtcagtgcaagaagttctccttctcggataccgcaccaatagagcatttcaaaagcgtaaaaggaaactggtttgtccatcatttcaaaagagaatttcttgtattcttcttttgtccaaaacagcatttccttgtgttcctcacttcccatatttcctacttttgcggcaggattggaacgcagctcatagtaacgtaccgcatgattaaatatggctgacagttgattgtgcagcgtttttagataggtctgtgagtatggctttttcttctcatcccgataggcaagcagttcattctgccatgtgataatctcttttgtggaaatctcgctaatccttaactttccgaaatacggaagtatcttcgtgcggatgatatgctcctttgtcagccatgtgttctccttcagacgtgttttcacatcccggatatacaattcggtaaaggcttcaaaactcatatcaaggtcagaagcattctgtaactggaacatccgctcccattcctgtgcttctttcttggtagcaaaaccacgtttacatttctgcctacgctcgcctttccagttcacataccttgccatcacataccatgttccattgtcctcattcttaaataccggcattatttttcctcctttcctgctccgtagagcctttcatagaaatactggcggttcacacgccccgcaatcgtaataaagcccttttctttcaattcctcattcaactgtcgaattaacttataggcataaggctttgatacgcttagttcctgtgccacttctccggcacgaataaatttgttatccatagattgccctccttcttttctaaacttatttgcttaatttcgaattcattatactaagcatatttgcttgtgtcaagcggttttttgaaaaatattaaacttttttgttttgtattatcttgacttctcctaaacatatctgctatactgattacactacatatacaaggagcgatgatgatggctattggagaaagaatacattttttccgcattctgcgtggaatgacacaaaaatatcttggtacgattgtcggttttcctgaacgaagtgctgatgtacgtttagctcaatatgaaacaggaacaagaaaaccgaaggcggaacttactgctgcattggcacaggcacttgatgtttcccctcatgccctcgatgtacctgacattgacagctatatcggactgatgcacactttgtttacccttgaagatctgtatggtctgactgtcagcgaagcagacggagaaatctgtctgaaagtcaacaaggaaaaaggaaaaaacgcccacgaactactaaaaatgctctatgcttggaaagagcaggcggacaagttatcttccgaagaaatcagcagggaagaatacgataactggcgttaccactatccgaagttcgataccacacagagatgggcaaaagtaccctcacaggaacttagtgacgctttggttgaaatgttcaaagaccaactcaaaccagataaataaagacgacaaaaaacccttagccatgagtttcatacccacagctaagggcttagtttataatatggatttatttgttgcacaaccacctgtcaatcattctttaaccgcaaaaccattggattacaagaataatggctcttatgcaactgttatcaatttgttatcaaaagacttcttgaagtgccgcaaccccgcataaatactgggtttctttgatactccaacttattcgaactcgcaaagttctatctgctttgtagt

SEQ ID NO: 7652 - DNA, 26240 bp, Unknown
  gut microbiota DNA sequence
atatcataaccatacctgtagaaaaggtaaagaatggttatgatggaaatagcatacagaccttggagagggtctataaatactactactttataatacgagagaggacgatagtttgaaaagaaaaggaatttggaaaagaggagttgtggtgagcggaatcatgttggcaatgaatttgtccgggtgcagtttttttgtaaaaaaagattcgggaaacacagacattcaatcagtacggcaggaaagtgaaaatgcggataaaacagtaatgaaacgaagtaaatcagaagaaaaagaagcagaagaaatactggaaatttgcagtaagacttatgcgaaagctgaaaaagaaggtaaactggatgatttggaaatgatccgagatcttattaaagaattaggagagaaaggttttacggcagttgacagcgaaaatcaggtcaacatgacagagtatgaaaaactcatacagtttagtgaaaaggcagaagcaaagaaaaatggacgcatgaccgttgtagaagttgcaaagggagggagctgcatcattcggaatatggagacacatgacggaattgtaaatatgatcagaagttattgtatttatgagaatggtaaattaaagcaatcttcagaagatatatacaggacagaatcatgggaatatacagaagacggacatttgatgttttccggtcggttagcctttgaaggatcttatgaagttacgagaaatgagattatggaatatatggcatatagggtactgtcattagatgaaacatgcagagaactaaaccgtaaatatatacttccgatcggatatgaacgtaataatatgtttctgacagactggagtgaagaagagttcgcagagctagatttttatgatatgtttgatttgttttatcaggaaaatcatacggcgaacggagagtttacttttggaaatgcaatgggaacaagcgcggtatatttaatttcaaaagaaaaatttgaaccggttatcaaatctaaattcaaaatcagcagtgaagtgttgcagtcgaagacagtttattatccgtgtgaagaagtctatgaatacaaaccgagagggcttgaagaaacagaatatccggaatatccgtatccggaagttattggatatgtgaataatgatgacggaactttgacattgaaggtacaggctgtttttccttatagaggggtatcaaaagcgtacatccatgaagtaactgtgcgcgatacgaaagatggaggtatacagtatgtgggaaatcggattatcgagccgataaacaatccggagattagatggcacgtaccgcgcttgacaagaacagagtgggaagagttgtatggagataattagtttatctccatatatttaagtccgataaaacagataaggtgatttctgaagcctttttaccggtggcgtgtttttgatactgaatattggaagcaaaaaaataagtattatctgcattttctacaaagccgataaaccaaccgttgacatcttgtccgtttactcgtcctgttccggtttttccgtagaggtcaccgaaagcagaggaggagatgtggagggcgttctttacagtcccggtgttttctaaggagaatccgaagcggttattatgcagtttgactaaaagctcgacctgttctatcggggaaatcttcagggaggaattcaaccaataggaagaaagattaccgcttaaattctcatttccatatccgatttggtgaaggtatttctgaatagagtcggctccaagccgttcatcaatagtctgaaaataccagttgacggaagctcccatagctgattgtaatgtttgatcggtgttccacgcttcaaaaggatagtttttcccgttccatttgatcaaggaatttgcaggggtgatgacaccttcttctaatccaaacaaagcatcatatattttgtaggtggagtttggagcaactcgtaagacagctcggtctatattgtgtattttccagacatctctttttaagtcatataatacaaaactaccttcatattttccgaaataattacgaaggtctatttcagaacaattctttgaagttgtgttccactgatattgcttttcatctgtcgcataggtagagacaaacggtgtaagtccgaaaaggagaatagatatcatcagaaaagcaatgaagcttttcagttttttttgtaatgtcggtttttcataagaagcaatatttaggattcttcgcttcatctgcttcatatttcctccgatgccggaggaaaagggaaatggagtcagagaaatcttttcggcaaagttaatcagcgtatttccataagttacataatcgtcggatttcagcaggtttaaaacagaactatcacaggcaatttccctgtcgccgcgcatttctttcagtgcgtaccagacgaacggattgaaccaatatatcattccggcgaggtttatcaaatagttgataaatccgtctttgtgtttatagtgctgaagttcatgcaacaacatataccggatatctgtttcatttttatccgatatcaggtgaacgggaagaaagatgcacggtttccaaaatcctgcaataacaggagattttagataagcagcgctgtatacgggtatactttttgtaatatttgtgtcatttaggcagcgtcgatataatttttgaacatcctgatcttcaagaggtgatgcagatttttttaatgaatgcaggaacagagcagatcggattgctaatattatcataatgataatacccaaaatccaaagagtaaatagcagataaccgattgcggatgaggatgcttcgtttacggagagcgcaaagtcatccatccaatcttttgcgcctgcgatgttcgtgtgaagtggtggagccgaggcgttttttgtggcggcagaaggaagaaactttaagttcgtgaaaccgaaaaatagttctgaaaacttgaaaaaatgagaaggtaagaatggaactgttaaaagtccaagcaacagaaaccataagttatactgcatccggcttgacagacaattttttaaaatatgtttcataagcaaaaggatactgatgatgccgcaaaataatatgttgcagataagaaagcgaatcatgaaatcagacatattattctcctcctttttcctgtttctgtgaaagaagagttcggagtgtatctaattccgattttgataatttgtcattttctatataggaagataccatagctgtaatattgccatcataataacggttcagaaaagaagaactttgttgtctgatgtattcatcttcttttactgcaggagtataaacaaatacacgactttgtttttcgtatgtgagcgcgcctttggtcacaaggcgtttgattaaagtttgaattgttttaggactccagtttgtagtaggcaataacttttcggtaatttcatttgtgttgataggtgcgtatttccatacgatcttcatgacctcaaattctgcttcggaaatctgcgggaatgtgctcataagttctctccttttaaatcttacgattgtaatataaacattatagatgggaatagaaaacttgtcaatttatgcggcagaataaaatattatgtaaaatagccaattggataaatccagtcggttttttgtgggaaatctggattatcactcagattgtatacatgattctggcagtaatctagtcccgtatgtgtagttcatggcaaaacgtaatttattggataaaatgagaaaacattatgaaatgacggagaaaaatgacttaaaaaatctgaacagatataacaggagctgcaaaaagatgatacgcattttacacaatgacagttatgtaagcatggaaaaagtgatataataggcaaaagattaggaaagataagtagaacgaagaggtaagatttggggtgttttgcaactgaagaaaacacggaagatgataaccctccaatagggattaattatagtaggagaagattcaaaatgaaaagtgttacacgatatttcagaaatgctgtggcagcaagtatgcaaggaaccgtaaactataaaaaagagcgtttttttgtagttacagaaggggaattattatctggaaagttaagtgaagagaataattttaatatatggaagaaggagtatgatgcagagagcgataatgatgaagaaaaattaaagataaaaaatgtaattattgcattaaagacattagcaacggaattccgggatggcggaaagatggaagacaatatagaagagatgacttcatttttctttttgccgttatgcgtaacccgtaccggaaagttatgtatgccggttgaagggaaaataccttggataccgcgggagtatttaagacctatggaggatcctttgcttgctgtaggagatggtgagaaatatgatgaatttttggagcatactacgaacgaaagatatcagttggattcgtggcaggattatttagcatatgcgatcaaactctatgaatttgttgcagagataccatttaaaagtaactacattagaaatggaaatgaactgtttaaagcagatggcagatattatttgtttcaggattcgacagttaatgcttctttttatattttgcagttgtataatgcgttgataaagggaactgttaattccttgtatgataaaataacgaatggaaagatagagccctcaaaaccgctgataaaaaatactgatataagtaaaatgaaagctcatgtcggacaaatgggaggggcatatccattgtcaccatctcagcgtgaggcaatgaaccattttggagaaataaaagaaggaaatcttttggcagtcagtggacctccgggaacaggaaagactacttttttgcagtctgtagtggcagacatgtatgtaaaatctgcattgaagagggaaagggcaccgattattgttgcagcatccactaataatcaggcggttacaaatattattgattcttttggacagatttcagagattgggatttctaatttagaacataagtggattactggaacagatagctttgcagtttattttccctccaatgggaaagtaaaggaagctgcccaaaaacgatatcagtatacgacggtacgcgggggtggatttgtagatgaacttgagtcaaaagaaaatagacgttcctcaggaaggttatttaaacaagaatttcatcaatattttcgaagagagacagcaagtattgattttgcgttatgtgaagaaatattgtggaaggaattggagaaagtaaataaagacagaataaattgtatctctatgttagataatataaaaagcgttctcggtagggaatcgtatggagcatatgtagaaaggataatgcagaacatacggaaagaagaagcgattagaaatgatttgcaaaatcaaatagaaaaaattcaggaaactacacaatggtttttaaataggatgcaggaatggcgaaaagcttatcagcaatttccgtggtatgtacgattattaaaaaagtttttctgttttaaaagcaagatacaaagatggtcatttccctttgtaaatcaagcggaattatcctttttaagacgtgatatgtcaatagatgagatagaaaaagtttatatgcagaaaatatgtgataatgatttgcaaaaaagtcagttgcaggaacagaagctttgtatagacgataaaatagaaaaattaaaaagtcaaaaaaaagaaatagatataaagatggaacatttaaaagaaggatatcaaaactttgaaaaatataatgttgcagttccggaggacagtgtgttaaatgaattcgacttgtgtaaattgaacgatgtattggatcgggtaagatatgcagaattttggctggcagtacattattatgagagtcgttggttgaaggaagataatccggtcagtgagaagcaaaaaggaaaaacatttaaaaatatactggatgatatgtatcatcggattgctatgatatcaccgtgtatggttatgacattttttatgcttccaaaacagttttgggcatatgacggaaatgataaaaagaactattttatgtgtaactatatagatttattagtcgtagatgaagcgggacagacatctccggagattgctgccgcatcgttttccttagctaaaaaagcagttattgtaggggatgaagaacaaataccgcccgtatggggaactgcaagagctcttgatattgcaatggcaatcagtaatggtgtaattgcaaataaaggtgaatacggtatgcttgaagaaaatggtttaaattgttctcaatccagtattatgaaaatggctgcactatcctgtgaatttaataaatataaaagagggctatttttaagtgaacatcgccggtgttataatgaaataattacatattgtaacaaactggtatatgaggggaaattggaacctaagaggggttccttttatgcagctgagtacaatgaattaagagggcttcttccggtaatgggattcagacaggttaccaccgcaaaatcagagaaatacggaggaagcagacgaaacagagaagaagctgaggctattataatgtggctgcagaaaaaatatgaaaaaattttattatgctacagcgacaaagatggcattgaggagagaggagtattggggattatcacgccttttaagagccaaagttttttgataaagaatcttataaaacgtagacttccggagtattcaaagtttattgatgttggaactgtacatacgtttcaaggggcggagcgaaaagtcattttgttttccagtgtgtatggaagtgaagatgggtgttattttattaacagagcaccggatcttatgaatgttgcggtgtctcgggcaaaagattcgtttttggtttttggagataaagagtgccttacaggaggggaaaaaactgcggcaggattgttgaaaaaaatggtgtttgtggaaggggaggaactatgttaaggaatatgattaacaacataaagaagtctgtatgtaaagcaaatgaggactttatatttggtacggattttgcggacaaaatgggatggaatgaattagatgatattagacgaacaaatggaatttgtgattttttttaagttgggactataaagaagatgaaagagatcggaaatacagaaaggtagaacaatggcatttttaaaatttatagataaaaaaggtgcggattcttttatatcaggaatagtacaatttggacggctaaaagaatatttgtatattgaaaagaaaaaatgtgttggaaaaaatgatgagatggaaggtaaatattatacgacaaaatatcagacgccacaaggaaaaggggttaattttacgattgatgctaataaacagaaaaggaattttgccttatgtttatatcatttaaataacaaatatagtacatcgagaatagaggagatgtttgaatttggagagtatgttgtaaaaatagaggatgaattagaatttgataaaagaataaaaaatggggcaaaagaaaataaatatcagctctatagcagagacgttttatattatcgagatgagagcattaaagatgaaatgaaaattatggatttgatgacaaatagtcttgatgatttgtcatttataaagagaaaggaaattttctcgtatcaaaatgaatatagatatttaattgtagatgaattagaagaaagaaaaaatattagatttgagataggagatttaaaagacttagcaactattatgagtaaatctgaattcttgaaaactttataaatgggtgatttcctgcctaaatttgtaatcattatgattataaaataggaaacgataaagaaatagtgagcgtggtcctgcttagtggacgattcaaaatgagtagagataaatacaaaatctattgcagtctattacgcaagatatgataaagaataaagattgatgcatagtcgattgatttcaagattaggattaatcggttatagttatgcactaatgttcagaggagagttttttagagatgtgctatataagaatatttgaattatgcgatagattattattaaataataaaatagagagaaaaagatgcaagcgatgtcctgcatcttttttacaaagaaaatatgtatgtcaaagggaatgtatgttcgatatattcttgatttatatcggcaattatgatagcatgttaccatgataatagtagtgatggggaaaagtacacaaagttatgtacggatttttgggttgatattagacatagtaagagaaaatttcactatggaacattttggattagtatcggaatacgcccttaccggcgatcagccgcaagctatttgttttgctcattaataaggcaatttttattacagcaactatagagaaagagaataagtttaattgtaaaggaattgaatttgaaatcgaaattcgaaataaagtaaaggagaaattatggatcattttgaattagtatcagaatatgctccgaccggcgaccagccgcaggccatcgaccagcttgtaaaaggctttcaagaaggaaaccaatgccagactttactgggagttacaggctctggcaagacgttcacaatggcaaacgtcatacaacaattaaataaaccaacactcataatcgcacacaacaaaacgctggctgcgcagctatatggagaattcaaagaattcttcccgaataatgcggtagaatactttgtatcctactacgactattaccagccggaagcttatgttccgtcctcggacacatacattgccaaagactcttccatcaatgatgagattgacaagcttcgcttatctgccacaatggcattgacggaacggcgggacgtgatcatagttgccagtgtatcgtgtatttatggtttgggaagtcctgtagattatcagaatatggtgatttctttacgcccgggcatgacaaaagacagagacgaggttatggcaaaattgatagaaatccagtatgaccgtaatgacatggattttcaccgcggaactttccgtgttcgcggcgatgtggtggagatcataccggcgtatgagagcgatgtggcgattcgtatcgaatttttcggagatgaagttgagcggattacggaaattgatattttgacaggagaggtcaaagacgaattgtcacatgtggcgattttcccggcgtcacattatgtggtggataaagaaaacataaagcgtgctgtaaatgatatagaaaaagaactggatgagcgtgtgaaggagtttaaacatgcagataaacttttggaagcgcagagaattgcagagagaacaaattttgatattgaaatgttgaaagaaaccggattttgttccggaatcgaaaactattcgcggcacttggcaggacttagtcccgggcaggcgccatatacattgatagattatttcccggatgattttattattatgattgatgaatcgcataaaaccattcctcagatcggaggtatgtatcacggagatcaatcaagaaaatctaccttggtagattatggatttcgtcttccgtctgcgaaggataaccgtccgctgaactttgaagaatttgagagcaagatcaaccaggcgttatttgtatctgcaacaccgggagtatatgaagaagaacatgagcttctccgtgtggaacaggtgattcgtccgaccggactgctcgatccggaagttgtcgtgcgtcctgtagaaggtcagatagacgatctgatcggggaaataaacaaagaaatttcccaaaagaataaagttctcgtaacaactctgacaaagcggatggcagaagatttgacggattatatgcgtgaggtgggaattcgtgtgaaatatttgcattcggatgtggatacactggaacgtacagagattattcgtgatatgcgtttagatgtatttgatgtgcttgtgggaatcaatcttttgcgagaaggtctggatattccggaaattacgcttgtagcgatattggatgcggataaggaaggatttttgcgttcggaaacgtcattgatacagacaataggacgtgcggcgcgtaatgcacaagggcatgttattatgtatgcggataagataacggaatctatgcagctggcgatcgatgaaacaaaacggcgtcgtgagattcagatgaaatataatgaagagcatggtatcacaccaaagacgattcaaaaatcagtacgcgacctgatcagtatttctaaaaaagttgcggcagaggagctgaaactggaaaaagatccggaatctatgagcgtaaaagaacttaaaaagctgattgccgatcttacaaaacagatgaagaaagcggcggcagaactgaattttgaaagcgcggcagaattgcgggataagttgacagaattgaaaaaaatgttgaatgaaatagaaggataaaatacaaaataaaatatgactacagggaggaaaaagacggattatgagtacgaaaatggatgttcggaaatatatcaaaataaggggagcgaatgagaataatcttaaaaatatagatgtggacattccccggaacgaacttgttgtacttacaggattgagcggttcgggcaaatcttccctcgcgtttgatacgatttatgcagaagggcagagaagatatatggaatcattatcttcctatgcaagacagtttttggggcaaatggagaaaccggatgtggaaagcatagagggactgtcgcctgcaatttccattgatcaaaagtcgacaaatcacaatccgagatctacggtcggaacagtgactgaaatttatgattatttcagacttttatatgcaagagtcggaattcctcattgtcctaaatgtggaaaagcaatttcaaagcaaacagtcgatcagatggttgatcgaattatgtcaatgccggaaggaacgaaaatccagcttcttgctccggtcgtaagaggccggaaaggaacacatgcaaaattattggaaaaagcaaagaaaagcggatatgtgcgtgtacgtgtagacggaaatatgtacgaattgacggaagagattattcttgacaagaacttgaaacataatattgagattattgttgaccgattgatcgtaaaacaggggattgagaagaggttaacagattctgtggaaagtgttctgcatttatcggaaggtttgctcagtgtagatgtgatcggcggggagatgttgaatttcagtcagagcttttcctgtccggattgtgggatcagtatcgaagagatcgaaccaagaagtttttcatttaataatccctttggggcatgtccgacatgttatggattaggatataagatggagttttcagaggatttgatgattccggatccgtcattgtcgattaatgaaggtgcaatagcggtattagggtggcagtcttgtacagacaaatcaagttttactcatgcgatacttcaggcgctgtgcagagagtatcaatttgatctggacacaccgtttgaaaaatatccgaagaagattcatgatattattcttcatggcacaaacgggaaagaggtgaaagtattttataaaggccagagaggcgaaggcgtttatgatgttgcgtttgaagggttgattaaaaacgtagagcgcagatataaagaaaccggttcggagacgatgaaagccgaatatgagacatttatgaacataactccgtgttcggcatgccacgggcaacgtctgaaaccgggagctttggcggtaaccgtcggagaaaaaaatattgcagaagtaacgtcgatgtctatcggaaaattgcaaaattttcttgaagagcttgtattaggagaaacacagatgctcatcggagggcagattttgaaagaaatcagagctcggatcaaatttcttatggatgtgggacttgattacttgacgttggctcgcgctaccggaacactttcaggcggtgaggcgcagagaatacgtctggcaacgcagatcggatcgggtcttgtgggagtagcatatattttggatgagccaagtataggacttcatcagcgggataatgacaagcttcttgcaacattaaagcatcttcgtgatctgggaaatacgctgatagtcgtagagcatgacgaagatacaatgatggaggcggattatattgtagatataggaccgggagcgggagaacacggaggcgaggttgttgccgtcggaaatgcgaaagagatcatgaaaaatgaaaattcgattacaggcgcatacttatcgggaaggatcaaaattccggttccgcaagagcgcagacagcctaagggatggttgaaggtggtcggcgcccgggaaaacaacttgaaaaatatcgatgtgtcatttcctcttggagttatgacttgtgttaccggagtttcaggttcgggaaaaagctctcttgtaaatgaaattttgtataaaaggcttgcacgtgatttgaatcgcgcgagaacaattccgggaaaacataaaaaaatagaagggttagatcaggtagataaggtgattgatatcgatcagtcgccgatcgggcgaaccccaaggtcaaatccggcaacctatacaggtgtgtttgatctgataagagatttgtttgcggcaactccggatgcaaaagcgcgcggatataagaaagggcggtttagttttaatgtgaaaggcggacgctgcgaggcgtgctcgggagacggcattcttaaaatcgaaatgcattttttgcctgatgtatatgttccgtgtgaagtttgcgggggaaagcgatataatcgagagactttggaagtaaaatataaagggaaaacgatttatgatattctcaacatgacagtggaagaggcgttggaattttttgctcatgttccgagtatcaggcgcaagatagagacattgaacgatgtaggtctttcttatatccgtctcggacagccttctacagaattgtccggaggtgaagcacagcgcattaagctggcaacggaacttagtaaacggagtacaggaaaaactgtgtatattttggatgagccgacgacaggacttcattttgcggatgtgcataaattgacggagatcttgcggcgtctgacagatgacggaaatacggttattgtaatcgaacacaatctggatgttataaaaacagcagattacattattgatatcggtccggaaggcggagaacgcggtggtacggtcgttgcacacggaacaccggaagatgtggcagagaatgaaaattcctatacagggaagtatataaagaagatgctgtagaaaacactgtagttataaaaaataacagttcagtctgcgccattcataaaatcacgctgtgtgcttattgtggccggcgccactgtttcgctcataaatgtgcgcttgtcgcatacagatgtccgttagcgaaaacatgagagcatgttttgtgctttccgtacactgtagggctgaactgttacaataaaaattataaaaaagttgtaaaaagtatcatgtaattaaaaaaaagggttttcattttttgttgagtcgattatactaaagaatgcagattggatgcaggggtatcatccggtctggaaatatgtgaatgataagacctgtttggggagagatacagacattttcgtttttgaggagatgtcagcgggaaaagagtataaagatttagaagggagaatggaatatgtcggtagatatcggaatagatctgggaacagccagtgtgcttgtctatgtccgcggcaaaggagtcgttttgaaagaaccatcagttgtcgcgtttgacagagatacgaatgtaatcaaagcgatcggggaagaagcgagactgatgctcggaaggacgcctgggaatatcgttgcggttcgtcctctcaggcagggcgtgatttcggattatacagtgacagaaaagatgatcaaatattttgtccgaaagtcgcttggtaagagaacattcaaaaaaccgcgtattagtatctgtgtgcccagtggtgtcacagaagtggaaaagaaagcggtagaagaggctacttatgcggcaggtgcgcgggaagtgcacttgattgaagagcctgtagcggccgcgattggcgcgggaattgatattgcaaagccatgtgggaatatgattgtagatatcggcggaggtactgcggatattgcggtaatctcactgggcggcactgttgtgaatacatcgattaaggtggcgggagatgattttgatgaggcaatcgtccgttatatgcgtaaaaaacataatcttctgatcggtgaaagaacggcggaagatataaagataaagataggaacaacatatcctcttgtagaggaagagactatggaggttaggggaagaaaccttgtaacaggattaccgaaaactgttacggtaacttcttcggagacagaggaggctttgagggaagccaccgggcagattgttgaagctgtgatagcggtattggagcagactccgccggagttgtcggcagatatacttgaccgtggaatcgttttgacaggcggaggttctatgcttcgcggattagaggaattgatcgaggagaggacaggcattaacacgatgacagcggaagatccgatgaaagttgttgcgatcggaacaggacaatttgttgaatttatgagcggacggggcgaagtctgacgtgaagagctgatttggcaaagagagagaaggagcagggatgtgagcaatacggcacatccctgttataatgtggatataaagcgaaatattgtggaaaacaataacggaaagaggaaagatctgtggaaaaagttacgggatatgtaggtcacattgtgtttcggaatgcagaaaacggatatacagtgtttcatttggaaaatgatgacggagaagtgacctgtgtggggaattttaattacattacagaaggggaactgttggaaataacgggggagtatgtgactcatagtgtgtatggaaatcagttgaaggtaatgtctcacgttgtgaaagaaccggaagatctcgtatccatagaacggtatcttggatcgggagccgttaaaggaatcggggcggctctggcgggacgtattgtcaggaagtttaaagaagatacttttcgtatcatagaagaagaaccggagcgtcttgccgaaatcaaaggaatcagcgagcgtaaagcaagagagatttcatcacagttagaagataaaaaggatttgcgaaaggcaatgatctatcttcaaaagtatggaatttctgcgaaattggcagcaaagatatataatcattatggtatgcgtgtatacaaagtgatggaagaaaatccgtatgaacttgcggataatattgaggggatcggatttcgtaccgcagatgagattgcggcacgcatcggaatccatacagattccgattaccggattaaaagcggactgttttatacattgcagcaggcagtaggagaagggcatatctatcttcctcaggaggaacttttacgtcgtgcaagaacgcttttggaagtggagattgacgatatagaaaagcatgtgatggatctgtgcattgagaaaaaagtggttatgaaagaatgtgtcaatgaaaacaaaaatgaaaatgaaatcaggatttacccggcacattattattatatggaattgaatacggcgaaaatgcttcatgatttgaatataaattgtgatatgccggaggaaatgatggaaagacggctctgtaaagtggagcgggcagaagagatcaaattggatcctaagcagcatacagcggtgattgagtcgatcaaacacggtttgcttgtgttgaccggaggaccgggaacgggaaaaacaacgacaattaatacaatgatccgtttttttgagagcgaagggatgagcattcttttagcagcgccaaccggaagggcgacaaagagaatgacagaagctaccggatatgaggcgcagacgatccatcgtcttttggaagtgaatgtaaatcccgaagaagcggaaaattcgggaggatttttaagaaatcggcagaatccccttgaagcggatgtgattattattgatgaaatgtctatggttgatctgacattgatgcatgcgcttttgtctgcagttataccggggacaagactgatacttgtaggagacgtagaccaacttccgtctgtgggaccgggaagcgtattgaaagatatcattgcatcgcatcggtttcctgttgtgacactgactcgtatttttcgtcaggcaggagaaagtgatattatagtaaatgcacataaaatcaatgcaggagagccggttattcccgataataagagcagagattttttcttcttacgaagacaggatgcagatacgatcataggtattgtgatcatgcttatccagaaaaagcttccgaagtatgtaggggcagatcaaaacgagatccaagttatgacgccgacgagaaaaggacttcttggggtagaacgtttaaatgaaatccttcagaaatacttgaatccggaagaaccgaaaaaggcgcagcgtgagattaacggcaggctgttcagagaaggcgataaagtaatgcagattaaaaataattatcaaatcgagtgggaagtatctacaaaattcggtctgacggtagacaaaggaaccggtgtgtttaacggagatatgggagtgattacagagattaacgagtatacggaaacgatagaggtagaatttgacgaatctcgaaaagtaaaatatgggtttgatatgacagaagaactggaactggcatatgcaattaccgtacataagtcacaggggagcgaatatccggcagttatcattcctcttttgccgggcccgaagcttctttataaccggaatctgttgtatactgcggtgacaagggcaaaaaaatgtttgacgattgtagggagtgaggcagtatttcaggaaatgatacaaaacaaaaacgaacaggcgcggtatacaagtttggcggaacgtatacaagaattttaaatctgctatatccgaaagtatgccctttctgcggggaaatttcgccggaaggggtttgcgcggagtgtaaaaagaagattatatacgtcagacagccaagatgtatgagatgtgggaagccgataaaagatgaatataaagaatattgttcggattgtgcaaaaagaacatcgcatattacccaggggcgaagtttgtggcttcataaagaaccggtatcaacggcgatatataaattcaaatataataataagcgcagttggggagaattgtttgcggcagaaatggcacaagcttataaagatcaagttataaaatggggaattgaggaaattatccccattcctctgcacaaatctcgaaagagaaaaagagggtataatcaggcggagattatagcaaaatgtttgtcggaaaagacaggagtgtctctagtgtcagatgctttgtttcgagtgaaaaaaacgacggcgcagaaaaagttggacaggcaggaacgaatgggaaatctaagggatgcatttgctttgtcagaaagatggaaacctgtggcgaatgtgcttctgatcgacgatatttatacaacgggagcgacagtagagcaggcagcaaaaatattaaaaaaggcaggggcgcaaaatgtgtactttttgactataagcattggacaaggtatttaaatatatgatataataatcatacatatgtaattatttaccgtatttggaatatagtatatggatttcggaaaatacataggaggacgggaagacgtcatgttagataagaggaaaatacgtttgatgactcgggctgctatttatgaaaaaaactatggagaagaagattttaagatcagcagctattataagaaagattattcgagtttaaatacatgggtcacgcttatttggatcacagtcggttatggattggcggttgcagtgctgtttctcggttggggagaggctgcgatggaaggcatcacgcttgcaaagttatttgtttttgccgcggtggcgataggcgcttatgtgtcgctgctgatagcatatggaatcggtgcgggaagcttttataaaaataagcatatcaaggcaaaacagagagtgaaaaagtatctgagagacctttccagaatcgagaagatcaacaataagaaggagataaattaatcatgagtacattgcttgtttggagagaaaagctgcagagaatatatgcgttatattcaatttatattcaaaaagggctgcagtttgtgacagggctggttttgttttgggttatcaactctaacataggttttatgaagccggcatcttcagttttttgcacattgggattggcagtgatctgtacatttcttccgatgacaattaccgttttagcggcgacagcattgatactcgcacatttttatgcgttgtcgcttccgattgcgcttgtggcgctcgtcatttttattttaatgtatattttctattttcgttttaccccgaaaaaagcatggcttgtgttgatttcgggacttgcgtttagtttgaaaatcccgtttgtaatcccgattgcattcggtctgcttggatcgccggtgtggattgttcctgcatcatgcggaattatcacctattatatgacagattatgtgaaagtatccgcggcagcgctaaaggaggcagatgcatccggtatagcggctaatttgatgagttttacaaagcaagtgcttgcaagtaaagaaatgtggcttatggtcatggcagtgacgataggaattcttgttgtgaattttgtccgtacaagaggtgtggatcattcttggaaaattgcgtcggcagcgggagcggcagtaacggttgttgtttcagcggcaggtaatattgtattaagtacaaatatatcttatatagaaattatattgagcgcggttcttggcgcggtgacaggacttgtgctggaacttcttttcttttccgtagattattctcgtacggagaatatccagtttgaggatgatgaatactattattatgtaaaagccgttcctaaagtcggagtagccgttccggaaaagaaggtaaaacggattactgaaaaccagcctcaggaaacgacggtgatcagagaagatgcggatttgaacaatataaatacagagaatgatgcggatgatattcttttgacaagaagtttgagtaaagaactcggtttggaaaaacaaagaccggagtaaatcgaagtaaacggtaaggtggtgattacggtatgttagattggataaaaagtattttagacaattatacaaatggaatgtattttcctaacatccatattaaagatgtgatcgaaatactgatcgttgccgtaatcgtgtatgagatcatgctttggatcaagaatacaaaagcgtggatgcttcttagaggaattattatgctgggggtatttattcttttggcatggatttttcagatgcatacgattttgtatttggcggcgcagtcgatcaacgtactggctattgcggctgtagtggtgtttcagccggaactgcgtcgtgcgcttgaaaaactcggagagaaaaacctgcttagcaatattaatccgtttgataaaaacagagagaatgaacgtttttctgatcagacagcagaaggtatagtgacggcatgttttgaaatgggaaaagtatgtacaggagccttgatcgtagtagagcaggcaattcagcttacagaatatgaaatgaccggaattgaattggactgtaaggtgtcacctcaggttttgatcaatatatttgaacataatacaccgcttcatgacggagcgattattatacgaggagaccggattacttcggctacatgttaccttcctctttctgataatatgcgcatcagcaaagatctcggaacgaggcacagggcggctttgggaatgagtgaggtatgtgatgctcttgtaatcgcggtgtcggaggaaacaggtcttgtttccgtagctatgggcggtcagcttgacagagggattacaagggaagaattgagaaagcgtcttagtcagattcagtatagaaatgccgagtcaaagcggtttttcttgcggaaaggatggcgcagaaaatgaaaaaatataagtttacggataatttgggattaaagatcatagcggttatttttgcggcgttcttatggcttattgttgtgaatcttgataatcccgtaagtacacagactttcagcgaggttccggtaacgattataaatgaggatattattttatcggcaggcgatacctatcaggtgcttggggaagaaaaagtaagtgttgttgtatcggcgacaagacaagtgcggcagaaactgacaaaagaagatattgtcgcgacagcggatataaaggagatggatacaagtacaggacttgttccgatcaagatttccataccgaattatgccggaaaatatgaatctgcggaggcggcgccgagaaatcttcagatacagagagaaaaatcgggaaagaaagtcctttcccttacggtaagcacaggggattctaaagtaagagatgggtatattttaggtgatatgacggttaatccggataaagtgacgatcacaggaccggagtcgatccttgaccagattgatcgggcggttgctcttattgatgtagagggattggcaaaggacagcgaggagacagcaaaacttgggttgtatgatatcagcggcaacccgatcagtcagacacggctgggaaataatcttggcgagggcggcattactgtgtctgttgaagtgttaaagatcaagagcgttccgatttcactcagtgtttcgggaactccggcagaaggctataagtatacagggtacagcagtgaaccggaaactgttcagatttacggggaaaaagatgtggtcgataaaattgaggaaatagatgttcctgttattgatgtcagcggagcttcacaaccgattcagaaatctgtcaatatctcagaatatctgccggaaggagttcagctggtagatgagaaaactgccaatataacagttactgcaatggtggaagaagaaggaacgcgaacgatcaattttatggtaagttcgatccagatcaataatctggcagagggtctgcaagtatcttatgagccggatgcggagatagcgcttcgttttagcggtgatcagaaagcattggaaatgctggatatcagcaatgcggtttctgtggatatgtctgcatatgtagtgccgggagtatatgatgtgcatgtagatgtggatattccggaaggaattacattgatgaagaaagtgacagttcagcttactgttgcggagaaagagcaggaaggcggcaacgaaagcgatacgaatacagaacaaaaaggacagtaagctgcttttggaacggaagatggctgttatgaatggaaagtaggcgaaaacagagaaaaagcagcagcataaagggagacggaataatggtaagaaaaaaaatagtgatcgataatcctacaggactgcatttgagacctgcaggaacattctgtaaagctgcgattcagttcgagagcaaaatcacagttcagaaaattacaaaaaatgaaaatgtaactgcaaatgccaagagtgtactcagcgtacttggggcgtgtattaaagatcgagatgaaatagaaatcatctgtgaaggcgaagatgaagaagaagctttacaggagatgatccgagttgtagaaaatgaacttatttgaatataatatcgtgtgattgaagaaagaggagaaaaagatgagcagagcgacattggttataatggcggcaggaatagggagcagattcggagggggaattaaacagcttgcccctataggaccgaacggagagatcataatggattactccgtttatgacgcgatagaggccggatttgataaagttgtgtttgttataaggaaagatctggagaaagattttaaagaagtaatcggaaatcggatcgcacagaaggttgaagttgcgtatgcctatcaggaagtttcggatattccggcagaatatgccgaaaagtttgtaggaagaacaaaaccgtggggaacaggtcaggcaattttgtgttgtaaagatgttgtttctgaaccgtttcttgtaattaatgcggatgattattacggcaagagcgcttttaaagaagcgtactcttatttgacaagtattcccgctgctgataaaatacaggtttgtatggttggatttgtattgaaaaatactttaagtgaaaacggcggtgtgacaagaggaatttgtcgcgttgatgaaaatgggatgcttcaggagattatcgaaacacataatatagaaaaagacggaaacagagcagtcgttcgtgaaggagatgttgaaacagagtatgatgtgaattctccggtatctatgaatatgtggggactgaccacggaattttttacaatattaaagaccggatttgaacagtttttaaatgaaaccgattcggaagatctaaaagctgaatatttgcttccgacgattataggcgagctgttgaaaaaagaagcggtgaacgtaaaagtattaaaatcagaagatcagtggtttggagtgacatacaaagaagaccgtgagacagttgtggaagctgtgaaaagccttgtagacaaaggcgtttatccggacaagctgtaaggatgagccggaggcacataaaaaccgtacatttaaaaaacggaaaaaggaattgctgaaatgtcaaagaaacaaaaaccgaccggaaataccggacgaaaaaatcaaattaagggaaaatatgcggaaagatccagaaaaaacggtttcggaaaattctgtctgattttgcaggctattatgagtgcggcatttatgggagtactcgtactgcttgatatgcttcctttgaaatatttggcgcttgccgcgctgatccttttctttttatggtgcattacatttacgacacaggcagttagaaagaaaaaaggtgtgacgggaaaagtatacagtattcttctgattgctgttttagctgtgggcacatattacattgcaaagacaaatgatatgatcgcggcaattacaagtggcggttcaaaagttgacaagatggtagtggctgttttaaaagatgatccggcagaaacattggaggatgcaaccgattacgagttcggagttcaatttaataccggagctgagaacatgaaagctgctgttatggatattcaggatcagatcggagatatatccacaacagaatacaaatctgttcaggaacaggcagaggcgcttatttcgggagaagtggacgcaattatatacaatcagtcttatacagaattgatggaaaatgctgttgaaggttacagcgatcagattcggatcatttataagcacgagattgaaacgaagtttgatttcggaggttcggcaaaagacgacagtttgactaaaaagccgtttactgtgtatattagcggaattgatacatacggagacgatgcggacgatgaccgtgattccatacgaagtgatgtgaatatcattgcagtcgtaaatccgacgacgcatcagatcttgctgattacgacaccgcgagattattatattccgatacccggaatatccgatggaatgaacgataagctgacacatgccggaacatacggaatagatgtgtccatggaaacgctcggtgcgttgtatgaaacggatattaactattatgtaagattaaacttcagttcccttattgagattgtagatatcttaggaggagtagatgtttactcggaatatgcatttacgacaggatgggaatccggttatgagatggaagtacagcaaggaataaatcattttgacggaaaacaagcgcttgctttcagccgggagcgacatgctttagaaggcggagacaatcaaagaggcaagaatcagcaggctgttataacagctatgcttaaaaaagtactttcaccgacaatgcttttgaaagcgaattcgatcattaatcaagtgagtcaggatgttgagacgaatatttctcagggccagttgaattctcttgtgaaaagtcagcttaagtccggggcaaaatggacgattcagtctgtggcggcaagcggaacagatggggaagattattgttattccgtgccggacatgcctttatatgtgctttatccggatgaggcggttgtgagcagtattgttgaattggcgaacgtagtggaagaaggcggaagtcttgaaagcggagagacgttgaattaaaattgtttggattatacaagttatgcttgatattttcttagattttagtggaaaatgaaaaaaatataagatataaaaaacagagttgcttatagagagtttgaagaaacttttgtaggaaactttgttttttattgagatttataaggatgaaagtaggtataattatcctattaacagggagaaaataatgttaaaacttgagaaaagaaatattaatttggatgtgatacgctgtatagcggtatttagtgttatctctgtacatttttttaataatacagaattttatcagcagattgtatctggaaaaagaatgtattgtatggtaattatgagaacgttttttatgatttgtgttccattatttttgatattaactggttttttgatgtcgaagaaagaattaaatagaaaatactataaaggacttttgaggacgatagaagtttatgtatgtgcggaactgatctgcttgtgctttaaaaagtatattttaggtgaggaaatatggaaaggaagatttatttttgatattattggggtacaaggaattgattattcatggtatgtagagatgtatataggtctttttttattaattccatttctgaatttaatatggaagggattagaaacaaaaaaaagaagagttgtattaattttaacattattattatgtacaaccattcctacgatgtttaatatatttgactggtcaatatctgggttttggacaatgccgagtatttctcaaaattatcaatctattatgccggattggtggataaatttgtatccattaacatattactttatagggacatatttaagagaatatgatttgaaaatatctgtaaaaattaatattttgatgttgattgtagcggttgtattaggtggaacatttaattattatagaagttataatagtttatttgaatggggaagttacaatgggtggaatggtatagaaaatgtgattaattcgatattagtatttgtgttaatattacatatgaactttgataaagtatttacttgcataaaaaagggaatagttaatatatcggagtggtcttttggaatatatttgctatcttgggtgactgatcaaataatatattctagatttaatgctttagtgccagaaatggttgatagattaaattattttcttcctattgtgataagtgtttttctgtgtacaatagttttatcagcaatagtgaatatcttttgcgatttgctagaaaagacagtagtatatttatttgaaaaatataataaaaatattttaaataggccttgatatttgtgtgttcttgtatatgtgaagatataatatacatatcagtatttgaatgagaaaaaatgaatcattatagaacaggggatgtataaagttagagcccttttctgtttttagccgttctccatgacggctatttttattattatataaaatgaagggggggagatctatgccaaaagcattgatttggaaattaagcttttgggtaaaacgaatcggggatagacgatatcttatagcttatgttatacttgccgtgcgggaatacattatttctagatgagttagttttgagtgcttaaagcataacatgaaaggtgatttatgctttttaattgctcagttgtaatgcgtgtgttggaatccttaaaaataaaaacgaaaaaagagtaaaagcttg

SEQ ID NO: 7653 - DNA, 26147 bp, Unknown
  gut microbiota DNA sequence
aaaaataacttgaaaaattaaaaaaataatgatattgtaaaaaagtaaaatcaaggagctcatgatttacaaattctaaatgaaagaggtaaggtaaaatgaaaggatttcagaaattaaccaaagaagaaatgggagaaatcaagggtggatactattcgtgcccacgatcaaaaggcgaatttacaagaacgtataacgctcttaataaaacgcagaaaaaagagtatatcaagtattgctatgagcacaactgcacaaagtactttaattaagctctgactggaaatttgattccggctgaaatattcctatttcgccggaatcaataattcatccaataactatatacatatataagatggatgatacattttggtaatgatatctttattataccgggattgagttacaagaagactttcaggctaaatctatgatatcagttttcatttgactttgtactttggaaaacgcttaatgcgtaatagaatttttgggagataaaggtaacatgggatttattaatataaggcagcatgatatgtcagattgtggtccagcttgcttagcaatggttgcaagatattatagaggaagcgtatcaatagcgaaaatccgggaacaaacaggaacaaattctatgggaacaagcttacgtgctttatctgatggagcagcatcaataggatttaagccggtagcaataaaaagtgtagagaatgaaggagaagattgcttaagtgaagtgagtttaccatgtattgctcacatgattgtggacgaagatttgttacattatgtcgtcatttttaaaataaaaagaaataccattattatatcagaccctgcggaagggattgttgaaatccccagagaccagttttggggacggaaaaattgtgaaataaaatccagaagatatagatggtcaggagctttaatgctcttatctcctacagaaaagtttaagaaagattataaaagattttcgacggtaaaaaatctttttcaattattacgtccaaataaaaaattgtgtatatcaattgtagtaatttcactggtacatacagtgcttaatatcagtacagcattctattatatgatattgattgataaaattttgccggaatatgcatttaatagcctggtaattatttcagaagcatttcttcttttgataattgccaagattatcctgaatatcctgcgagtagatatgtcgttaattttaggaaagcacataaaccaaaacctcggaatgaaattttatgaacatatactgaagctgtcacaaagtttttttgataatcgcaaagtaggagaaatatcatcaagatttcaggatatagaaatcgtgcagacactgttgtcaaaaatagttttaactgtatttgtagatgctatatcggtaattgcagccggctatatcctatatacgcaaagtttaaatatgtttattggaataattgtcatttgtttgctgtatatagtggtcgtatggatatttaagggaaagtattcggtttacagtagaaaacagctcgtaagcgaggctcaaaacaacgctaaaattattgatttccttagtggggcattgacaactaagttatatagagcagaaaaattttcttataaatcgattgaaaaaagttttacggcatatttagaaaatatatataaattagggaaattagaaaatattcaatatgctctgaaagatttgattggacttagtggcgaaatagttattttatgtctgggagcatataatattttcttaggtgatatgacaataggcgggctaattacgtttaatgcattaattgtatattttttggagcctgtcagaaatcttattgatttgcaaacggaattgcaaacggcacttgtcgcagaagaaagaatacaagagattatggaattagaacctgaagaaagcaggaagaaagaggaaacaaatcatgctaatgctccgttttataacggatatgatgtatgttttcaaaatatatcctttggatacgatcctgataagcctgtattagaacatttttcattacagataaagagcggggctaaaatagcgattgttggagcaagcggcacaggaaaatctacgattgctaaattattattaaaactgtatacatttgaaacaggaaatatcagcataaatggggtagacttaaaagatataagcacagaaattataagaaataaaatcgcgtatgtttctcaggacacatcgctgtttaatatttctatacgggaaaatctgttgttgggaaataaggattacgataatataaatgaaatacagaaggcttgtaaaattgttaagatacatgattatatcatgagtttgccattccaatatgatacagtgttagaagaaaatggcagtaatttatccacaggtcaaaagcaaagattaatgttagcgcgtgctatattgagaaaaccgcagatacttttattagatgaggcgacaagtaacttagatatcgaattagaaaaattagttaataattcgattattgattatctggcaaaatcaactgtggtttttataacacaccgttttgaaacagcgcaaagctgtgattcggtatttatagtaaaagatggtcaggtaaagccaatataaaagagagaagggatatagatgaagaaaaaatcgtatattgcaggaattatatgtactactatcataatatgtatggcaggagtattactttatcgaaatatctttgctatagaaagatctaatgcatatgagggattaaatactattacgatggatgagatttttgaaaagccggggaatttttatgtgtacgcgcaaagaagcggatgcccctattgtgataacgtaaaagatgaaattatacaatttgcaaaatccaatagcttatttgttttagatactcaagcggatgaaaataaggacgccaaagattatgattggacaaaccatcatataaaatatgatgaagaaataggtgaagtagtgaatgggaaaaatatcttttatgatggccttaccagaaatacactgaaaaataaatactctcccttggattatacaataaaagcggcagacaaggattttgtcaaattgaatgaagataaagtgatagggaaaatatacgcagttcgtgaatcacccattatagattatacagatgcaacaaaagataattttattattgcggctgttccaatgttatatcacatcgagaatggaaacattgagaacttttattttggggatgctcaaattttacagtttttgggaagtaataaatcgccgcttgatgaatacataaatttatagtaatcaagatgagcagtgcagagaaaatttaagatggaagtttgaatttcctctaaacaggagatgtatattatggatatcgttaaagtaatttcattgaaaaagaaatatgtaagtggaaagattgaagtcaatgctatcaacggtattgatctgaatattaaaaagggagagtttctggctattacaggaccttccggaagtgggaagtcaacgctattaaatatagttggcgggaatgaatttcctacggaaggagtagtagaaataaacaaaagaattttgtcttccatgaatgatgaagagttaacaatattcaggaggcgcaatataggatttgtttttcaaagatttaatctgattccctatttgaatatatatcaaaatattgttcttccgttggaacttgatcatgcagatattgattctgaatttgtaaaagaacttattgatgagttgggacttgacgatcagatttttaaaatgccggatgaactgtcgggaggacagcaacaaagggctgcaatcgcccgggcactggttacaagaccggcaattattctggccgatgagccgacaggaagccttgattctgagaatagtgaaaaagtgatttccctgttagggaatatggccagaaaatataatcagacgatagggatggtaacacataatgtggacattgcgcacagagccgatcgtatgatccggatcgaagatgggaaaatttcagatgaaaggcagggcggatataaggatgaaagataaggaaataactgaattagcgaaagcgaatagtagatgggatcacaaaaaaataattctattatcgtttgcagttgccctttccgtatttgtccttttttctgcgtttagcatagccaaagggaaaatagctgttgacactgtaaaaaatattcgggaatcagggaatgcagttgcagtttatttagagaatgcaagcaaaaggcagtatgaccagatgatctatccagactatattgaagattatggatggcaatatagtataggagattggcaacaggaaggaaaatttttagcatcgtgcaaagttgttgatcaaactgtatgggaaaaaatgatcagaccagcctatgaccatataataggcaattatccaaaatctgaaaacgatatcatgatgtccagaagcctattgaaaaaattgggcatttcaaatccgcaaacaggtatggaaatatcagctcagattttatttaaggactggtctgtcaatggaggggaagaacttacggagaaattcactttatctggatattacactgattatattgatagttctctttatattccaacagtatacttttcagagaaatatctggatatgagacaaattccaaggtttccggcaaaacttgctcttactgttaaatcggagctttttagcggtgaccaattggaaaaaaaactgtatcgagacattgaattagacaatgcacagcagcagtttgtggcaaccgattcggcaggaatgaaatctataacgcagtttataggcgggtatggaacggcgatagcatgttcagttatattattggcgagcgtctatttattgatatataatgtgctttctatttctctggcgaaggatatgaataatttcggattgttgatggttgttggtttaactcgtaaacaacttaagaaaatggtgtttcgtcaaaatataatcatcctgctgtccggcattatgggaggagcgtttttaagtaccttagttggtatatttgttttcccgggactgtttgaaaatttatttttgaagcagtatgggaaattggaagtgcagatggtattctacccacagtatttaattggtgcggtagttgtttcaggtctgatgctgctgtctgcaagtaaatatatactcagtaaattaaaaaatataagtccgctcaacgcatacagatatcaggcaaaggagatttcttcaagaaaagaaagaaaatcaatccgcggagcttctatatgtaaaatggcatggtacaacctttggaattcaaagagaaagttcattataacagtggtatcactctttatgggatgtgaaactataatgctcgccggatttattatgaatggaacgaacctgacaaatgaattttcgcaaagcccagactttgaaatcggtactcaaaaggaagccgttgaaaattatctgtttccttataaaaacacagacgaggaacaaacggatcagaattccccgttatttgatgaatctgtagttcaaaaggttatcgagctgcctgaaatagaggaaagcagtctgcatattacatatggatgctatgcttcctatgactatagtgaggattatatacagccgattgagaatatggtgtatgaaaatagtgctccgaataatggaatgacaattcaggtgcttgacgatcaatccattgatttattggatagttatgctaaaaaaagtcgacaggatattgattttgatgcgttgagggctggcagtggaatcatcgtattacataaacatggcttatctgaaacattggaggcggatgcagctaaaatgaaagggaaacctgctcatgtttttccggctgatactacagggcaaaacggagtcgaatttatctgttccggatatcttgataccactgccaaaggctttccggagctaaatatgagttgggatgacgagagctttcactattttttaatcagcgagaaggggtacgaaaggcttggaatgctcaaacagatatttaatactagcgttgatgcgaagaaagggaaagagacagcggcagcagagaaactggcggaattggttcaaaacgaaaataacggtcaggaggactataatatttattacctttcccgaaccgccgataagatcagagaagcagaaagctatatggaagccggaatggatgtaatgtgtgcgttcagcctgagtctcctcttactgggagttgtcaattatattaatatcattttggcgaacagtgcttcccggagatcagaattcgccgtaatgtgttgtatcggtatgaccagaaagcagttaagaggaatgttaattatggaggggatatactattggagtatcctgcaggtgctgttactgacggcaggggaaattattaatgtgggagcggggatgataattcggaataatttgtcctattttacatttactttcccctttaaggagtggattgcaatttccgttgtaacgctaattctttgtatttgtatacctcaaattatgtatatagaaagtactttagaaaacagacaacaaatctaccaatcttaagaggccgagatgaaagccagcgtctggagacgctggcctagtaataaaggcttatagtcgttctgctagcccccatttttacgggtggagtggggcgacttttcgagtcagcataaatgcggagatggcagaggcggctggaattgtcagaacaattccgaatgttccgcatagtccctgagcaatttcgatgctgagataattagaattgataagttggttaaattgtacttgatatgagaggaacacaagtaatgtgatgaatgcactgcctgtaaatgcaaggatcagtgtattcgtcattgttccgatcatatcttttcctatttctataccggatctgaaaatatcttttgcagtaagagtcggattatggtgataaatttcgtaaagtgatgaaacgacagacattccgacatccatgatcgcaccgagagaagaaattacaactcccgcaaaaagaacgtctttaatctgtagaccggtttcttcatgtattaaaatcaaaccttcggcatctgccgaactgaatccgtccacatggatcatggcagatgtgataaggaaaagaataagcgcaaaaaacattccaatcattgtagataaaatcgcggaaaatgttttcccgctttgtccgtttaacagaagaagagtaactgccgtggacagtatggcacatatgatactggatgcgatcggcggccatcctgagaatacggcaggcaggagaaattcaatgataagaagcatagaataaagaagccctgcgattgattttaatccctttcctccgccgatacaaaagatcgcggctgcaagaacggcggcacatgcaaaaagagaaaatgtgcggtcataattgtatacagtataatatggctcaatattatcaggctgatcgatattgataataagaggcatatggattttcgcatgaacattatgtgttttcgttagataatttgttacttctataattttacctttttgaattccttcggacatttttatttttaaatcctgactgccgaggtgaattttaagttctttatcatattcaatgtcctcattagaaatctccactacgacacctttgtcgtagtggagtgtatctgtgctgtatcgagaatagcttttaaacccgaaattctgaagaataagtatagtgaggacactgaggaaaataagtatcagtacaatatagttttgctttatttttctcaacatcattttatcctatctgatcttaagcagatctccttctttttgtaataaatgcaataacggaaagtgatgcggcaagcagcaaagctatcggagcaaaagtggtgatatcgccggtttttgcggacggagcagaagtatttgctttattactgctgttgttattgttgttggcattattattgccgctgttattgccattgttgttattgccgttgttgttattgccgttattgttattgccgttattgttatcgccgttattgttattaccattgttatcattaccgttttgatcatcggttttgacaagattctcgtaagctgtctgaagatctaaaagcgatgcatccagcatatcttgtgtggcatcaaaattttttaacagttcttctgctgatgtaagagcatcggaaaaggacttccaactgtcttttgtataatcagactccgataaattcatatttttaagttcatttatcttattgagaagagctgtattatccgctttgtagattgtaaattcatctaataaagatagatcatcggcgtaataagttttcattgtgtaagaagtatctgtcactttaatatctgttaccgttcttctgtaagattgatccatcttagcggaatattcggcattcggagctttgatatcatagtatttactaccggaagcagagtttgcggtaagataaagaattcctgtcggatttgtaacgctgctctgaactcctttacttgtgtcaggagttgttccgtccatcatataagttcttgtgtaaacatgatcatgtcccattaatacaacatcaatatcaagatctttgaaaacttgaggaagttcattacgtcttgtaatgatatcgccgtcgtcaacatgacttgcagttgagaaaatagaatggtgaaaaacaactgttttccattttacattcggatttgcagcgattgcttcttcgataaatgctttatgttctgcggtggatctgtcattggagtttaaattaatgaaaagtgtattttcgtaaacaaaccagtagtcgcttccggcagttgtctgtcctttgtcagcgctttcgtttggcaggttaaaatgctgattatatgcggcagaacctgagtcgtggtttccgattgtcgtagcgctcggaagggaagtaaacaactcatttatgtatcctgtatactgtgtttcatttgaggccgtgtttacctgatctccgcctgaaagaagaaagtcggcgttaaattttgaagaaatagttttcaaagtttcattccatccttcaatatcgctgtctgtgctgccggcgccgatctgaggatctcctacgaaggcgaattcataagaaccgtcgttgtttccggaagtaaaactataaatatcactgattgtatcgccattttttacacgatacacatattctttatcaggaagaagtcctgtaagaaccgcttgattagaatagaatcctttttcgtttgcagctgttgaagaagcgggtacagttaagtaattttcagggaatgtatcgcctgtttttaccgcatactgaacttctcctgccgtttctgtgtcggcgtaccacgtaattccctgacttgacgtatcgtttcctacagttagaaaaatagatttctgcgttactttttcatcattgcttccgctgttatcgccgtctgtattattttcattatagtttaaagacaaattctgaaattcaaagtaaatatcagaactggattcacggtcttgatgaagttctacagaaagaacgtttgatccctcttttaagatgcttttcagttgatcttttgtaagaacaactgaagcttctttaggagctcctgcgcttactcctgcataataaagattattttcatgcttttcatccggcatgtcggctgaagtgatcaactgtccgtttaagtaaacggcaacagcgtcgtcatggaaaagagttcctgtgacagaagtgatctgatcaatattttgtgcattaaaagttgtacggaagaaaaatgtcggagtacatttgctgttttcttgatcttgatattgctgtaaaagaactgtcggagtaaatccgttaaaagatgtaagagcgccccttttcgcaccgaattttccggcggcagacttccatgcagagtcattaaaatcaggagtagtccaagcagtgagcgaggacagcccggatgccggatctgtgttgttgtcaagatatttccatgttgtcttttcattgactacggttacattttcctcggtattctgctcttttgcgtaagcagtgaccaaagcggcggaacacggaaatgcatttataacgcttcccgttccgagaattgctgcaatcgccgcagcgccgatctgtaattgaacgattcgttttttcataataacctcctgtaaaagttcctgttttattcgtatgatgccgtgacagtaaaagacggtcacatgccgatagttatcgtagcatttgaaaaaaacacatacaatagaccttacagtcatttaaaataaatgacaaagatttaaaatagagagaaaaacttaacaaaaataaaaaccagaatttaacgtaaaactaacaaaaataaaaatcatggaaaaaatagtggaagcaaaatgatttcagaaaaatacgaaaaacggttgtagcagacagatgaaactgttataatagatgaggtatttacaaatattaaaaaagtaaaataattgtaattaacagcttcaaaagagctgataattaaaataaaggttgccataacaaaaatcctgaaaacagaatgttttcaaggaaaagcggcatttgtctcgttagttaaatggatataacagggtcctcctaagcggtagatggttcgagtctaaattttgcatacaacttaatatttttgatagatgtctcagtagctcagttggatagagcacacgcctcctaagcgtggggtcggaggttcaaatcctctctgggacgctggaaacaacgctgtaagcctttgttttcaagggtttacagctttttttgtttagctgtactctttagacaaaaccatttttcttttattggaggttaatgtatgtttatgagttggaacttatattttgctaattggaaacgaacagaaacgatgtccttgctaatttgagatttcagaccgctttttggcctgcaatcagtgctgccagtgtatttgcaagttccggtgatttttgaagctgttcgatcaatgctgcaaggtctatggtctgtgcctgaggctgttcttgcggaggtgttacttttctcaaatcaggatttgcatagaaagcgctctcgaatttctgtgcgttgatcttgcgatcctcgtcgagaatgtgagcatagactttcgtaatcatatctatttctgcatgtcctgtatcgccctgggtgaccttcaaatcgccgtggttgagtttcagcttgtaagtcgtactggaatgcctcaaagagtgaaatacaacgtttgggagccctgctttctgtttcaacagtgaaaactctttctcaataatccgattctcacaaggtctgccatttggcagtgctaccactaaatcgaagtcctgatattcatcaccaagaaaactttttaattcttcctgtgatgttttccattcccgaagaatataggcaactgtcttaggcagccagaccttacggatgctggaatctgtctttggttttttcaggattatccgggtgctggtattcggcattaacggagtaaagatatggtaaatgtctttttctcctaacgtctcaatcgcctgtttggacgctcgtgccagttctgcttctatgtagatataagcattatcagttgctatgttttcatcctcaatatgaacatttttccaggttagtccaagaatctcccccatacgcaaagaacacgcaaaagcaaggttcatggcaatatacagtttactgtcggtacactgatccaaagcaagacgaatcgtttcagcatcccaaatatcgcgctttttatattcagtcttgggaaggactacattgtcaaaaggatttttttcaatcaattcccaacgaacagcttgcttaaaagcacaccgtagaagtttgatgattttctcaatcgttgagttcgtgacaaattctgtccgtgctttcctattcttccgagaaacagaaggcgtcttttgaagtgtttgaatatacttatccaccacgcgggtagtaatgtcttgcacttccatatctccgataatcggattgatatagttggcaatcagggctgtttgactgtcatacatagacacgccccattttttctccccatacgtggaaacaaaatcatacagaaaagctgaaactttctgattattcggaggaaggaatgtaccattgttctgttggttttcaacctccgctttccgtttcagcgcttctttatgggtatgccaggtttcccatttctgttttgtttgaagaaaacatcttttgatgataatgaaagatatgtaacgctatctacttgtacttcagagagtacaaacggcagacatcttctaattggaagaattttagaaaataatgctgatgaaaaaggagaaccgcaatatgaagaaaaatagacagatacttgtgttagcagctctattgtttagcttcttgtgttttcctgctgataaagttttagctgcatcaaatgtagtagaggttccgttaacagttaagcaaaattttgaagaaaatagcaatgaaaaaggaattgatcttactggaacttatgaatttcgtgcattagacataggcattcctatgccgggagattctgataacgacagacatgtttttgtactggatggtaataatgcggaaaagatgatttcattgcagttccagcatggcggagtataccgttatcatttggttcaaacaagtaaggataaagaaaattatacatatgatagaagttcttatattatagctgtttatatcaaaaacggagaaaatgggaaattggttccacaagtaattgcagaaaaaaatgatggtaagaagtatggagaattaatgttttacaattcatataataagaggaatatatagattataatctggcgaaggcaatgaagtaatgaaaaatagtgaaaaatagtgaaattttagtggaaaaattctgcaggaaattattcaatagaattacataaaagcgtgtcgatgaacataaaataggagtagatattgaaaatctgttttttctgtggtagaatttcattactaaaaattgtgcaaatgcataaaaatgaggaattagataatggaaattaaaagagatgcttacttacaacagttgatagagcgaaaagataacggaatgataaaggtaattactgggattcgtagatgcggaaaatcatttttattgtttaccatatttaagagatatttactggaaaatggtgttgatacagatcacattattgaaattgcattggacggtatcgaaaatgaagaattgagagatcccaaggtgtgctataagttcattaaagatgctatgaaggatagtaagaagtattatcttcttctggatgaagtacagtttatgccacgatttgaggaagtgttgaatagtctgctacgtatgagcaatattgatgtgtatgttactggaagtaactcaaagttcctttccagcgatattgtgactgagtttcgtggtagaggtgatgaaatcagaatctatcccctctcttttgcagagttttattctgtttataatggagactatgacgatgcatgggacgattacatgacttatggtggactgccgcaggtcgtaggtcttcagagcgaacgacagaaagcagactatctaaagaacatctttgctaatgtatatctgaaggacgttatagagcgaaacaagattcagaatgtggacgagatcggtattttggttgatgtgcttgcttccgcaattggcgcacctactaatccaacgaaaattgccaacacattttccagtgaacgtcagatgagctataccaacaaaacaatctccaaccacatagattatctggcagaagcctttttgatttctaaggctagccgttatgatattaaaggcagaaagcatattggcgctaatttgaaatattactttactgatctgggattgagaaatgcccgactgaatttcagacagcaggagcctactcacatcatggagaatattgtttataatgagttgttgatccgtggctataatgttgatgtgggtgttgtggaagtatttgacaggaataaagaaggtaagcgtgttcgcaagcagttggaggttgattttgtagtaaatcaaagcagtcaaagatattatattcaggttgcatacgacatgacctcggaagaaaagcagactcaggagttcaattctttgcgtaatatcccggattcttttaagaaggttgtcattgtaaatggaagtaagaaaccttggagaaatgatgagggatttgtcattatgggaatgaaatattttcttttgaatgcaaatagtttggaatattagttttgcttgtttataaaggcgcatatgtaatttggagacttacaaagattaaataagaggtcgttatgttaaaaatatatttaggaaatatggagaaagcgatttatcatcctccgacttattttgataatcaatatgaggatgaatggattacaaaagaattatcaatcaggatgattaaagaagttgataaatcagatgtgataaattcaagtctgatacagagtccggtattgggaacaatttctgcgaaagaactatcaggttctgtaaagacattgatgctaatggcatttaaataaagatatataaagtaaagataaaataattacagatttaatcaattacccattccattcctttccgtccctcttaattctttctctgactttgctactcactacctgtcaaaacggaattgcagaatagctttgataagctgtgttttcaaacggtcttgaatatcgtcgttaatatatcctcgatatttggacagatatttaatgcgtggactgtaatgttgtaaaacaaattcaatcgcttccggttctccggcgactgccttttcaatgacttcaaaggggatcagcttcttgttcctcatgttctaatctctccatttcttttcgcagctgttttagtgccgctaatttccagtaatttgctgtacttctgtttcgcccatactcttttccgatttgagcgtcggtataaccgaagaaaaagtacaggaacaaaacattgcgtctttattcggtcaatttcaatagtgcgtcggctaaccgcttacttgcgacaacaatctcttgcccttttacagcaaagaaggtcggttggttgtactgctcaaaataggtatccgttgtgaacggtttaagcggtgtttcggatattaagtattcaagcgatacttctcgtttctgcttccgtccaaaatcacgataggcagtcatttgtaccttttttcagaccgtctaaagtaacagtatcaacaatagtcacacttttaccagcgacgattgatttttcacctgttgctttatcggcagcagtcgtatggatagtgatttctggttcgtattcatctgtcagcgtacctaagtcaatcacggtcttatttcttgaaactaccacatcaaaagcaggaatcagcgtcattcccttattggaatcgcagcgcaattcctcaatcgtataggtatcgtaaggcaaagttgaccggggatgtcgtattagacgaagctacgctgactttcaaaattatctaatcaaaacaggacgttcatttacaaagtgggattctcgggttactatttaccccctaaaatatgatataaaaaccaatataaatgtcatatcattacaaatgtattgaattagaaatgattaggcattataataaagaaaaacggaggtgtgaaatatgtcaagtacaatacaaattcgagtcgatgatgagttaaaaatgaaatccgatcagctttttaaagatcttgggacagatacaactacagcaattcggatgtttttaacgcaagctgtagcaaataatggttttccatttgaaattaaaagaatcgtacgaagtccatatagtcctatgacggaagaggagattttagaaaaactggagaaatccagagagtcagcagcaaagggaaatcacaaatcagcggaagtggttgtttcagaactgagaggaaaatatggattataaggttgtggttacatcagatgcagaagaagatttggatagatttcttcaatatcttctctttgaaaagaaaaatgaaccagcagccggaaatattcttgacgattttggagatacattaaattgtttgaaaaatgttgcaggaagtttgtctttatgtgagaaccaaagacttagagcgttaggttatcatagaattaattttttaagacatcgatattttatgctctatagaatcgaagaaaatacggtgttcatagatgacatatttcatgaacttcaagattacgaaaacaaaatgaaataaaatcgagataacaaaataaaggaaaagtgcattcacacttttgggaaaagagacgattgatttttataatacttctgataccagagggacaagccaattctatggtttgaattatcagaagacaggttttctgcagagaatgacaaaagatatacacacgaagaagtgtttgcaaatcttcggagaaaaataaatggctaatacaaattatgagttaagatattttgctactattttaccgggatttggaggaaaaaatagtatatatagcagaaactttgcaaaatccccaggcagcaaataatctgttggatgatgaacctaatgaggggtggtgtatgatgttgttaaaacctatgtaactgaaaaaataggtgacttaactggtttggaggttatggcaacatgtccgagaagtagtcaaagtaaaataagaaagaggaacaccggaaacggcgtttccttcggaatagtagatttgcacaaagaagttgaaaaaaatatataaaaaatgctcaaaatacaaaaaagtgttgacgaaaagattgatttgtagtattctttttgtaaaataaatacgaaacagggaatcataggcttgttacttaatcttggttattaaggcaaattctataatatgactgtaagagtgagcagtcatttatagagtttgtcttttttgttgttttagggaggaggtgtgatagtgaaagaagatacagggcaaattttgattgtggataagattgttaataataatattgtgatagcgaaagattttcgtggtcgggaagtagttgccatagggaaaggagtcgggtttcgtaaacgtaagaatgaagcggttcacagatctgagatcatgaagacatatgtgctgttggacaaagttgacagcggtgtgcttacgttgtttgaggaaatacaatttgaagttattgaaacttcgcaaaaaattattgattatgctcaggaaaagttgaacgttaaatttaatgtaaatttgttaatgagtctgtcggatcatattaactttgcattaatccaataccggcagggaaatcacgtatccaaactggtgaatgaggaagtaaagcgtttttataaagaagaatatcatattggtgaaattgccgtccaaatgattaatgaaagatttcagattctttttccaaaagacgaagcaacggctatagcgtttcatttgattacggcaacagagaacaagtcgaatcatcagatgatgattatcatgaaggctgtttcggatattgtaaaaattgtagaagactatctgaatgtctctttacatgaagataccattgcttattcgagatttgttattcatctaaaatttttgtttaaaactgttttgtcaaagcagaatgtaccggaagttgcagggatggatttcatttttactcagattaaatcagaatataaaaatgttatagagtgtgtgaagaaaatcgcagattatattatggaaaaatttaattaccgatgtacagacggggactgcatttatcttatgttacatgttgtacgattatatgaaactacattgaattgaatggaggatgtgctatgtcaaaaattgattatcaggatttatctgcaaaaattatggacaatatcggcggagtaaaaaatgtaaaaacagttacgcattgtgtgacgcgattgaggttttatttgcatgatagaaatatagcggaagatagtgaaataaaaaaactgccgggagtccttggagtagtatatgggaatggacaatatcagattatattgggagagcatttatttaatgtttacgataatatcgtaaaaaattattctgtagaaacagaggatgctattgatgaaaatctcgatgaagatttagtgcaaagcagtgaaaagaagaactttaaatattatttcagcaaagtgatcttgtttatgggacaggcaatgactccgtttattactgttgtttacggagccggaatgttaagagttgtgctttctctggtcagctactttgcgccggctgctgcggagagttctacatatcagttgtttgattttatgtcgcaggctccgttttattttatgccgattctggtagcttatggaacatcaaaagtattgaaagcaaaccccgctttttcaatcgctatggcagcggcgcttttatacccgaattttatcgctatgatggaagccggagaagcagtgacaatgatgaaacttccggtttatttaacgacatacggaagtacgttgcttccgggaattttctcggcaatactggtagcctatcttgaaaaattattttataaaatcataccgggaatgttgcggtctgtatttgcacctttatgtgttttcctgatcggatatccgttgacagttctcgtacttggtcctgcaggcgctgttgttggatcatggattgtaaaagcaatcgtatttatacaggctcatgtgggaggatttgcgcctggaattattgcggcaacgcatccgtttttggtaatgatgggagttaatatgttgatggttgcaccgatgacagaacttctgacgagggtaggaagtgataatgtattccgcccgggatggattttgcataatatttcagaaggcggcgcatgttttgcagtagctgccagaacaaaagataaagatatgcgtatggcagcattgtccgcagggataggtgcgattgtatcaggagtttcagagcctgctttatatggtgtgaatttgagacttcgtaagcccatgatcggacttgtacttggtggttttatcggtggatcagttgcagggtttatgggtgcaaaagcgtttagcatgggatattcaagtatattgggcgttgtcatttttgaaaaaacgattgctgcaattatagcaggtgtaatcgtttcgtttcttgtatcatttattgttacatttgttttatttaacggaaaggaaacaaagtgatatgttaggatttggaaaaagaaaatctgtttcaccaggaaatattgcagccgttgtcagtggacagattatccccattgaaaaagtaaaagacgaagcgtttgcgaaaaaaatgatgggagacggtgtagcgattgttccgtcagatgattatatcgtatctccctgtgatggaacagtgtctatgttgtatccgacgcttcatgcttttgccgttacaagtgaagacggaatggacattttaattcatataggaattgatactgtgaaattaaaaggaaaaggatttcggagttttgtaaagcaagggcagaaagttcatgtcggagagcggatcataagagtggattcttatgacatgaagaataaggggatagatctgacaactatgatactgttcccttcagccgataaaaagatagctgtaaaaaaagaaggctatgcagatcaggggaaaacaatagttgcatcctattctgtataggaaataaaaataaaacaagaagaaaaggagatttagattatgcagaaattcagtaaagacagaaaagttatggatagttttccggaagattttttatggggaggggctactgcggcaaatcagtatgagggagcatatcttgaaaatggaaaattgccatcggttgcggatgttcagccacatggtgtatttggatatccggatcgcaatgctaaattttatccgactcatgaaggtattgatttttatcatcattataaagaagatattgccgagtttggggaaatgggattcaaagtatatcgtacaagtatagcgtggacgaggctgtttcctacaggggaggaagaccagccaaatgaaaaaggaatggaattttatgacaagatgttctatgaattgaagaaaaacggaatggaaattatgattacgatttctcattacgaaatgccgctgaatctggctgacaaatatggcggatggaaggatcgccggatgattgatttttatgtacgttttgttaaagctatggtaaagcggtggaaaggtgtagttaagtattggctaacatttaatgaaatcggaaacaatatacataaaatggagtggatgactgcaggaatcgacccattgaacgatacacttcaggatgtttatcaggcgtcacattatcaattcgtagcaagtgctctggctgtcaaagcaattcatgaaatcgatccacaggcaaaagtgggatctgtgattgaatataagacaatatatccgatgagttgtgatccaaaggattctctggtagtatgcagagaaaagcaaagaggttactttttctcggatgtccaggtgcgtggaaagtatccgggatatgcatgggagtattttaaagataatgatattaacattgaatatacggatgaggatatggaactcattgcaaaatatcctgtggatttcttgagctttacttattatcgttcacgaattgcatcgaaggattatgtggaatccgtccaaaaagagacaaataaatcggataaggaagtagaaggcgatacatcatatagaggagatgataatatcgtcaatacaggaaaaacgaacccatacctgaaaataacgccatccggctggtcgatagatccggatggactgttcctggcattagaagatctttatagcagatatcaggttccgattttcattgctgagaatggtcttggcgtaaaagaagaattagttgacgggacagttgatgatacataccgaatggaatttttaagagatcatattatttctatgaaaaaggcgattagaaacggagtggatttattcggatatgcgtggtggggaccgatagatcttgtatcaaacggttcaggtcagatgtctaaacgctatggatttatctatgtagatagaaacgatgccggagaaggaactctgaaacgatatagaaaaaaatctttctattggtacaaaaaagtaatcgaatcaaacggagaagacttaagtatttaagatcggaaaataaagatgcagatttggcaatgggaacattaccgggagtataagatttagtctgtaccggggatgatttacacattagtaaccgtaaaaattattctacttttcgtaagtagaaaaaattttcctgtggcgtatgatgtgactataggaggtacgaatagatgagtcaacatgttacaggagcagtgattaaggcgcttcgcgagaaatgtcattatacacaggcagggcttgcgatccattgattgtcagacctgtactggctggagtttgtgagattatttaattgcattacataaaaatgtgtgaatgcacattgtgcttgcatctgcaatcggagcaccgatgaatccctcaaagattgctaatacctttgccggtgagcgccagatgatttattccaataaaacaatctctaatcatatcgactatttagcagatgcctttttgatttccaaggcaagtcgatacgatattaagggtagaaagtatatcggtgcaaatctgaaatactactttgctgatctggggctgagaaatgctcgtttgaatttcagacagcaggagtctactcatattatggaaaacattgtttataacgagctgttgatccgtggttacaatgttgatgtgggtgtcgtggaggtattcgataaggataaatcgggtaggcgtgtccgtaagcagttggaggttaattttgtggtaaatcagggaaaccagagatattacatccaagttgcatacgacatgacttccgaagaaaagcaaatgcaagagttcaattctctgcgtaatattccagaccctttcaagaaaattgtcattgtaaatggcagcaagaagccttggcgaaatgatgaagggtttgtcattatgggaatgaagtatttccttttgaacgcagatagtttggagttttagtcgaaatactgtacagaacaggcagtatcgattatcggcggtgcggatggcccgacaagtatttttattcggcagtggtctgcgctttgagtgatctgtgacttgacaaagtaaatgattgtgtttaaactctagttaataaacagagagggcgctattgcgtaaggtgggaaaatgattaacagataatttattttaagtaaaacgcaaaattgtgattggttgctgcaagagtcagctccttttgtgtacgcttaaattagattatcttccaccgtatttgttatatgaattgacggatattttgcgtcaatgtatctgaacatggtgatgagaggcttttttgcgtatgcaaaaaagcctttttgatgtcgacaagacaaagtccggacctgtccgggatcttgccggccgcttccggtgattctgtgcggcagatagattgtaaaacggaggaggaatttattatgtcgatgatccgtgttgaaaatattacgttttcatatccttcaagttttgatcctgtttttgaaaatgtgagttttcagattgatacagaatggaaactcggacttgtaggaagaaacggaagaggaaaaacaactttgctgaaacttcttcttggagagtatgagtatagaggaaaaataacaggcgctgttacgtttgattattttccatttcctgtttcggataaaacgcagatgacagaagatattttgcgtcaagtatgtccgaatgcccggcaatgggaattaataagagaactgtcctaccttggaatagagtctgaagtgttatggaggccgtttgaaacaatgtcaaacggggagcagacgaaggcgcttcttgcggcgctctttttaaaagaagagcattttctgttgatcgatgaacctacaaatcatttagatgtggaagggcgcagacagatggcagattatctgaaaaggaaaaggggatttatccttgtttcacatgaccgttatcttctggacgagtgtgtggatcacattttgtcattaaacagatcaaatatagaaatacaaagcggaaatttttcttcttggatggagaactttaagaagaggcagaattttgagataaacagaaatgaaagtttgaagaaagatattcgtcggatgaaagaatctgcaaggcaggcaaaagtatggtctgataaggtggagtcgtcaaagagaggcgcggcggataaagggtatgtagggcataaagcggcaaagatgatgaaaagatctaaaaatgccgaggcaagaaaagaaagagcagccgaagaaaaatcaaaactgcttaataatgcagaatatgcagaaatgttgaaaataactccgcttatgtatcatagtgaaaaactggtatctttttctgatgtagcggttatttatgaaggaaatcaagtgtgtgatgcggttacatttcagatatgccggggtgagcgtattcttattcaaggaaaaaacggaagcggaaaaagcagtttattgaaattgcttttaaaatatccgatcgaacataccggaactgttacgagtggatcaggacttgtcatttcttatgttccgcaggatacgttacatttaaaaggaacattgaccgagtttgctaaggttcataaaatagatgaaagtctgtttaaagcgatattgaggaaaatggattttgaacgtgtgcagtttgaaaaggatatgaaagatttttcggcagggcagaagaagaaagtattgattgccaaaagtctttgtgaaccggcgcatttatatgtatgggatgaaccgttaaactatatcgatgtgtattcaagaatccagatcgagcagctgatcaggcagttttctcctgcaatgcttctcgtggagcatgatgttacttttcaaaaggagattgatgctaaagtgattacattgtgaaaatgaaaggccattaaataactgcatatccatcgtaattcgtttttatatcgaatcaataaaattgaagagattaccggcgtcgatctgcgggaatatcatacgtttatacatcttgcgatcaatatctacatagaggagatatagagaaaaatattcaccctatttttcacaggggcgatagacatcgaatataaaaacagctataatttttacggcgatgggaaggagaagaaggtaatgacggaaaaagaaaaaatgcagtctcaaaaactatatgatgcaaattatgaccctgaattgggaagggaaagaatagagtgtaaggtgttatgtcaggaatataatcatctgccgataaaagagacggaaaaaagaagtcggttaataaaaaagatcctgggaaaaacgggagaaaaaattcacattgaacctgacttttggtgcgattacggatattgtatatcggcaggtgaaaacttttatgcaaatcatggattggttgtgcttgatgcaggcggagtttctttcggagataatgtgttcgttgctccgaattgcggattccatacatcgggacacccgattgattttgagagaagaaatcagggattggagtatgcatatccgattaaagtcggagataacgtatggtttggcgcaggtgtacaggtgatgcccggagtaacgataggaagcaacgtagtgatcggcgcaggaagcgtagtcgtgaaagatattccttcggacagcgtggctgtaggaaatccatgtaaggtgatccgtccgattacggaagaagataaaaagaaatgttgggatagagcgtaagtatagtcatagaatgtaagcatggtgtacaaatgcggaagtccaaatgtaaagtttaaatagaaatcagacataagttaaaaatgctcctcatcaaacagctttttatgataagaactgtttaatggggagcataattaaatgtccaaatgtaaagtcagacaataaaagtaaatttatcaccgatacataactgctgacataagtttgtaatcgtgttctcaacatcgtggatcgtgcttttgatccgaagaagcggataacctttattaatattaagcgcctttgcttcctgaggagaagcgaagatgatatctaaagtttttcgtgagtgatctaaaataatattatgttttttcagaacttcaaacaaagaagtatcgtttaagtcttcgccgaacagaaatgaaaatgattcgggaaatttgttgagttcgataattaccggctcatcatccatatatctgattctttccaatacaagtattttctctccgggttttaaagacatttcttttatttcacgttcggaaggctcttctaatgcaatcttgatcgtttttgctccggcagtggcgttcatcatacggcacatatcagtaaagctgatgacttccgttatactgcggtggagcttcttttctgcgacaaaagttccttttcctgatttgcggtcgagatatcctaattcggataatccggcaagcgctttccgaacagtaactctgcttacatggtaagtttcgcttagttcgttttctgtggggaggcggcttccggcagggcgttcgcctgtctcgatctcatgctgaagcttttcttctaattgtttgtatagtggcgttgcaatcgtattatttaattccataaacaacctcccagataaagtattactgttcacattataatacatttgcataaaaatgtatataataaatagaaaataaattatatattgacaataagtattatattgtat

SEQ ID NO: 7654 - DNA, 36194 bp, Unknown
  gut microbiota DNA sequence
gtttacacaacatttttttaattttaatccgtttttatcgtattaagtattctttttttgtctattttttacattttgattgttaaaaacaaaaattaaaaaaacacaacataggataaacttattttttccatatcgttttatcctatattgtggttttttttcaatgatttcaattcaaatattttggttttaaaaatatattctttatttcagatatttcaaacatcaaacgaagaaaacatcaatttttcttctcgtctaacacgagcttggcagatccacagattcccgcatcatttcccaactgcgcaagaacaaatcttacatttttatctgcaaaaaacgctctttctttatacggtttctctatgtacggaatcagtacttcgccggctttggaaacgcctccgccgatgacaaacactgccgggttcacgactgccgcaagattggcaagtccgtatccgagatattttccaaactcagccgcaatctcatccgccacttcgtcgcctgcctttacggcatcaaacacatcttttgccgtaatcgcagctttattaagaatcgtttcccgtttttctgtttttaatttttgttctgccaggcggacaattcccgtagcagacgcatactgttccaaacaccctttattcccacagccacatcgatcgttctcttcatagtttacgcagatatgtccgatttctcctcctgctccgttgttgccgacgagcatctttccgtcaatgatcactccgcctcctactcctgtgccaagcgttaccatgatcatatttttttctccggctccgcctcctttccacatttcaccgagagcggcaacattcgcatcgtttccgatgtacgctttcaaacctgtcagctcttccatttcctttttcacttctttatatttccatccgagatttgcgctcccgtttacaattccttctgccgtcacaggtgccggaactccgactccgatcccgaggatgtcttcttcggatagttttctctcttctatctttgtttttaacgaaaatgcaatatccggcaaaattgcctctccatcagccaatgtattcgtcggaatctcccatttttcaacaatagttcccgtctcttcaaacaaccctatcttaactgttgtgcctccgatgtcaacgccgaaacaataattcataattcctgatctccttccttatcttttatctttttttcgcaagattttcctgcacacgtttatataattcctgcgccgcgttataacccatctgcttctgtctgtggtttaccgcggctgactctacgataatagcaagatttcttcccggtctgatcgggatactgtggcatacgactttatttccgagaaattccgtatactcttcttccagtccgagcctgtcatactctttttctctgctccagtcttccagtgtaatgacaagatcgatgttctgagtttctctgacgctttggacaccaaacattgattttacatcgacgataccgattcctcttaactcaataaagtttttcgtcacatccggcgcagagcctacaagcgtctcatcgctcactttccgtatttccactacatcatccgtcacaagacgatgtcctctcttgatcagctcaagtgcagcttcactttttccgatcccgctttctcccataatcaaaacaccgacgccatatacatctacaagaactccgtgaatcgaaatacacggcgcaagctttacgttcatccaacggatgatctccgcagaaaaatcagatgtcggtttggatgcgctaaataccggcacattactttccaccgccttttttaaaaacacgtcgcccggctctatcccccggcaaaataccatgcacggaatcgggtgtttcagaagcatttcataaatatacactctccgctcttctgtcagcgtctgcatatatgtgtactctacattcccgatgatctgtacgcggtttgagtcaaaatgatcaaaaaagcccgctaactgaagcgccggtctgttgacgtccggcacatggacttctttctctgtcagatccaactccggcgtcagatttttcagatccatcctttctgcgatttcacttagtttaattcctcgtcccatatattttccgttcctttcattttatttttcatagccggatcggctttcccctcatccggcgacattctttattcatttctcttatcatatcatgtatgaaaaaaattgtataccgcctgcgccgccttttcattcatagaaggaagcttcgcaagttcttctattgaagctgctttgatcgcgtccagacttaaataatgacgcataagcgcttttcttctcgcaggtccgatcccttctatatcatccaggatggaatgtacctgaccttttcctctgagctgccggtggtattcgattgcaaaccgatgcgcctcatcttgaattcgtgtaataaggcggaaagcttcggatgatttttcaatcgaaatctcttcgttttgaaaatagagtcctctcgtccggtgaaaatcatcttttaccatgccgcacaccggaatattcagattcaggtcctctaatacctgaagcgccacgtttacctgaccttttcctccatccatcaagatcagatccggaaatacagtaaactttccaagctctccgttctcttcccgttctttcaaaccatgagtaaaacgtctggtcagcacttctctcatacttccgtaatcatctgcgccttggattcctttgatcttaaactttctgtaatcatttcgttttggttttcctctctcatacacgaccatagatccgactgactcgaaaccgttcgtattggaaatatcgtaagcttccatacgcctgatctgcgaaatgccaagcagtgcttctatttcttttacagctccgattgtacggccttcttctcttcgcatccgctctttgtctttgctcaaaacaagcttcgcattgtcagaggccaattcgaccagtttttctttcgttccttttttcggaacttttaccgtcactttctgtccacgctttgaggtaagccacgtttcgatcaattctctgtctttgatttcctcctgaatcatcagttctcccggaatataaggcgttcccgcataatactgcttaataaaactgtctaaaataccggatgttttttctccgcttgagatacgaagataaaaatgatcccttccgatcagccgtcctccccttataaaaaacacttgaacaaccgcatcttccccttccgaagctgccgccagaatatctctgtcttctccgctcgaatctgtgatcttttgtttctgagcaatctttttcacactgtttatcagttccctgtattcgatcgcacgttcaaactccagattctcagaggcggtattcattttttcttccaactctttcaagatcacatcataatttccattcaaaaacttcaacacttccgcgatcgccgccccgtagtcttcctgagaaatatagccctgacacggagcgtcgcactgcttgatatgataattaagacaaggacgttctttcccgatatcttttggaagatttcgattgcagctccttacatggtacaatttatggatcagatcaatcgtatctctaaccgcctgcgcactcgtgtacggaccgaagtattttgccttatctttcagcattttccttgccagcaaaactctcggaaagggttcattcaccgtcactttgataaatggatatgttttatcatccatcagcatcgtattgtattttggatgatgttctttgatcagattacactctaatacaagagcctccaactccgaatctgtcacaatatactcaaaacgcctgatatgcgtcaccatctgttctatcttgacgcctttatttctgctgctttgaaaatactgccgcactctgttttttaaactgatcgctttcccgacataaatgatctcgtcccgctcgtcatgcataagatatacgcccggtcttgcgggaagcttttttaattcttcctgtatgttaaaattattgttttccataaactttattatacttcccatatataaaaaaacaagaaaaacttatcttttataaacattctctttcactttatcaaaagggatactgctcagtggcattttggttttgttctatttttaaaagctctgcttttctctcaattccgcctgcatatcctgtcagatttccttttgctccgatcactctgtgacacggaacgatcaccgacacagggttgcgtccgatagcatttccaaccgcctgactcgacatctttgaaatccctctgtcatgtgcgatctgctttgcgattgcgccgtatgtcgttgtctctccatacgggatcgtgcaaagcatctcccacacacacatctgaaaatcggttccttccaaatgaatcggtatttgaaagtccggttccactcctgaaaaatatatatccagccattttttcacacccgaaaaaagtgttgtctctttctcctcactttcccgggtcaaaccttgaacagcatttttctgtccttcaaacgccagtccggtcagtccgatctcatccgctgtcagcaatatcctgccaagcggcgatatataactgtttctgtattccatctattttccctcttattctcaaactatccgttcccggaaattcttttcttccaaaattccgaaagattcgacggattttatgatttcaaaagaaaaaggatcgctctccgctttctctcaaacggaaaacaacccttatttccttatttcatcgcaattctcccacgctcttctataccggataccgcgccttcttcaggctcggaaattccttttacttctctgaatatcttcataaattcttttcctgtgatcgtttctttttcaatgagaaattccgcgattttatcaagagcttctctgttttcgaaaagaagtttcttcgcctctgcgtacgcagatttcagcatcttcattacctcttcgtcaatctctcccgccgtcgcctctccacagttaagaaccgcacggccgtccaaatatttgttctggatcgattcaagccccatcagtccgaacctgtctgacattccatactgcgtgatcatggcacgggcgattttcgttgcctgttcaatatcatttgacgcgcctgtcgttactgtatcaaacacgatttcttccgccgcacgtcctccgagcgcaacaacgatcatcgcttccagttctttctttgtatttaagaacttctcttcttccggagtctgcatcacataccccagcgcgcccatcgttctcggaacgatcgtgatcttctgtaccggctctgtatttttctgaagcgctgtcacaagggcatgacctacctcatgataagaaacaattttccgctcttcctcgctcatgatccggtctttcttctcttttccgacaagaacaacttcaaccgcctcaaacaaatctttttgactcacaacctgccttccgtgttttactgcattgatcgccgcttcattgatcatattcgcaaggtccgaaccaactgctccggatgttgcaagcgcgattgcttccaagtccacgctctcatccatccgaacgtcttttgcatgtacttttaaaatatcgacacggcctttcagatccggcttatcaacaatgatccgtctgtcaaaccgtcccggacgaagaagcgcaggatcaagaatctccggacggtttgttgccgccagaatcaaaagtcccttattcgtatcaaatccgtccatctccgccaaaagctgattcagagtctgctctctctcatcatttccgcccatcgccgtatctcttgtctttccgatcgcatcgatctcgtcgataaacacaatacacggagccgactgctgagcctgtttgaacagatcacgaacacgggatgctccgacaccgacatacatttccacaaacgcagaacccgataatgagaaaaacggaacttttgcctctcccgcaaccgcctttgccaaaagtgtctttcctgttcccggcggtcctacaagaagcgctcctttcggaagtttcgctccgatcccactgtattttcccggattatgaaggaaatcaacgacttcctgaagcgattctttcgcttcatcttctcctgccacatcccggaacgtcactcctgtttctttttccatgtacatcttcgcattgctctttccaatgcccatcattccgccgcccttattcatgcgcttcatcatatatgtgaacagccacaccatgagcagaagcggcaggatcaccgtgacaaacatttcaaaaaacaactgaccgatcgtatccggaatctcactttgaaacttaaccccggcacggtcaagttttgtcacaagcgtatcatcgtcaacatatcccgtataaaaatcaggcgcgtgttctttcccttctttttttacggaaggcagttggatacgcaatctttccatcgcttcttcaaacggactgaggcgtccttctttttccgctttctcaacagctttttcccgcgcttcctcacgggctttgtccgttaatgtaatataaatcttttcactgtctaactttacctcttttactttatgttcacttacaagtttaagaaatttgtcataactgatctccctttgacttgtattgcccatagcagaaaagaatccgatcaatacaaaagccaccagcagggtcgttataagcacaatgcccaaaccctgccggttattattcggattatttttattattcttcttattctggttgttatccatcctgttcctcctaaaaatcttcggcgtcattgcacaacgtgcatgacgttattaccattataagtacagcttttgcataaatcaataaaaagattatgaaaatattgtaaaacagttagattttatagtatactgagtacgaaatgtgtcctgccgctattcttttgcatgcaggattaaaatgaacaaaaaagtggagaagaataaaatgagaatcggttttgacaatgaaaaatatctgaaaatgcagtccgaacatatccgaaaccggatcggaaaatttggcaacaagctttatcttgaattcggaggcaaactgtttgatgattatcatgcgtcccgtgttcttccgggatttgctcctgacagtaaactccgtcttttaaaagagttgagttctcaggcagagatcgttatcgtcatcagcgccaaagacattgaaaaaaataaaatccgcggagatctgggcatcacctatgacacagatgttctccgtctgattcagacatacaaggatcagggattatatgtaggaagtgttacaatcactcaattttccggtcaggaaagtgccctcctgttcaaaaacagacttgaaaagctgcatattccggtatatcttcattatcttattcccggatatccatctaatattccgcttatcatcagcgacgaaggttatggaaaaaatgattatatcaagacaagcagacctcttgttatcgtcactgctcccggacccggaagcggcaagatggcagcatgtctttcccagctttatcacgagcataaacggggcgttcttgcgggatatgcaaaattcgagacgttccctatatggaatctcccgcttaagcatccggttaaccttgcatacgaagcggcaactgccgacttaaacgacataaacatgatcgacccgttccatcttgaagcgtatggagaaacgactgtcaactataaccgtgatgttgagattttccctgtattaaatacaatctttgaaaagatttacggagaaagtccttacaagtctcctactgatatgggcgtcaacatggcaggaaactgcatctgcgacgacgaagcctgccgtgaagcttccaaacaagagatcatccgccgttattttgatgctctgaacgctcttgcaaagggcagcacttccgagaaagaagctcagaaaatcgaacttcttatgaatatggcagggattactgtcacagaccgcaaagttgtaatcaaagctttagagcgcgccaaagagacagacggtcccgctgccgctcttgaactgcgtgacggaaggatcatcaccggaaaaacaaccaatcttctcggagcaagcgcggcgcttctgttaaatgtactaaaagtgcttgcaggtatcgatcacgaaactcatattatttctcctgaatcgatcgaaccgatccaaaaattaaaagtagattatttaaagagcaaaaatccacggcttcatacagatgaagtacttatcgccctatccgcaagcgcggcaacaaatccgcaggcacgccttgccctttcccagcttcccgaacttgcaggatgccaggcgcacacatctgtcatgctgtcagacgtagacattaaaatctttaagaaactggaagtgcagctcacttccgaagccgtatacgagcacgctttataaaataacaaaggggaaggattactcctcccctcttattatccttatgttacagacagccggatgtttttagatccggctgttttttgtatttctatattacttcctcattcgcaaaaagttcctctataattttttcgtacacagcacatttttccgcttttttgatcttctttgcgtatggtctgctattagtaaaagaggacgccaaataaaaccacagttctttcatcttatacaaaactgttctttcaccggacatttcctcgcaatatgcttcatatagcatatcatgaaaatgacgcatttccgctttatccgcaccatctccgccttttatcttccgggcaatcgccggatcggcgagaactcccctgccgatcattatactctctacttccggaaactgttccgaaagattacggacatcttcttccgatgtaagatctccgttataacatattttatgccttcctgtgccgagcgctttttcaaacacatccatatgcggaatatttttataaaaatctttttgtgtacggggatgaatgatcagctcttttatcggatacttattataaatatccataagtttcggaaattcctcaccactttctgttccgatccgcgtttttacagaaatatcgatcgggcaattttgaaacacttcttccagaaaaagatccaaacgttccggaaatgctaaaaagcccgctccccgccctttcgtcacaacagttttagacggacatcctacattcagattaatctctttatacccgtactgttccagcttctttgccgtctgtacaaagtcctctgcacaatttgtcaatatctgaggaacagcatgcatccccttattatgttccggaagaatatcttttttctccctcgcgctgaaacgtcccatttgattcggcttaataaacggaataaaatacttgtcaaaccctccaaaacacttctgtacggcgccgcggtaaatccatcccgtaattccttccaatggggcaagatatatattcatatataataactctcctttaatcaatatatgacctttagtaacagttcatcccgcgacctttagattattacagcgcccctgccttgtcaagaaaaatctcatgtgctaagataagaacagtattttttaccaaaaaggagcataacgtttatgaatacattacggaaatttatcacctattactcaccgtacaagaccgtcttttttatcgaccttctttgcgctgcattcatcagcattgtcgatcttgcttacccgcagatcctgcgcgtgctgacaaatactttgtttacgaaagacagcagtctcatccttcatgcgctcccattcattgcagccggacttcttttcatgtatcttatacaaagtctttgcaaatattatgtaagttaccagggacatatgatgggcgcctgcatggaacgtgatatgcgccgacaactatttgatcattatgaaaaactttctttttcttattacagcaaaaataattcaggacagatgatgagcaaactcgtctccgatctgtttgacattgccgaatttgcacatcacggacctgagaacctttttatttctgtcgtaaagatcatcggctcttttattttcctctttctgatcaatgcgcggctcgccctgccccttgccattattgttttatgtatgttcgttttttccatacgccaaaacaaaaaaatgcaagaaacatttatggataaccggagaaagatcggagatgtcaatgcaagtctccaggatacccttgccggaatccgtgttgtacaatctttcacaaatgaggaaatagaacggaaaaaattccagaaaagcaatcacgcttttcttctctctaaaaaagagaattatcactgtatcggaagttttatgggatggaatcttctgtttcaggggttgatgtattcagtcactcttatctatggcggataccttatcgcaaaaggattcatgaacgtcggagaccttgccatgtatgcactttatatcggtattttcatcagtccgatccaaatcctcgtagaacttattgaaatgattcaaaaaggtcttgccggattccgccgttttcttgacgtcgtggaaacagaacctgaaatcaaagacgcttccgacgcagaagaattaacagatgtaaaaggcctcgtccgctatgaaaacgtatcttttcactatgctgatgacgatacgtctgtcctttctcacatatcttttgaaattcccgccggaagatcagtcgctcttgtcggtccgtcgggaagtggaaaaacaacgatttgttcccttctgccacgtttttacgatgtgacaggcggcaggatcacaatagacggaaaagacgtccgaacattgactttaaaaagtcttcgaagccatatcggcgttgtacaacaagacgtatatctgttttcgggaacgattcgcgacaacatcgcctacggaaaaccggacgcgtcggatgaagagatcatagatgccgcaaaacgtgcaaatattcacgattttatcagcgaacttcccgatggatattccacttatgtaggcgagcgcggaacccgtctctcaggaggacaaaaacaaaggatttctattgcccgtgtcttccttaagaaccctccgatcctgattcttgacgaagctaccagcgctcttgataatgaaagcgaacggcgaatacaaaaaagtctcgaagaactttctaaagacagaacaacgatcacaatcgcacaccgcctctctacaatcaaaaacgccgatgaaatcatcgtcatcacagaagatggcattgccgagcgcggaactcacggatcactgcttgataaaaacggactttacgctcactattaccgcgcttgatctgtttactttcccggattataaaaataaatgtatgctgccgaaaaccgactgcatacatttattttttcatctattattcatatcttaccatttccctttttaatctctgcatgatctttttttctaacctcgatatgtatgactgcgaaatcccaagcagatctgcgacttctttttgtgttttttcttttccatccggattatccaatccaaatcgcatacttacaatcagcttttctctgctgttaagtttattcagagcacgaatcaaaagttttctctccgcttcattttccagatctttataaatcgtatcttcttccgttcccaaaatatccgacaaaagcagctcgtttccatcccagtcaacgttcaaaggttcgtcgatggacacctccatctttgtcttgctattacgccttaagtacattaaaatttcattttcaatacatcgggatgcgtatgttgcaagtttgatcttttttgtcggattaaacgtattgattgctttgatcaaaccgatcgttccgatcgaaatcaaatcttcaacgcctacgcctgtattgtcaaattttttcgcaatgtatacaacaagccggagattgtgttctattaatactttttttgcatcctctgcatactctgttccgagccggttaatcatctcgctttctctcatcccctcaagaggcggcggaaggacttccgttcctcctatataatgcacctctctcccgctcccgaaaatcaaggttttcacatcaggtactactcttaacttaaaccgctgcggaacagctactttcatcatcatgtcatatcctcctatattcccctgttttagtaattttaagcggcagtaaatataaactgtcaaagatattaatccatattttttaactcccgcttataaaaagatccccggattcaggatcatttcatatcgttctttttccgaaagagttctttcactcatcccgagaagcggattttctatccatatgtcttcatccatgtgaatacacattttttcaatccgaaacaccttcatcactccatctcccccgatgctgctgtacggaatcatatgaaagcctttttcccattccggatgtgtcgtaatagactctgccaatcgcggatcaataatattgaccggatcatcagacgcaaaatcgcggagctcatttcccgtatctataagaccgatcactttctttaccccaagacttgtatacaatgttacttccggaagatttttcgtattctgtcttatgcgcgatataaacttccacattcccgtaaatgcaaagtatccgactgcaaatactgcgtaaaacactccggcaaatttcatatacggacgaaacagattcgcagcccctccgaagacaactgccgctgcatacagaacgatcagcgtcctcaaaaaccaggcagccagttcttttttactttgttttctaccctttttcaaaacatctccgccaagtcccgcaaatatcatcacactattaatcccaacgccaaacagaagtgtttttatcgccggcataagcggaagcgctatcacaacacaagtcaaaaaactgcctgctgcccctcctgcaagcatccgcgcataagaattcctatactgcataacacggtttacagccattaaaagcagactgtctaacataaaattttctaaaaaaaatacatctatgtataattcatagtacatagtccaccttctttctcttccgtaattatgtagtgcggaatctattatatatttagaaacaggaaaattttgtcatatattgacatgtatctgtaaatatatttcgacaaaaaacaaaaaaaacagaatggaactcttacatgaaattccattctgtcttaaaattctatattattataccgattcgcttatttcttaaagaaatccggaatcttaatagactgctctttcaccgtactggatggcgtacgcggctgtaaagtcggcatcgtacctccctgcggtctggcagatgtctgtggtctggccgcagatactctgcttccatcattgtcaagacgacttcttactgtcgattcaccggacggaaggatcgatccgactttctgctgtccttccaatctcgcctttaattttgatgcgcttccgcctacattatgtaacccggtcgcaataacagtgatcgtacattcatctgacttcgcgtcatcatacatagcaccgaaaataatacttgcgccttctcctgcaagttcctgtacataatcagccgcatcagaagcatccataagagtaatatctcccgatacgttaacgataacattcgacgcaccctgaatcgtcgtctcaagcagcggactcgcaacagcttcttttaccgcctcaagagccttatcgtctccgcgtcctgcaccgataccgatatgagcaatgcctttatccttcataactgtctgaatatccgcaaagtcaaggttgatcagtgacggaacattgatcaaatctgtgataccttgaataccctgctgaagaacttcatcagctttcttaagagcttccggcattgttgtgcgtctgtcaacaacctcaagaagcttgtcattcggaattacgataatcgtatctacattttcttttaatttatcaattccgctcaatgcattctgcattcttgtttttgactcaaaacggaaaggttttgtgacaactccgactgtaagagctccctgctcttttgcaatacgtgcaataacaggtgcagcacctgtacccgttccgccgcccataccgcatgttacgaacaccatgtccgcacctttgagcgctgccgagatctcttctgaactttcctctgccgctttttctcctacttccggctgtgcccctgcgccgagcccttttgtaagcttctcaccgatctgcattaatgtcggtgctttacaaagctgcagtgcctgcttatctgtattcactgcgataaattccacgcccgcgatctgttcgtcaatcatccggtttactgcgttgtttccgcctccaccgactccgactacaataattcttgcggccgcttctgattcgttggttttaatttctaacaagagtacttcctccttcgtcgtcttactaatttcttatacatcccttaatattgaacgatagaattcaataagtatataataaagtctttttagcaaataatcaatagattttttgctatttttctgaattattacacttttacagatgatccgccgccgctatgccgccggaacaaacggaatcgactccgattcggcatcgtaattctctaaatgcagcacgcccgcctttccgggatataattcagtcagttttttaagaatcggttctacctgtctaagcttttcttcataattcccgtttccaaggctgacctgtacaatttcaaaatatatctgtacgcctccatctgtacaccccatcctgtcaggtgtgagattgtatttttttaaattttttgaaacttctacaattttttcaaaaatactgtcatcttccaccggaagttttttccctattttagcttttgccgaatcaaacataagaccttcgatatgaggaacaccttcgattattttttttgtccgcaatactgccgttccggttctgtcaaaataaagatatgcaccgtcataatctacatatccggccatttctttttctttcactttcaccttcaccgtccacggatctttcagtgaaatactcagactttctactcctgacggaagatcggcatcggtaaaattatatttatacagaacatacagagaatttaccgaaagcggatcattctcaatccatgttgtgatcgttctctctccgtaataagaatttccttccactttatatgaccttgtgcgaaatagaaataccgccgcagctgccataacgatcaagacagtaagcacaactaaaataatcggccacacctttctctttttgtgtttttttctcttcatctattctgaacctccataccgtaaaccttcgtaattcgatacgctaagcacaagtcccatctccaacagaagaaatacaaccgatgtacctccgtaactgataaacggaagcgtaatccctgtgtttggaattgaatttgtaactaccgcgatgtttaatataacctggatcatcatatgcgccattgcccctgccgctatcaaagcgccaagcagatccgacgcttttgttgaaatcacaaaaaaacgccaaataagaatcaaaaataaaagaatgataaatcctgctccgatcaatcccaattcttcacagataatagaaaaaatcatatcattttgagcctctggaagaaatccgagtttttgtacactgttgcctaatccccttccgaacagacctccgctgccgattgcatatagtccctgcagcgtctgataccctttttcatattgctccggatgtctccagattgccaggcgttccaatcgataactttccatcgccagaaaaaccgtcataaatcctacgccgatacttcccatcaatataaaacggacgtatttcggatccgctacaaaaatcagaacaaccgcaattccgagaatgatgatcgcagtgcttaaattacttgctccgaccagacctacgatcggcaaaaccggaatcatcataagtatcattgtgcgaaaacgtttcatccgctgtacatttctgctcacaaggcatgcaaggaaaaaaataacggctacttttgcaaactctgaaggctgaaaagaaatcgggcccaaagacaaccatcttttggacccgttgtattcatccccgaaaaatataacagccacagacagaatgatcgacgtcacatatgcgggaatcgccagcggaacccatttatgataatcaacgcgggcgataagcgccataccaaacagtcctagcagtgtcgcaaacccctgctttttcaaataatgaaacggatcgtgaaatttcacctgcccattgtaagcgcttgtgctgtacaatatcacaagccctgcggcaacaagaagcaatacaacaaatataagcatcccgtcatatcgttttttcttttcagaacgcgtcaatcagctccactccttatagttggtctacaagttctttgaatttatctccacgttcttcataatttttaaacatcccccagcttgcacacgccggcgataaaagcaccgcatcgcccggcttcgcatatttcacgcactgttcaaacgcctcctcaaaggtatctgccataataatatcgtcaaatccgtttgcatgagcgctttgcgcgatcttctctctcgttgcgccaagcagaacaagttttctcactttcccgtcaaacgccttgatccactcatcatattcggaatctttgtcgtaacctcccccgatcagtatggtaggacggttcatggcctgaatccctttgatcgctgcgtccggatttgttcctttcgagtcattataataaaggacacctcttttttctgccacaaactcaattcgatgttccactccgggaaatgtcagaagatttttgcggatcacctcgatcggaacaccatatgcatacgccattgcagaagcagccatcacattttcataattgtgtgttccgagaatcttcagttcactgacatcgcaaagctcgaccggaacatctgccgcgcaaatgatttttgttccatcaagatatatccctttttccagtttacgcgcactgctgaaatatagaacttgcgctgccgttttttctccgaatttctgaagttcatcatcctcataattcaatacgcacacatctgcttttgtctgattttcagcaatacgctctttcgcttcgatatatgcctccattgtatgatgacgattcaaatgatcgggagtaatattcaaaatcgcgcttactttcggatgaaatgtatgtattgtctcaagctggaaactgcttatttccgctacaattaccgcgtcgtccgtcgtttcttgtgcaacgcttgtatacggagttcctatatttcctacaatataagcatgttctttatagtcctgcatgatctgtcccaaaagggctgtcgtcgtcgttttcccgtttgttcctgtaattgcaagaacgtctccttttccaaacacatatgcaagttcgatctctccccagatcgggatgctcttttcacgcattttttcaacgatcggaagatccgtcggcactcccggactcatcactacaaatgaaagctcttctataatctcttccggaaatgttccgagcactatactgaattgcccgttttcttttttagtttctaaaattttagcttcaatctcatcggcgcacagtttttcatttccatcatacaaaacaacatccgcgcctttttcgagcaaaagcctgcatgatccttctccactgatacccgaaccgaagacgagcactttttttcctcttatatccatttttatacccccatcagcgcaatgaggcaaagcaacgccgttatgatagaaaatacagctaccactctcgtttcagaccatccgcataattcaaaatgatggtggatcggcgccattttaaaaaacctctttccgcctgttttcttaaaataagtaacctgaatcatgaccgaagccacttccacaaggtaaataattccaacgatcaggataaacaaaggcatctgcatcatataagccgtgcctgccacaaatcctccaagagccaaagaccctgtatctcccataaacacacttgccggatatacgttaaacagtaaaaatccaagcagcgccccgactacagcacaggtgacaggttcgatcccgcttttcgttccgatcgccacaactgtaaaaaatgttgcgacaagaacggtcacactggaagcaaggccatccagtccatctgtaaagtttgttccgttgaccgttccgatcactgccacaaacaaaagcggaactgccatccagccgatatcaagataatatccgttagagaacggcacaagcatcgtaagcggaatatccgccactttcacgagatagaatgcaaacacagccgttacaataatctgcagagccattttctgcatcggcatcagtccatccgaacgtttcaacacaactttaagataatcatcaagaaatccgatcaaaccaaacgccactgtaaggaataaaaccggaatgatcttcggataatctttcacatagaacagggatgtcacaataacagccgcaagaataataatgccgcccatcgtcggagttcccgcttttttcaaatgagactgaacgccttctacacgctccgtctgcttcattttcagtttccgcaaaaaaggaatcacaatcggtccgagcacaagacttaccgcaaatgccgcaagaaccggaatcactacatgactactcataaatccacctcttcatctcttttatctcataaagtataaaccatccattactttttttcaatcccgagataggggagcacattatcatatatgtcccgaagcaccggggcagcgatcgttccgccgtaataaattccctgaggatcatggatgatgaccattccgagaatctgaggatcgtccgccggagcaaatcctataaacgaagaaatatattttccggcgcttcttggaagcgtttgagacgtcgccgtctttcccccgatagaatatccttcaagatacgcgttttttcccgatccttcggaaacaactttctccagaagttcttgcattgtctccgatgttttctccgaaacaatcccttctttttccccatacttaaacgtcttgaccgttttccctttcttatctaagaccgacacgccaagatgcggcgttacacgcctgccgccatttaccatcgaactgaccgtcaccgccatctggatcggcgtaatctgaaatgattgaccaaacgtcattgtggccagttctaccgctttaatatcttctcttttatgcataatcgtccccgcttctccgggaagatcgatgttcgtcaggctcatcagaccaaactgttcaaaatagtcgcaaaacctctctgatcccagtctaagtccgatatccataaataccggattacacgaattttcaatcccttgcacaaaagtttccgttccatgccctcctactttatgacaccggattttcctgtcttctacgatccgataccccgggcaggagaaagtatcgtctaaagagacgacgccttcttcaagacaagccgccgacgtaatgatcttaaaagtagatcccggctcatacgtatcgttaatgcagcggtttctccacatctgattcagtctgttctgacgttcttcatctgtcatctgatcttccgttttgtcattcaaacgataaggttcattcaaattaaattcaggcacatttaccatagcataaatttctccgttctgcggattcatcagcaagaccgataccccttctgcctgcttttcctccagcaccttttcggccgcctgctcacaatacgactggatattgtaatcaagacttgtttttaatgtatttccggcaaccggttcaatccggtcctctgcaaccccttccaactctattcctctggcatctgtaaccgtcagtatcttcccatttgttccttttaatacgtcttcatatttcacctcaagaccgatgatcccctgattgtcgctccctgtaaatccaagcactcttgacgcaagccggtcatatgggtagtatcttttgaaatcttcatccacttttactcccggcagattatactcacggatacggtcgcctgtctttttgtcaacattcgtctttattttttccatagaagatactttctctacctttttcaaaacatcctccctgtcaagttccaactctttactgagcatgtctgccgtctgctgcggatcttttatctgactgtgaataaccgaaatcgtacacaccgtcctgtttgtcgcaagaacaactccgtttctgtctacgatctcccctctggccgctttgatctccctctccctttcatgcagttcctccgccatgttctgataatactccgcatcaaatatcataagataaacaagtctgcctatcagacaaaaaagcacgaaagccgcacataaaaaaacgacaagtacttttctcttattataagttttattttttattctttcctctattttgtttctcataacaaaaaatccccacagaagatatttttacagtttattatatcttctgcagggttattcctctactctgaaacgtcagacgacgcccaatcatctaaatcaggtgtatagttttcatccacatacgatccgtctgcatttccgtatgtatcctcataattttcatcataatccgtatattctgtattgccgaaattctgaccttgcgcctgagcgttttgcccgctttgtgcaatagtcgtaatgccaagatacgggaatgcctcagacatgatcttctgacttaatcccagaacaagggagctgtcatcctgtacagccgtattaggctcatcgatcacaacataaactacgacttccggattgttctgcggcgcataaccgatataagataacagatactttccgtttcccctcggaagtttttccgctgttcccgttttagcgccgatatcatacccttccacctttgccctcgttcctgttccgtaatccatcgtcgctttcaaatactgtctcaacatcttagacgtttcggaagacactgtctttctcaaaagaaccggatctttcgtctctattacattgccgtcttcatcctgaatctgttttacaacatggggttcataataatatcctccgttcacaagagaagaaaatgcagaaaccatctgtgtcatcgttacattaaaattctgtccgaatgaattggtagccagatcgatctctcccatcgtatccgccgtataaagcagtcctgacgtttccgcctctcccggaagatcaatccctgtatactctccaaacccaaaaatatgctgatattttgtaaaattttccggaccgatcaccgctgccatatccataagagctacattacatgaatttgcaatggcatcctgtatcgtttcctgtccgtgtcccgacttatagtgacagctgatcttcgttccgagaacgtctttagaacctccgcagtaatagctttcgtttccggtcaatgttcctgtttccaagccggccgccacagtaaacggtttcgcagtagaccccggctcataagcgtcacttacgcagaaatttctccaaagatcattcatcgcttcgacctgatcttcttcactcatcgcatcccactgctcttttgtataaagcaaagatagatttctcggatcattcaaatcaaaattagggtacgatgcttccgccagtatttctcctgtgttcggattcataatgataacggctgtgtttttactgccgggatttccatctgcggcatgcgcactgttaaactctaaaatgcatttttccacaatattttgcaatgtcacatcaatggtagacacgaccgtatttccgttcttcgcaggtttgacagtacgctctaccgaagaatcggagtcaaaatacccatactctcttccatccgttccgttgagaattgaattatacgcgctttcgattccaagcgccccttgatttcctccatatacaaatccaagcacatcactcgccatagaaccgtatggataactcctcaaatagtcttcttccagccagattcctttcacattcggatattttttatcatcttcatcaatcttcttaaacttctgagcagtcgcataatccacatctgacacaagcacttcataacgactgtccggagactctttgatcaatttatcaacaacgtccccctctacattgaaacattctttcaatacttcctttgtcggttcgatatactcctttttgtccatcataaccgccacgtcaaggatcacgttatatacgcgctcacttgtcgccatctttgttccgttacgatcgacaatatcgccccttttaaaagcgatcaccctgctgtcatagttttgctgatctaaaacaacttttgtatatttgcttcccttcgttacatttatataggttattcttcctataagaacaacaaaagccagtactactgccataaatagcattaccagcttccgttgcattctgagcgggaattttcttgtcaaaaattcaaatctactcttttttcttttctttacagccataattttttccttactttaatacatcgctggactttgcgagcacaccgctttccggaatatcgttatactgctttacataatccccttccggactatcgtattctacgattgttccctgagcagcataaaccatccccatttcattcatcgctctgtcccgcaccgtctcgagattcaccgagtctgccgccgaattatatgcagtattatttgcctccgtcagatctgcaagttgttcctgcattgccgtaacattttccgatctgcttacgacctccgactgaagatttaagtataaaacgcaaatcaataccgcacagactgccgctgccgtaagaaatacagcataagccggactaatactcatcgcgcggtttcggttcttaacaacccggctgcttgtccgtttcgtctgctccctctgctgcgaatacggactcttcgtttttctcggaagagtttctgcctgacgtacagtatttccatatacataaaatccacttttgtctctttcacttagacttgtcgttctgtatttggatgtacgatagtttgctgccatgacaaatgccccttccttttttgtattttcctaagggttctcccctcccctcggaaattcgtttctatatgatacactcccaatttatgcccgttcaaatattctgagtttcgcactttttgaacggctgtttgattccgtttctgcctccgacggcaaaattggttttttcgtgatcactttcccttttgaaatcttcccacagacacatacaggaaaatgactcggacaagtgcatggattttcgtttttcctaaatgcacttttcacaatgcggtcttctaacgaatgaaatgtaataatgcatatccttccacccggattcagcatctcgatcatgtcatccaacgactccctcaaaacatccagttcgtgattcaactcgatccgaatcgcctgaaatgtccttttcgacggatgacctgacgtcttacgaaacttcatcggtatcgcatgactgataatttcattcagttgtcccgttgtttcaatcggatttttcctacgctcctccacaatatgctttgcaatattcttagcaaatttatcttccccatagtcgcggatcacacggtaaagttccgactcactgtattcgttgacaatgtctctcgccgtcattttctgtctctgatccattctcatatcaagcggcgcatccacccgataagaaaatccgcgttcggcggtatcaagctggtatgatgaaactcccagatcgatcacaataccatctactttgtcaacacctatattctggagctgcggcttcatatcacgataattgctccgaattatcgtaaccttctccccgaagcctttcaggcgttctcccgctgctttaattgcatcggcatcctgatctattcctataaatctccccttactgccaagccttctgcacacttcataggcatgtccgcctccgccaagcgtagcgtctacataaaccccatccggtttgacgttcaacccgtctactgtttcgttcagtagaacagacacatgttcaaatgccattgtcttctccttatcaaatacgaattcctatggattccatacgctctgcaatcgcgtccagatcttcctcgctgatctgactgcgttcctcccaaagagccttatcccatatctcgatgcgatcctgaactcccactaagactacatctttttctaatccggctgctttgcggagcgacggcgggacaagaactctcccctgcttgtcgaaactgccctccgaagcgcttccgaaaaaataacgcttgaaaattctggcatccttactcatgcgtggcaaagtctcaagttcagcaacgaatttattccattcttcctgagagtaaacaaagaggcagccttccagtccgttacaaataacgaaactgtcaccaagatcatcccgcagttttgccggaatgatgagtcttcccttttcatcaatactatggttaaactctcctaataacatctggaatcctttctcttaatgtgagctccacatcgcccctactttactccactagcctccactctttaccacttgactccattctaaaccaccactccccctttttcaacccttttttgagatttttttgtgtccttttttcggctaaaaacgaatcaaaaaacaggatttttcgcaaaaaaagaacatgtatggcattgatgttccaaataccctacatgttgtgtttttaatgaatttattcactttaaagttttaaaaaaaatttgggtgcaagggtgtgcgctcttcaaattcggcgctcactccccacaccacaccatttactcagcagaaccttctgcattcagtccgttcaaataatcagatacggcgtcataattcacctctgagacagttctctcttttcccgactcatagatatcataagcagaataaccaagccatccgatcaatgccagagctaccaccacaagcacccctttacgcatattattcatcagcttctgcttacgcatgatctgttttctgtttactttttcctgtttataacggtcaaccttttcctgactcatcccgtattactcctttcagataagatactacgcatgaggacattttatcacaaacacttctacagtacaactattattccaccgtcatttgcatacattgtgctgattccgcctgtctctactataaaactgtcttttacttttatcttatcgagaatcatacgctctatctctcttgctctttccgggcagttgcagtgagcgatcgccaacactttattctctgtatttttgccatctgccacaatatgctctgccatcttcgcaatcgctttcttaactcctctcgcctgaccaagctgacaaatcgttccctccggagttgaccccatcaccggtttgatattaagagcgcttgccatcaacgacttaattcctgtaagccttccgttcttccgaagtgtatccagattttcaagaacaaaatatgtgtgctgttcttcgatatatgcttccacatgctctatcacttcttcaaaagaataccctttttcttcacactcttgtattttcaatgcgatcaaactttcacctaccgatgccgaacgcgaattaaatacatagatttgtttatccccgtcttcgttttcttccttccacagctcttttccaagctgagcgctattatacgatccgcttaattccgctgacaaggtcaccacataaaccctcttctccgctccgccgtaaagttccatatatgcatccggcgaaggacaggaagacttcggacattccggactcaccgctactcttttcagaaaatcttttcggtcaaaactttcatcatccaagatcgtatctccgtcaacgagcatactcaaaaccgccgtatggtaaatcccgctctccttcatcttatatgtcaattctccgcaactatccaaaacaattttataatccataacacttcctcctgaaacgcaaaatatattttacgcttctattgtatgtagtttttaataccacatataaatatatcacacatctcataagaaaggaagctttttctattctaatcttattttccgtgaaattccaagcgcaattcccatttccgccatcaaaaatacgattgcagttccgccgtaactgataaaaggcaacgtaatacccgttgtcggaagaagtcccgtcacgacagcaatgttcaaaataacctgtaatgcgatatgcgcaaatatcccagtcgcgatcagcgaaccgaaaagatcgggcgcatttttcgcaataaagatcagtctgtataacaacaatacaaacaggaccaaaataacaaccgcgccaaatacgccaagctcctcacaaataacgacaaggatcatgtcattttgcgcttcgggaatcacgcccaatttctgtgtactgtttcccagtccttttccgaacagtcctccgcttccgatcgcataaagtccctgcatgacctgaaaacttcccgtatcggccgtagcttccgggttcagccacgagatcactcgctggagacggaaattatcactgttcgccacagttaccgaaagaattgcgatcccgactgccgctaccgcaatcccgatcccgattattacaagaaacggcttcgtcttcggatggcttacaaaaatcaaaatacatgtaatccccgccacgatgatcgccgtactcaggttatctgtcaaaaacaaaacgcctgccgatgccactgcgccaaatgcaagtatctgtgcaattcctttcggcgaatatgcccttttcccaagacggcataactcataagatataaatagaatcactgctatttttgtaatctcggcaggctgcagcgaaaggttgccgggaagtccgatccaacgtctcgcgccattgacagtcacgccaagcggagtctgtacaagcgccatcaaaaacatcgaaattacatagatttcaaatgcaaacgctccatacagatgataatctaactttgacacaagatacatgccgataaatccgcccacaccgatcaacgcctgttttgaaaaatagtacatgtcatttccgaaatcagcctgcgcttcatagaaactgacactataaagcataacaagaccaaaacacatcagaaaaataatcacaaaaagaaggtcatagtcaaaatattgttcttttcccgctgcacttctttgtcttgcgatcagcgccgataaactatttctgttttcataacgagttctgcctgacgtacgttcctttttccctttgcgggaattcacacgtccagaaaccggacgctccgtccgtatcacttcacgcctacggtcaatcgttctgcggtatccctcatacccgcttctgatattcatcggacgcatcggcgccgtatcgtacacatcttctctgacgggacgcatcggcatcgtatctccgaggtttcttttcttttgcttctttacatttttcctgccctgttcgcgtctcttgatcggacgcacagtcctgcttctcatatcatcacacccatcatcaatcttatttacctgctgtcatggaaggatgcaccggtttcccatgttcaaaaaagcggtcataccatacaaggaaaatatataccgtccagattttgcggctgtcatctgttttttcattcgtattctttccgtctctgtgatcttccagcatcttcataagcagatcggtattaaagaattttttcgccatagaagatgcaaacatcgctctcacacgattataatatttttcctctttcagccaaacccgaatcgggatcggaaaaccaagtttctttttctctgccgtcttgtttctgatactgcgttccgccgctgcccggagagcaactttcgtgcgcggtgcctgcactttatattgaagaggaaggctttccgcaagttccagaacattccggtcaagaaacggcactctgacttccaaagaattcgccatgcccatcttatcccctttcataaggatatcgtgaacaagccaaagatgcaagtccacatactgcatttttgtcaccgcatccttatctttcacccggttatacaaaggttttgtcacatcctgaattcccggtctgcatccctttttcaaaattttagcagcctcacgctctgtaaatatattcgtagcattggcaaaataccgttcttccagcgtctttccatgacgcataagaaatccacggcctttcatccccctcggcagacagtattctgcaaattttcccataaagcgccggatcggcatcggaattttattaaaagcagtatgttcaagaggttcacagtaaatattatatcctccgaacaattcatccgatccttcacccgaaagcacaacttttactttctttgccgcttctttactcaaaaaatacagtgcaaccgccgcaggatccgccacaggctcatccatataatattgaatatccgaaagactgtcccagtattcatccggcgtgatcaccttcgcatcattcttcatatgaatactttcggcaaaatcttttgcatcctgaatctcactgtattctccctcgtcaaatccgactgtaaacgtatgatcgacttgtcccagataagtcaggtaactggaatccactccgcttgataaataagacgcaacctccacatcgctaatcttatgcttctctaccgactccttcatgactttttccacttcagccgcagcttcatcgaatgttttttcatattttcctgtaaaattcggttcaaaataccgcgatatttccattttcccatcttcataaataaagtaatgaccgggctgaagacaaaatactcctttgaaaaaggtttcgttagtcggtacgaactgaaaggaaagataatttcccaaagcatcttcattaaaaatcttatcaaatttcggatgttccataaatgctttgatctcagacgcaaacaaaaaggtctgattcatctgcgcatagtaaaaaggcttgattccaaaaatatcccttgcaccgaaaagtctttttttctttgtatcccaaatcacaaacgcgtacattccccggagacgatcgacaagtttctctccccactgctcatatccgtgtatcagagtttccgaatctgtattagagacaaatacatgtccagcctcgatcaattcttttcgcagttcctgatagttatagatttccccattgaaaacaagcaccatgcttttatcttcattataaaggggctgatctccgactgaagacaggtcgataatgctcaaacgccgaaatccaagagccgcatcctcatcaacatatttccctgcactgtccggtcctctgtgtatgattgtatccatcatatttacaagaacagtttcccgatcttctactttaccgacaaaacctgcaaaaccacacatttttcttcttcctttccataatatccgaaataatagataaggaatcagtttccggtaagccatttacctgatctgatccctcattgatctctcgtatatgatatcttcttcaaaacaaaaatatacttctgcaatcaccggaagtgccaaaaagcacgctccgaaatcgcaagcgtccgccaaaatctcgggcaagcccgaacttcggctcgccgccgcaatagatcagtcggggtgacaggattcgaacctgcgacctcacggcccccagccgtgcgctctaaccaaactgagccacaccccgatgacttacctattatatataatttaatggcagttgtaaaggatttttccatatatcattcgcaaaaacgtaagtcgttcatattataataatgaatttacaacaaaaggagataccgccaatggcaacttgtcaaacaaataatcagatgcgttatatgcgccgtacaatgcccgacacctcctgcccgtgtcacgaaacagttcctatgaacggatgtccgaatacccgggactttttccctgcaaatatgccgattgcaatggcatatgttccatggcaaaaatggcagaacatttatgaaccgtgccgcgctcttaaaaacggaacgatctttgaggaattaaataaaccattctcagggaaaggagcctgctgccgatgaaaaactatccttattctaactcaaactgttctgtcacaaataataatactcaagactgttctttaaataacgcttcaatgaaaaatatgcatcgttctatgaaccgaaaccagcttatggagcatatcaaccaggttagttttgctgttgacgaagtaaaactttatctcgatacgcatccttgcgacagcgaagcgcttgcgtattttcatgaaatgagcgcccaccgcaacgacgctttaaaacaatatgcttctgcctacggaccactgactgtcgacacagccgattattcctgtgccgaacgatggaactggatcaatgaaccgtggccatggcaggaaggaggatgctgatttatgtggaattatgaaaaacgtcttcaatatccggtaaaaatcacacaaaccaatcctaaaattgcaaagatcatcatcagtcaattcggaggtcccgacggagaactggccgcatctatgcgctatctctctcaaagatatactatgccgtataaggaagtaacaggaacgctaaccgatataggaacagaagaactcgctcacatggaaatggtatgcgccatcgtttatcagctcaccaaggacctttctccggaggaaatcgaacgctccggatttgctccttattatgtagatcacacacttgctctctggccacaggcagcaagcggcgccccatggacagcaacttatttccaatcaaaaggagatcccatcaccgatcttcatgaagatcttgcggcagagcagaaagcgcgtacaacgtacgataatattcttcgtctcgtaaaagatcctgaagtatgcgatccgatccgtttcttaagacaacgtgaaatcgtccactaccaacgtttcggtgaaagtttacgcattgtacaggaaaaactcgacagcaaaaacttctatgctgtcaatcccgagtttgataaataatcactgcaacacaaacttcccctcccgtttcagagttttctctctccgggaggggaaataatttttcatttatatattttcagaaaaaggatttctctttcacacttactgcagcgtcacttctatagtctgctctttatactctccgtttgtctgaggaatctggatttttaacgtcacagttgtacctttctcatagtattgcagctgctcctgaagagcctccatgctgtctactgttatgtcatcaatagctgtgataatgcacccttttgtcattcctgctttttctgcaccgccgccttttgcaatttctgttacatatactcctgccggcatctcaatctgctgtgaaaaggcatccgaaacactgattccggttatgccgataaggcctcttttatcttccgcaacttttgtttttgtttctctgttcataaggttttcaatcaaatcaccgacatcactgatcggaattgcatatccgattccttccacactgtcacctacaagttttgaagagttaatgccgatcacttcgccatttacattgacaagagcgcctccgctgtttccttcgttgatcgccgcatccgtctggatcaatttcacaccgctttcctgtgtatctccggtctcttcatttgtcatagaaacagaacggtttaatgcactgataacacctgttgtcacagactgtccgtatccaagtgcatttccgatggcaatcgcaggttcaccgactttcaggctcgtggaatcacccagagtggcaactgagattgcatccagtgtatcatccgaaatattctcaataggcactgcaataactgcaacatcatactgggcatctgtacccttaatgtttgcttctacagttgattcatccgtaaaggcaactgtaagagtatcgcttcccgcaacaacatgattgttcgtcacgatcaataattctgtgtctgtttttccgataataattccggtacctgcgccttttgactgctgttcataagttccgccgaaaaagctgcggacttcttctaccgacatacttgtgatagaaacgatagacggcatcacctgatccacaacttcagatacatcagatgtcactacgctggatgattttgaaagaggagtccctttacttaccttatcagaagatgcggttgtagattttgaagagtcaagcaacccaaacacccggtttccaaccaccgttgttgtaaggaaaatcccgcttgaaacaacaccgaataaaatggcaaaacctacgactgcaaccgtccgcatcaaattcttatgcggctttttttcctttttcaaatgatcgccgcccggctgccactgtggggtatttcccttttgttctccgttttggctgccttcgctctgagaattcattctctgccgatcttcgttatttgaattttcatttggattataataattatattgattgtccataacactacccgctttctttctttttttctatggtcttatcatagcggattaatgtgatgaatttgtgtttattcatttaacaaatattgaattgaaaacacaaaaaagaccggacttagaaaataattgaaaatttcatcttttctatccggtctttcattttataaatctacttataaatctacaaaatcaatatcaaagtcatctttttttgaagatgttctattgctttttcctgctgcctgtttttcctcaggctcatcaaacgcttcatcgtcgtattcattctcataatcgtcatcatatccgacttcaaaatcatcgtcaaacccatattcatccgactcgtcgtccagataaccttcttcctcatagtcatcgtcgtactcgtcgtcatattcatcttcgtactcgtcgtcatattcatcttcatattcatccgaatactcatcatactcttctgactcatccgacccatcatcaaagtcatcatcgtaatcatcttttgcttttccttttttagcggactttgcactcaactttttctcttcttcctcgaatggaatgtcatactcatcatacagatcatccaattcctgatttcgatggacaagttttaccgcaaatacgattgccaaaatcaagagaagcaaaaacaatgctgccgccgctacaagaacaaccattgtattttccgctacaaattcgcccagcttcgcaactatgccgctctcactgtctttcttttccgtctcctctttcggagcctcaaaatactgatatgttccgtcttctgtatcgtactgatagaaagatttttcacctgttcttgtattcaatgcgtaaataacataatatctggaattggacggatcagaccatgccgggaagttttcttcctgaactgtcatgtccacttcctgataactgctcggaagttttgccgacttcggtgcatcaacaacgatcaaagatgttgtatccgatattgcaatttgtgcgaaaggagcaaatgttgcatcctctgtattaaacaggaaaaattttccttttcctgcgtcatccattaaaaatccaagataaactcccgcgtcatttgctacaaattttctctcttctccgttaaatgtcatctttgtctcagaataaccttccggaatatctgttgtcgtaaacgcctctgaaaaatgataatcatttccgtctacagtcacaacaatatctgtactttcacctgccggtgaattaggagccgatgtcggttctacacttgttgttccatcgtctgccgctacaatcgaaattgcggaagatccattgttcaaatttaatgtatctccggaagaaatcgtagctgaactgctgcttacagaaatctgcgtattcgcaaccgtaagagctctgaaaactaccgccgttctcagctctgttccgccgcctgtacctttataagtcagcgtacccgcaccgtctgccgtaaatccatcgccgctgacaaattcaagcgccttcggatcataactcattgtaacatccacacttccgatcgtaccgcctgaactttgaacaacaaaatcaacgctcacattttctccgaccttcgttgacggatcagaaaacatcaatacgccatccgccgcaaataccaccgtactcaacaccggaatcatcaaacataccgcaataataatgcttgcaaatttctttaatactttcatatacttaacctctttctgttttttatcttcccctgttccggttggatattattgaactgtaccttccggaggcgcttcggtctgtccgccgccgctgtctgttccgccatccggcacaaccggaggttctactgttgtaccgcctgtattatccccggtactgccatttcctccgacgctgcctgtttctcccgaatttccggtattaccactgtttccgcccatgcttccgtcatcataatttccaccgttatttccgccttcgtagttaccgctgttatcggtatatccactgtcataataagattcaccactatcatatgacgactccgatcctgttcccgaagacttctttgcacttgcagtatacgaaatattagaaccgaccgtctgcactgtagacgatggaacatatcctgtagtgccaaacaggaattcatgaagctttgttacattcgatacaagatcatccggcacgacaacgcttccgatctctgaaagcatatctgtatacttatcttccgggaatcccatatttcctaccagtttatattcactgtaagctgaagcatatttcaaaatctccggcagcgtaaaacttgttgaaacttgcgggaacactttatcgatgatcttgtttaacgttccgatatccgctcccttcgccttttcaaacattttttctattacaaggcgctgacgctccgtacgggtaaaatctccgcctgccgtagaacgaattctggcataagttgtcgcctgcgttccgtctaatttctgaaggcctgcactttgaagaagatttgccgcctttcccgccgaatttgccgtttcaggaatatattgattaatatacggaagttcttcctccgtaacttcaatctctatgccgcccaacagatctaccgcatctgcgatcgcgccaaaatcaaccgtcacataatcctgaatatcaagatcaagattcatgttcaacatattgatagcaagtacgggacctccgtagctatatgccgcattacacttctgataagttccttctgaaagatcaagcagcgtgtctctgtacactgacaccatcttgatttcctttgtcttattattcaagcttgcaacgataatacaatccgtacgatttccttctcccaagtcaccgtctcttgaatccacgccaaacaacgcgacatttgtgtatccgtctccaagatcgacatttttatttttcttcacttcttcattgataatgatgtcgtccgctttaattgatttcgtatcgatcttactccacttcgcataaacatacattaatccgaatgctaaaagcgctgcgatgaaaactcctacgcagattaatgcgatctgccatggcttcatcttatgaacacgtctctttttgcgcttctttccttttcctgaagcggaaaaatctttccttcgggtaaccggtttctttggcttagttgacgtctctttccccctgtgcattgcctgccttctgcgggatgaattacgcttcaccttgttctttgacatattttctcacctattttagtatatacttaatctacatcataccatgatacaacaaatctctacattattcaatcatttccccctaaaaaagattaaatttcc

SEQ ID NO: 7655 - DNA, 622 bp, Unknown
  gut microbiota DNA sequence
gtctgtatgctatttccatcataaccattctttaccttttctacaggtatggttatgatatataagatgctgtggactggtgtttcctctctaccactttgatggtttcagaaagtgtccagccacagtctctttgcttgattgttaatcagttagataccgcatgacggtttatttagaacgagttcacaactgcgaagagcaactgtggttctaaaacagtgtcaaatatattcaaaggagatttgccatgatttatattggtattgatgttgcaaaagacaaacacgattgttttatcacaaactcagaaggagaagtgctttttaacgcatttactattccaaacaatgcggatggtttccatgacctctttcaaaagatttcttccttaacaaatgatttttctaacgtaaaagtaggactggaagctaccggacactacaattacaatctgttaggttttctcattgataaaggtctccccacctttgtcatcaaccctttgcataccaatctgtttcgtaaaagtcttagccttagacagacaaaaaccgataaagtggatgcccatacgattgctcttatgatgatgtctggagtaaacttacagtcctactca

SEQ ID NO: 7656 - DNA, 1857 bp, Unknown
  gut microbiota DNA sequence
ggagcttcctgtataattcaaatataaggaattccaagaaagaaggttgagaaaaaaatacctcagtgtagaataagattactgactttgcacggttagtaacaatcttattgaacagagaggtatctaaaatgaagtataacacacagaacgcaaaaattaaatctattacggaaaagacattaattgttgggattgatgtgggaagtgaaacgcactttgcaagagcattcgattggcgtaattacgagtattcaaagaaaccgttggaattcagtaatacagaagctggatttatgactttaaaagcatggatggcggattttgcagaaaaatacggtaaaaacgttgtgattccgggaatggaaccaacaggacactattggttcaaccttggagcatacctgcaggacaacggcatgaaaccggttcatgtaaatccacatcatgtaaagaagtcaaaagaactggatgacaataatccaaacaaaaatgaccgtaaggatccaaagacaattgcggcgctggtaaatgaagggagattttcatatccatatataccaactggtatttatgctgagattcggagtctttcaaatctcagattacaaacccaggaagaaattacaaggatcaagaaccgtatcgcaagatggtttagcatctattttccggaaatcaaagacgtttatagaaatccggattctgtgagtggtcttatgatattaaaagaggcacctttgccacaagatatcgtaaaactgggtgtagatggaatcaataagatttggcgggatgctaagttgagagcggctggactgaagagggcaaagaccctggtaacggctgcagagcacagtattggaagccaggaagcacctgatagtgcaagaattgaattgaagaatctactgaacgattatgaaatctacaaaaatagagaggaagacctgatgagcctgacagaggaaaagttgtcagagattcctcatatagataagttgttggaaatcaaaggagttggattgaaaacagtgagtggatttgttgccgaagtaggagacatcacacgttttgataatccaaagcaactgcaaaaactagctggatatgccattgtagagtgtagttcgggaaaacataagggcgagagtcacatcagctacagaggaagaaaacgcctcagatatgtactgtatgaagcagccatatccttgattgcaaggaatgaagaatttaaggaagtacaccggtattatcgaactagaaaagaaaatccgctaaagaagatgcagtcagtcatagcagttgcgtgtaaagtcttaagaatcttttatacgattttgactaaaggtgtgacttatgacggtgcaaagatgatgcaagatatcaagagaccacagatgcttgcagcatagagtgcaggaagtaaccaacccgaaaaggtacaaaagcagaatgtaatggggaacgtccactgaaaagtgctgttacaggaagcaagtcagtaataataggaacaaagaatgagcaggtagttggcaggaatattttccatagggcaagaccctgacaaggagctaagctgacacccggattatggataggcagaacgaaggaagttaggactcacgaagtgatgatcctggtagacacgggaggtgcgttgccatagatggaagggaatacacaaggccatttaaaacgaataaaaaagacgttttatttcgtataccctaaactagctattttcgtaccagatacagagaaatatccatgattcttgttcattcatctgagatagaaactttaaaaaacctttattttaaaggaaaaaagacttgatttattagggag

SEQ ID NO: 7657 - DNA, 10406 bp, Unknown
  gut microbiota DNA sequence
taaaacattatttacagaaaaagtttcacattctcatttccttcaaaaaatccaagtacaactacgataaaaataattgtcaccactaaattaatatccgaattggcaaaataatcattgataaaagatgccattaccgccactacaattaatattatgaaatcaattcgctttcctatccgtctcctcggtttgaaaaagcacaaagcaaacaaatacattactaaaaaatcgattgtactccatacatattccatcatctattctcttccccctttgctcatcagaataaatttttgatatgctttgttgaactcctgcttataagtccttgtaatcggcactttcaatcccgaacgaagggtaactgattcacgctccacttcccttaatttttccaaattaacaagatatgaattatgtactctcacaaacatagatccttttatatcttcttcaatctgactcaaacttccgtaaaactcataatctcttttttctgtatgtacgatgatttttcttctgcggctttcgatgcactcaacctcatcataataaaaaatcatatctttcaatttgtttgtaaagcggatataatttcttttttcccggatgatccgcagagcgcgcataatcacattgtgcgcagtatcagaatcgatcggtttcaccagatactgaaacgcctgcacgtcgaatgctttctgcatcatctcactatgatttgtcataaaaatgatcactgcatttctatcctctgttcggatatgttctgccaattccagtccgctcagcttcttcatctcaacgtcaagaatatacagtgcatatggcatatttcctttctcaagcaattcttcggcagacacgaagcattcacattttcctgccatccctgttatttctaaacacttctctacatttttttcaatcgaattttgtataaattcttcatcttcacatatcgctattctcatttgaccttacgctttcttctcttcctttattattttctttcacgtttttgtctcagacttctgaaatctaagcacaatccctgtcctgaaatacaccacatcaaataagagtctctaatatttccagtgatttaaaatgctttccgacatatatatccgtcatcctgctcatcacatttccaagttctgtcaatactttttctgtcacattaaacgtatataatttctcaatcgtacttgtttctatatattgcatactatacaaagtcgaaggatccagactcatcccgtcccgcacgtctttcatacattcgctgcacacaagtccgcctttcaccgcgctgaacacggcatgtctttctttatttccgcaagtcatacactgaaatacctgcggcgcctgtccgttgatcgtcaacgctttcaattcaaatatgtaacggataagcatgtttggaatatgcggatttgtcagcgcccgaagcgtctgataaagaagttttaacatttcccgctcatcattgaattctttcgtatagtaatctgtaaattccagaaaataaaaaccgtaatatgctccgataatgtcgcctctcagctcggcaaaataattagaaatacttgccgactgtatcgtgtaagacgtcctcccctcatacatcgtaaacgttccgaaagaaaacgggttgagcgcaccgacaagcggactgttcgggcgtcttgccccccgtgcaaacgccgagatctttccctgttcttttgtaagtattacaacacgccggtcatactcgccgaccggcatcgtagagagtactatccctgtcagtataatctgattcacgccgttcctttctgccggagcttccatctgctttccggctgtttttataattcaaataatcatcaatctttcctgatgtcataaataattcccagtattcttctttcatctgttccacctcttcttccgtgatctttaagaatagtttccccgacagaaaagaaggtcatactgtataaaaaataccatttttattatagaaaatttttcgatgcgatcaccgctgcgttgatattactcgtcctctctgtatccgaaatttttcataagataatcgctgtcgcgccagtttttctgtacttttacccacagtttcaaattcactttacatccgagcagtctctcgatctcgtaacgcgcggtacttccaatctttttcagcatacttccctgttttccgataataattcctttgtgggaatctctttcacatatgatcgtcgcgtcgatatgcattactcttcgttctgccttcatccgatcgatcgccaccgctattccgtgaggaatttcttcattcagacagtgaagcgctttttccctgatcagttctgccacgatctgacgctccggctgatctgtgacagtatcttcatcgtaaaactgcggtccgtacggaagatattttaaaatcacttttataagctcatctgtattatctccggatcttgccgatacaggcacgatctctgcaaaatcatattcttttctgtatgcgtcgataaatgtcagtatctcttcttttttcaccatatcgatcttattaataacgagaacaaccggagttttcactttcttaagctgttcgataatatgacggtctcccgccccgataaaagcagacggctcgacaagccaaagcacaacgtcaacttcgttcaaagaacgctctgcaatatttaccatatattctccaagcttattttttgctttgtggatacccggagtatccacaaaaacaatctggccttcctctgtcgttaaaaccgtctggatacgatttctcgtcgtctgcggtttattcgatgtaatcgcgatcttttgtccgatcaaatgattcattaatgttgactttcctacgttcggtcttccgatcaaagttacaaaccctgatttaaaatcttctctcatatcaatatcctttcccgcgcttactctttctcatcctgtctttttattctcactgcaagccttctgcgcttctctttatcttccttattgtttttaatcttatcttcttcgttttccttgtatttcctttatccggtcatccgaccgcttcatcattctctttttcgctgttctgtcatacttcttagcttaatgttctgatctccatgaacatctctttttgttcttcgatcttttcctcgcttccgatcacgcagatttgatctgcgtcaagcaccgcttttaatatttttgcaagcgcgcggatatctttttgatcagccgaaagaatctgctctctttcccggcggatcattccctctgtcacgcggctcatatacaaattcatagaacggcttccttttgcggcaggattcatcgggcggtcgatattactgatcgttccgataataaatttattcatatctctgtcgtctacattaaagttttcaagataatctacaacgccttcgtaaatctccatcgttttctcaagattcggatcgcggtacgagatcagataaccttctccgatccggttaaaattactcatacatccataagctccgcctttcacacggacattctgccacaaataatcgtagcttaaaatcactttcaagatctgaagcgctcctgtatattcttctccgccgtcaatgaaattgccgactcttgcaacgtactgtacttttgaagatgttttaaatccttcgtttctttttttacaatgaatgatgcatctgttttctttcgcttctgtttgtaccacatctgcgtcgtttagctgttttgatacagccgcaaatgcattttccatataggcaagtccttcttttgccgaagtatagctgaccatcatattatctgcgcaaaagatctgttttgaaattgcttttaaccgacagatcaattcttctttatggtcgtcaaagttttcttcgatttcttttactacttcgtaaaattcgattccgtctgtatcgtctttaaattttgcaagaggcgatgtatatgacaacgcacgcaaagcggcagttgtatgtcccgatgacaagaacgacatactaaggcgtgatttgagcatcgcaagaatctcttttaagcgtttctcatcgtcaagcttagaacaagtcagtatttcccgcatcatagagaaaagaacgtccatcttcggatacagtgattttcctttcatttcaaatgtcgctttgaattccttttcctttactttctgcgcatctgcatataattcaagcgacgttccgattccgcctgtatggatattgatctcattaaacaactctccatactcgtaattctctgtatcgataatgccgaggacactttgcaaaatgccgacatacggaagatcttcttccttgaccgcagaaagatcgaacagaagcgttacatacccgattccgtttgtctcaacattatgatagatcgttttcactgagtcgatctccatctctgtattatagacaggcgcgatttccggggaaatatcttctcttctaagcaccggaatcttcgccagatcttccggcgcagattcttcttcctgatacgcttccagatcttttgtatcctgcacaagtttctcaatctcttcttcggacagactttctttatacgcctgcagtttctctgcaagctcccgatccattctcgcagtccttcccttctccggtcggatgattacgatcgccccgtgcggattctccaaaagataatctcggatcaactgctcaaaataacctgtttcgatctgacttttcaaaaactcaaatgtcggaatcgcctccatatggataaacggtttttcttcatcataaagccagctatcgaacaactgaagtccgtacatcaatcctctcggataacttccgaagtccgcctctctgaaacggaactcataataattcagtccagcctgcaatgcttttttatcaattccgccttctgcaatatttcgcagcgtattttcaatcacttccacaaacgcttccttctgctccatatttgcatttttagaaataacagaaaaaatcggctgataaactccattatcatatgatcccataatatcttttccgattcccgcatcaagaagcgcttttttcagcggcgctcccggagcagacaaaagcgcataatctaaaatctgaaatgcaagatagagcttttcatctaaggaagttccgatcactttattataagaaagataagtgttatccgcttcgctttcatcgcttgctatagaatattcctgaacaatctcctgcatttgtgaaaacggcttctgatacttaatctccgaatcaacctcaatctcatcaaaatcagacaaatacttttcatcaagccagttcagtttttcttccatatccatatcgccatacagataaatatagctgtttgacggatgataatatttcctgtggaaatcaagaaactgttcatacgtcagatcagggatcacttccggatcgccgccggattcatttgcatacgatgtatccggaaacagagaattcaaaatcacccggtcaagcaccccttcaggtgaagaaaacgcacctttcatctcattgtatacaactcccgacaacttcaattcctcatccggtgcatccagtttataactccatccttcctgacgaaacgttttatcctgctcgtaaatattcggataaaataccgcgtccatgtagacatgcataagattctgaaagtctttatcattgcagcttgctacaggataaactgtcttgtcaggataagtcatcgcatttaaaaatgtattaagcgatccttttacaagctctacaaaaggatcttttaccggaaactctcttgatccgcacaatacagaatgctccataatatgaggtactcctgtactgtctgacggcggtgtacgaaaaccgatggcaaacactttattttcatcatcattttccataagaagaactcttgctccgctcttcttatgacgcagaagcgttccttttgaactcagatcagataaatctctgctttgtacaatttcataagactttaaatcacatatactcatttttttctctccttcatatctctttttcttttatgcaggcggacatctgtatgagaggagcgcccggttataagtgaaacagtagcgttagccacaataaacaaaacctttgctaaaatgcatttctccatcctctgttataaacatcgcttctgtatccggtgtctgttcgatcagttctaatcctttttctaatcctagcgcaaaacatgccgtacttaatccgtcaccgtccgccgactcttcagataaaacagttacggacacgagtccgttttcatacggatatccggttgccggatctaatatatggtgatacagtttcccgtctttttcaaaatatctttcatatatgcctgaggaaacaacagacgtacctgcaatttctacggctgacactgtttcgctccgatcggcaaacggcttctggattccgattttaaacggcttcccatccggtttttctccgacacataacacatttcctccaagatcgataactgcgcttttcacaccttccgatacaagatattctttcactttatctgcaatatatccttttgcgacagctccaagctcaattcccattccctcttttttaaaacgtagtttatttcctttaagctccacatcttcatagcctacacatgcctgcttttccgcgattgtctctgcatccggcacgatcttttcccctgaagtaaaatcccataaagaagaaacaggttcgatcgtaatatcaaacgctccaccggaaagttcactataatacaaccccttttcgatcaacgccgcgcactcttcggataaaagataatatccgtcttccatcggaagcgttccgtgattcaacgcataaatctcactttcaggaagcgtacggctgaatatcttttcatatttgtcacaaagctttaacgctttatctataatctcttccgcatccttttcttctctatgtattcccttttcatttcttttatctttgtcatccggctttttctctttttcttctaaatcataaattgtaacagtcacaacagtattcaatttaaaatcacttttgctgacgggttcggcagattctttgttcctcacaaaaaatacgattacaaaaaacaatacgcaaataaaaacgactccgaatagaattcctctctttttcttcaattatttatcctcccgcccgtttttattttccatttgttgtttttcctgcttttcctgcagttcttccagttcttccatatcaagctcgatttcaggaagaagctcaaaataaaaatccgtatatttttcacttaaggcggcaatgcatctcgtctgcagcatcttaaacttccttacggaaagctcatccttgttcaatttaatatacgcgctgatccataattttcttcccgttctgacaatgtcataataaatatccacacaattactttcctgtatgatcggttccaccgtctgcttgatctctgatactgtttcctcctcgggagagatcaacaacagatccctgattccggtaaacaccgttttaaccgggatcggaagcatgatcatagacagcacgatcgtgataaacgggtccaaatacggagttaattgacctactcctttaaacggaaggaaaaccggaaggaaaaatacggctgtcattccgagggaaagcatactatccatcttccatccctgcatctctactgtaataagaggggaattcatcgctttgtttttcctcttcagataaaatgtcactattatgccaagaacacaagcaaacagctcaaaccacgctacaactccaaaatcaactgtccgcccgccgtgaaataatatattgatactgttcgtgatcaaaccgactgtaacagtgatcattgttattccttttacaacgataaacacagtctccatctgcatatgcccaaacggatatttctcgttactcggcttatataaaagcggtattaaaaagatagacggaagaagcataacgaattcgattccgtcatatacaccatccagcaaaacagcctgtgaacctgtcactatcgccattacaagctccactacgacaaacatcaagttcgcatacagcgaaacagacattgcctttttctctctttttgaactttttttaccgattctcacaaaatcacctttatctttttctttagtctatatccatactatattacatcatattctctcttctgtatatccgggattttatatttcttagcggaaagcaaaaaagaccatgcagacgcttctccatgatccttttcccaaatcctattcctgatctttttctgaccctgctgccttgtaaaaattgatttactctacaaccactgccgttccgctcactgtcaccatcagcatatttccgtcagccccgagaacttcataatcaacgtcaactcccacaacagcattcgctcctgccgatgccgcccgctgagccatctcgttaagcgcattctgtcttgccgtcacaagttcttcctcgtatccgcctgatcttccgccaaaaaaattcgtgaaagacgccgccagatctctgacaaaatccacacctgagacaacctcgccaaaaacaattcctctgtaatctacaattcttcttccctcaatagaaggtgttgtcgtaataatcatacttttcccctttcttttttgttttttcaattaataagcaaattattacatattttccatatgaaatccatatgaattttttcaacttattaaagcggattttttcattctctatcggctcttctgaattcatgattatatagaaaccgtaagctgttcaacatctgcgccgtttttccattttctatagcagatttctgtacacttcctgtattcttcaaagagattcattgctgtttgttcatccccatatactttccaacatcccgagcacttgctgctagccgccttattttctataaatcctttgacatcttccgccggatatcctaaaaataaaccaatctcatgtggaaattctgaatccttccgcagtttttcaaccaatctgcagacacaacgattttggtttgtgcagtcataccctttatgtgctaaaatcgtctgcactttctcatcaaaaaaatcctgctttaatttttccggacgataaacataaatcaaagctctcctgcctgatatgcgtaccggaagaattcggattcctttttttgacaacttctgattaaaattacttatttctccggacatcttttttttagaatcacatggacacgaaaaaagacttcctgttttaagccccgataaagtgggcgagcaataacttacaagcatttcttctgacatagtctctttgatttctccttaaacattttccaaaaagcaaatcgtttcctcaaaataataatcttcttcgccttttagttagttttaactaactaaactttactctatttatgcaattttgtcaatcataattcttgatttcgattggcagccataatggcttaatttcgatcaccaatgtatctggctaacctgagatttggttcatagctgtcacaataaaacggcatagcaaattgctacaccgttttaatgtgatcatatcagatcttattcttcaccgtcttcctcttttctttttttctttattccaagaagaagcatcaatcccgcagccaatgcagctaaacctgtatatcctgttccattgccaaaatcccctgtttttggtgcattggaaatcggctttttataagaattattaaccacattgttcactactttattttgagaaatttcaggatcttgcttttgatccggtttgaccggcttcggatcaacctgcggaactgagtttggatcttttggatcagtacctttttcttcctcttctatatccgtaaatccatctccgtcatcgtctgtatccgtgatatccggctctccgtctccgtccgtatctctttgaactgtgatcacgaaagtctctctggcagtcgctccatctttctccgcctttactgtcactgtaattgctctgctttcttccgatccgttccatgtcactttcggcgttccctgaatcgttccgttctcaaacatcactccttccggcagaccttccactgttacattcgatccttctgtcacctccggagttaccggcgtgatcgcatttccttctacaacagtctgatcttctatttctcctatagtcggtgcaacaatcggatcaacctgcggaactgagtctggatcttttggatcagtacctttttcttcctcttctatatccgtaaatccatctccatcatcgtctgta

SEQ ID NO: 7658 - DNA, 18355 bp, Unknown
  gut microbiota DNA sequence
tcaataaaaaacacttgattatatgaggaggaattactatggtaagaacggaacttcgggaacatatatttaaaatgctttttcagatcgagtttaatgattctgttgatatgccggagaatttgaactactattttgagacgcttgaagatgcaaaagaaaaagacaaacagtatatacaaaataaatatgaagcgattttatcacacatagaagaaatcgacggacttttaaatgagaacgcgacaggctggaaaacgacaagaatgaacaaagtcgatctgtcaattttacggttggcgctttacgagataaaatgggatgaggacgttccggcaaaagttgcgatcaacgaggctgttgagcttgcgaaacgtttcggaggagataatagctcgtcgtttgtaaatggtgtgcttgctaaatttgcaaaacaggagttataaaatgaacggcatttatacagtgaagcaggttaattcttatataaaaaatatgtttacacaggatttcatgctgaaccgtatctatgtaaagggagaaatttccaactgtaaatatcacccatcaggacatatttatttttctttgaaagatgagtccggcacgattgcctgtgttatgtttgcaggctcaagggcggggctttcttttacattgaaaaacggccagcgggtcatcgcattcggttcagtaagcgtatatgaaagagatggcaaatatcagctttatgcaagagaaatcaagctggacggagcaggagaactctatgaaaagttcgaggcgcttaagcgggaactttgtgaaatggggatgttttcagacgaatataagcagcgaattcctgcctatgtaaaaacagttgggattgtgacggcgcaaaacggagcggcggtaagagatataatcaatgttgcaaaacgtagaaatccatatgttcagctcattctttatccggcccttgttcagggtgaaggagcggtgaagagcattataagaggaatacggatgctagaacaacaaggtgtggatgtcatgatcgttggcagaggcggcggaagtattgaggagttgtgggcgtttaacgaagaagaggttgcacgtgcaatttttgaatgttccgttccggtcatatctgcggtaggtcatgaaacagatgttacaatcgcagattttgttgcggatttacgagctccgactccctcagcagccgccgaattggcagtgtacgagatccgcgaatgtaaaaaaacgatgtctgcgtatgaagacagaattgttcgggctgccttgtcacagatcggtcttttcaggacgaaagcggagcgtttctcaatgaggctgaaactgcttcatccacggcacaaattatatgagcacaggcaatttacggcagagatggaaaacaggattcgcgatattatggaacgaagactgacgcaggaaaaacatcgtctggccttgaatgccgaacgaatgaaaagagtgtctcctcttttaaaactgagcagcggatactcgtatataagatccgaagaaggaaaaaatatacgatcgacagctcaggtgaaacggggagaaaaattggaaatctttgtaagcgacggaaagatcgaagcggaggttcataatacggaaacaatgattcacggataaaaacggatcggcggaggttaaagtgtcagagaaaaagaaagaaaatcttgaggagatgttcaaagatttggaagaactgatcggaaagatggaaaatgaagaaatcacgttagaacaaacatttgatctatataataacggaatggaacttcttaaaaaatgtaacttatccatagacgaggtagaaaaaaaggttctcgttcttgatgaaaatggagagacagatgaattttaaagaagactgtagaaaacgaacagaaaaaatagaagagattttacgaaaatacctgcctgatcagacaggacatcagcagatcatagaagaagcgatggaatatagtctgatggcaggtggaaaacgccttcgtccgatgctcatgaaagagacgtttgacttgtttggcggaaaaggcggggtcatcgagccgtttatggccgctatcgagatgatccatacatattctcttgttcatgatgaccttccggccatggataatgatgattatcgaagaggacggaagacgactcatgtcgtatacggagaagatatgggaattttgacaggggacgcacttttgaattacgcatttgagactgcatgcagcgcctttgaaacagatcctcaaaacagcatcctgatcggaagagctctgaaaattcttgcaggcaaagccggaatttacggaatgatcggaggtcaggtggtcgatgtaagatctgcaggatgcaaaatatcaggagaacttcttgcgtttatttatagattgaaaacaggagcgcttattgaggcgtctgtaatgatcggagctgttcttgcaggggtaaaagaagaggaaatcggaaaaatggaagaaatcgccgggaaaataggactggcattccaaatacaagacgatattcttgatgtgacgagtacgacagaaatactcggaaagccggtgcacagcgatgaaaaaaacgaaaaaacgacttacgttacttggaaggggcttgaaaaggcaaaagaagaggctgctcgtctgacggaagaggcggtagaagaacttcgttctatcggaaaagagtgcggatttatggaggaactgctccgaagacttgtatacagagaaaaatagaactaggaggatcaatcatgataattgaaatgatccagaaagagaacgatataaaaaaacttgatcatacacagctaaaagaacttgcagaagagatccggggatttcttcttgataagatcagttgtacaggaggacatctggcttcaaatctgggtgttgtagaattgacgatggcgcttcatcttacactggattttccgcaggataaattgatctgggatgtaggtcatcaatcttatacgcataaacttcttacaggaagaaaagatggttttgacgatctgcgtaaatatggcggcatgagtggatttccgaaacgaaaagaaagtgaatgtgatgcttttgatacagggcatagttctacatctatttcggcaggtctggggtatgttgcggcaagagaactgaaaggggaaaaatacaatgtcgtttcagtgatcggagacggagcaatgaccgggggaatggcatttgaggcattgaataatgcttcccgtttgaaaagtaattttattatcgtgctgaatgataataatatgtcaatttctgaaaatgtcggcggagtatcgaaatatttgggatgcctgcggacagcacaggcgtatactgatctgaaaaagggtgttgaagatactttaaaaaaaataccggggacaggcgatcggatcgtcagcaggctgaaaaagacaaaaagtgggattaaacagttatttgttccgggaatgttttttgaagatatggatattacatatttaggacctgtggacggacatgatgttaaagagatggtgcgtgtgttcaatgaggcaaaaagggtggatcatgccgttttagtacatgtacttacgaaaaaaggaaaagggtatcttccggcagaggaaaatccggcaaaatttcatgggacaggtccgttccatcttgagaccggagatgcgaaagaatcaaaaggggcggatacttatacggaagtattttctaaagtgctgcttgatattgcaaaaaaagacgagcgtatcgttgcgattacggctgcgatggcggacggaacaggtcttactccgtttgcaaagcatttcccaaatcgtttttttgatgtggggatcgcggaagaacatgcgatgacatttgcggcaggtcttgcggcggggggaatgaaaccgatatttgcagtatattcttcgtttttgcaaagagcgtatgaccagacgcttcatgatgtctgtctgcaaaatcttccggttgtgatcgcggtagacagggcgggacttgtcggaagtgacggtgaaacacatcagggggtgtttgatttgtcatttttatcaatgatcccgaatatgacgatcatttctccgaaaaacagatgggaaatggcagatatgatacggtttgcggcagattttccatatccgatcgcagtgcggtatccaagaggcgaggcatatgaaggaatgaaacaattccgcagtccgatctgttacgggaaaagtgaactgctgtatgaagaagaaaagattgtgatcatatttgtaggtcatatggcagaacttgcagatcaggtgagaaaaggcctgaaagaaaaaggatattgctgttctcttgtaaatgcaaggtttgtaaaacctcttgatacagaattgctggaaagattagcggagaatcacgatctgtatgtaacgattgaagaaaacatgctgacaggcggattcggggaacaggttcttgattatatttcaggagcaggtattaatgtacgcgtgaaaaatttcgggatagccgatgactatgtagaacatggaaatgtagatctgctccgcagggaagtaggtcttgataaagatacgatcgtaaagcagataattgatgaatatgtgtaactgaaaggaaaaaaatatgaaagaacgcttggatgtattacttgtaaaaagaaatctggcggagtcaagggaaaaggcaaaagcgatcattatgtccggaaatgtttttgtggagggacaaagagaagataaagcgggaagcacgttcccggaagaagtcagtatcgaagttcgggggcatacacttccgtatgtaagcagaggcggcttgaaattagaaaaagcgatcgcaaattttgatgtcagcgtaaaagataaagtctgtacggatgtcggttcttcaacgggcggttttacagattgcatgcttcaaaacggtgcaaaaaaggtgtttgcgatcgatgtgggacgaggacagcttgattggaaactgagaaacgacccgagagttatctgcatggaaaagacgaatattcgatatgtgacacctgaagatttgggagaagaaattgatttttcttctattgatgtctcatttatttcgcttacgaaagtattggagccgattcgtaattatttggcaaaagacggtgagatcgtagctcttattaaaccgcagtttgaggcaggacgggaaaaagtaggaaaaaaaggtgtcgtaagagaaaagagcacacaccgggaagtgattcagaaaattatggattatgctatgtcgatcggtttcgatctgtgtgctcttgatttttctccgatcaaaggaccggaaggaaatatagagtatttgattcatttaaaaaagagtgaaaatgaggccggtgaaaatctcggcggacttgatcctgttattgtttcagacagagcatttgagacgctggcaaagcagcacgcttaagtaatgtatgcgatgcagtattttgtaaaaacaagaggactaaaatggattgcttttatattattacaaataaattaaaagataaagattatgcgatcacgagtcagattgaacaatatattcaatcttccggtaaaaaatgttttttgtcggaaaaagacagtgagggccatattattccgggaactgttcctaaggaagcagaatgcggattggtactaggtggtgacggaactttaatccgtgcggtcagagatcttggagagcgaagccttccgctgcttgggatcaatcttggaacgctcggatatcttacagatgtggatctggaagattttgaaagtgcattggatcatttgttttcagagactccggttattgaagaacggatgatgctggaaggaagctttcgtaattctcggaaagatatggcgatgaacgatattgtcattgcaagagaaggaaaggttcgtatcgtaagttttcatatttatgtcaacggggcgcttctgaatacttatcacgcagatggagtgatcatatcgactccaaccggaagtacaggttataatctgtcggcgggaggcccgatcgttgaaccgacagcacagatgatcgtgatcactccgatttgttcacacgcgcttaatacaagcagtattgttctgtcagccgatgatttgattgaggtagaagtgtgcgaaggacgttatggaaggcaggaacaggtttctctttgctttgacggtgcagaacagacaactcttgtcacgggagaaagagtttgtattaagcggtcgtctcatacggcaaaactgatcaaattaagcaaagaaagctttatgaaaacaatgcgtaaaaaaatgaaaggaaattgaacatatgaaagtcagccgtcatgcaaaaattattgaacttatcagtcagtatgatattgaaacacaggaagaactggcagaatatctgaataatgcggggtttaaagtgacgcaggctactgtgtcgagagatatacgtgatctgaagttgtcaaaagtatctacaggaagcggacatcagaaatatattcttcacaggatcgaagaacccggaatgagtgaaaaatatatacgtgtcttaaaagatgggtatgtggcgatggatatggcgcagaatattctagtgatcaagactgtttccggtatggcaatggctgtggctgccgctgtagacgcaatgaaatggcatgaggtcgtaggctgtattgcaggagacgatacgatcatgtgtgcaatcagaactgtagaagatacagcggccgtaatggataagataagaaagatcgtttcaagagaagtataggtgaatggtatgctacaaaatctacatgtgaaaaatattgctttgatcgatgagacagaagtagatttcggacaaggattgaatatattgacaggagaaaccggggcgggaaagtctatcttgctcggctctgtcggactggctcttggaggaaagtatagttctgatcttttgagaaacggggcggaaaatggtctggtagagctgactttttcggttgacgacggacagatcatacaaaaactggaagagatggatattattccggatgacggtatggttactttaacaagaaagtttacaggaagcagaagcataagccgcattaatggagagacagtgaatacaggaaagttgaaagaagcggcagagcttttgattgacattcatggtcagcatgataataaaaccttacttcaaaggaagaatcatttggtgcttctggatctttttgggagaaaagagattgctccgatcaaatcagaaatgtcaaaatgttataaagaatatcgggcgatctgtaaaaaggcggaagaaacttctttaaatgatgaagaaaggcgaagagaactttctctttatgaatttgaagtacacgagatcgaagaggctgctcttcgggaaaatgaggatgaagaattagaggaaacataccgaaggatgacggagagcagaaaaatcacggatgcagttgcgcagacttatcgctatacatgcgaggacagttcggcaaatgcaggtgattgtcttactcgggcgatacgtgcgtttcgggaggcggcggaatttgatgaagagggagaccgtctgtgcgctctgcttatggatgtggacagccttctgaatgattttaacagagaactgtccgaatatgcctcaaaatttgaattttcagaagaagagttcaaagagacagaggaacggttgaatctgatcaatcatttaaaagcaaaatatggaagttctgtaagtgatgtccttgcatattgcgaatcaaaacgccatagaatagaacagcttaatgattatgatgcatatataaaacaaattgaagaagagaaagaaaaagcgttaaaaaaagtagaacgtgtaacgaaaaaacttcatgatgtaagaaatcgatataaaacagtttttgctgacgaaatctgtattcatctgaaggaattaaattttctcgatacaaggtttgagatacatttaaaagatgcaggacagtttagcgcgaacggaaaagacgaagcggaattttatcttgcgcttaatcccggcgagcctgtaaagccgcttgagaatattgcatcaggcggagaactttcccgtattatgcttgcgataaaaacggttctggcagatgcggaagatacgccgactttgatttttgacgagattgatgccggaatatcgggagttacggcagcaaaagtcggagaaaaactaaagctgataggtaaaagcaggcaggtgatttgcattactcatctttcacagatagcagcagtggcagacagtcattttctgattgaaaaatctgcggaaaacgaaagcgtaaaaacaaggattcgtctattgaacgaagaagattcggtaaaagaactggcgcgtattctgggtggagataagattacatccagtattatggaaagtgcccgtgaaatgaaagaaatggcaaagagtgaaatataatactagtgtggaaaaagaagaaaccacatatactagaaacggatacagagaagtatccgtttctttttatataggaaagaaggagcggatgcggataaaaaattatcgagatatcagagaaagggtgtggatatgttgaaaaaacaaaagtatgtgaccgctgtattctgtctattcctctccttcttctttgcggctatgggtattttgcagtatcaaatgattcgtggaaagaaaccggtttcgacagatgcgggaatagaagcgatgaataatgatacggtgcttgtcggaggaatgccgattggtatttatatggaaacggacggagtgatggttcttaatacagagcagattgccggagcggatggaaaggagcatgaaccagcaaaaggaattgttaaagcaggcgattatattatggcagtagatcattgtgaaattacgggaaaaaaagagcttttggaggctgtcggaaatctaaccggaacgttcgtggtgttgacggtcagacgaaatggggagacgatagatttgaaaataaagccggttgaatatgaaacgggagaatatcggcttggtatatgggttcgcgataatgtacaaggcttgggaacagttacttttttaacggatcaaagtcggtttggcgcgcttgggcatgggattcatgacgtggatacaagtgttcttatgtcgattgcggaaggaaatgtataccgcacgagtatcagagatatcacaaaaggacagagcggatctccgggaagtatggagggtatgatcatttataacaattataatattctcggtacaatcgataaaaatacagaggctgggatttatgggaaaatcgacaaaattgatgaacttttcacagaacagacggcaatcaggactgcaaaaaaagaagaaattataacaggacctgctacaatccgatgttttgtagataatgaagttagagaatttgatattgaagtgactcaagtcgacatgatgtctcaggagatcaataaaggacttgtgattaaggtgacggacgaagaacttcttgaaaaaacaggagggattattcaggggatgagcggaagtccgatcatacaaaacgggaaattgatcggagcagtaacccacgttttcgtacaagactcgacaaaaggttacggaatattcatagaaaatatgttaaaacaggtgaatttaccggaaatgtgtggataaatgtcgaattgttactacaagattcgcttgattatgcaaaatggcatagatataataagcgagtggcgttttaaagggatggtctcaaaactaaaggagagacgagaatggagcatttgagtgtggcgatcgctgacgacaaccagagaattctagatatgcttgacgacatcatacaaacggacaaggaactggatctcgtcggaaaagcgaaaaatggagaagagatgtgtcagatcataaaggacagacagccggatgttgtcctgcttgatctgatcatgccgaaaatggatggattgacagtaatggagcaagtaaacaagcaggagtttgtcgacaaaagaccgtattttatagtgcttactgctgtcggacaggaaaaaattacagaagatgcatttaataaaggtgcaaattactatattatgaaaccgtttaatcatacgattttattggatcggatcaaatcgatccgaaaaaagccggcggtttttgaaaagaaaaatgaagagagtatacaggaagtttcatcaagacgggaaaatctggaaagcagagtgacgaatatgcttcatgagattggaataccggcgcatatcaaagggtatcattatctgcgggatgcgatcatgatggcagtaaacgacatggatgtgctgaatgcaattacaaaaatattgtatcctacagttgcaaaaaaataccggacaacgtcaagccgcgtcgaacgggcaattcgacatgcgatcgaggtggcatggagccgcggaaaattggatacgcttgatgagctttttggatatactgtgagtacaggaaaggggaaaccgaccaattcagagtttattgcgctgattgccgatacaattcagcttgaatacaggcataaaaactaggaaagtccttttcattgcgcagagaatagggtataataacaattaacagaattctttccgggaatttatgtgaagaatgggaggatcaggatatgaaaaatattttgtttgctgcatcggagtgtgtaccgtttatcaaaaccggaggtctggcagatgttgtcggttcgcttccgaaagatttcgacaaagaaaaatatgatgttcgtgttgttattccgaattacatgtgcatgaaacaggagtggaaagagaagttagagtatgttgcccatttttatatggacattgcaggtcaggacaggtatgtcggagtactgaagattgaattgaacggtattattttctattttatcgataatgaatattatttcagtggatttgctccgtatgatggggatccgaagtggaatatagaaaagtttgccttcttttcaaaagcagtgctgagcatacttccggtgatcggatttcgtccggaactgattcattgtcatgactggcagacgggactgataccggtttatcttgataatttcagatatctgggagaatactatcgcggaattaaaactgtgatgacaatccacaatctgaaattccagggggtatgggatacgaaatctgttcgcgaaattaccggacttccggaatactatttcgttccggataagatggaggcatataaagatgcaaacttgcttaaaggcggtatcgtatatgccgataaagtgacaacggtaagtaacagttatgcagaagagatcaaaacaccgttttacggtgaaggtcttgacggattaatgtcggcaagggcaaatgatctttgcggtattgtcaacggcttggattatacagactgggatccggcttcagatcctagaattgcaaaaaccttttcggttgaagatttcaggaagaataaagttcttaataagaaagcgctgcaggaagaactcggtttagagaaagatacaaaaacgatgatgatcggaatgatctcacggcttacagatcaaaaaggatttgatcttgtcgattacgttatggatgaactttgtcaggatgcggttcagatcgttgtgcttggaacaggtgatgtgaaatatgagaatatgttccgtcattttgcatggaagtactccggaaaagtatccgcaaacatcttttattcggatgaactttcacataagatttatgcttcctgcgatgcatttcttatgccatcactgtttgaaccgtgcggattaagtcagctgatgagcctgcgttatggaacgattccgattgtgcgtgagacaggcggacttagagatacggttgaagcgtataatgaatttgacaagacaggaacaggatttagctttactaattataatgcacatgagatgcttaatacagttcgttatgcggaaagaatttattatgacagaaaacgtgactggaataagatcgtagaacgtgcgatgagcaaagatttttcatggaagaattctgccggacaatatcaggaattatacaagagcttgatcggggaataagacatagtaagaggtacatataaaaacacaagacggacattcgtttcgtcttgtgtttttttgcagcagcgccgaacagggggttaaatttatctaagttcttgccactcgtttgcaaatccaaaatgtgcttttggtattttcggtcgtttgaagaaacaatacttgacagaaaaagcgttttagaggataattttacctaaaaaatgtcgaaggaaatggatttctaatacttagccgtacgacagagaaaaacagtcaggagagtaaagatgaaaattatagacagattaaaagaagacaaaatacatatttcatttgaagtgtttccgccgaagaccgatgcgggatttgaaaaagtgatcgcggcaactgatgctatggcgaagttaaatccggcgtttatcagcgtgacatatggtgcgggcggcggtacgagtaagaatacggcaaagatcgcatctcatataaaggatgatctcggagtggttagtcttgcacacttgacatgtgcttcttcaacgatagaggaagtaagagatgtgattgaaaatctgaaagaaaacgggattgaaaacattcttgcgcttcggggagatatcccggaaggcatgccgttcccgaacggaaatcgttttagatatgcatatgagttgatagaggagattcgtaagcatggcgatttttgtatcggagctgcatgttatccggaaggtcatgtagaaaacgaacataaggcagaagatatcaggtatttaaaacaaaaagtagatagcggcgttgattttcttacgacacagatgttttttgataacgatatccattataattttttatacaggatcagggaagcagggatcaatgttccggtactcccgggaattatgccgatgacgagtgagaaacagatgaaaagaagtcaggaattgtcagggacagtgtttccgagaagatttttagctctccttgatcggttcggcagctcggcggcggcgatggaacaggcgggaatcgcatatgcgaccgatcagatcattgatcttctttctaacggtgtgaacaatattcatatttatacaatgaataaaccgcatgttgcagctgcaattatgaacaatttgtcggagattataaaggcgtaggtgatagaatggaaaaatgttttcaggaagctgtccgctatttggggtatgggaaaaatccggtagatgaggcaacaagccgtcttgttgaaaaaggttttttggagctggaaaaagtatcggcgcttcgctcggtgtttcgtatttttgaaatgaatcggatagatgaagaaaaagttgcgatcggaacattacagattagcagcaaaagccttgcaagaaacttaaatcactgtgaaaaggctgttttgttcggtgcgacattagggacaggagtggatcgtctgatagcaagaacatctctgacagatatggcaaacgctgttgtgcttcaggcatgtgcagcggcaatgctggaagaattttgtgatgagaaacaatttgaaatcggcgaggaacttgaaaaggaaggtctttatctgcgcccgaggttcagtccgggatacggcgattttgatatcggttttcagaaatcatttatgcagatgctggattgtgcaaaggcaatcggacttacgatgacggaaagttttatgatgacaccgacgaaatctgttaccgcagtgatcggggcaagtcgaataaaagagagatgcccgattgcaggctgcgaagtctgcgataagaaagagtgtatttacagacgctgacagttagatgtatgagacaaatatgtagagaaggaaaacgacgaaaaaaaggagaaagagatgatcagacaacgacttggaaaagacctcctcttttttgatgggggaatgggaactctgcttcaggaaaaagggctcgcgccgggagaattaccggagacgtggaatctgacacattcggaagaaatatacaagatacacaggcaatatatagaagccggaagcgatatcattttgacgaatacatttggtgcaaatgcgctgaagtttcatgatgattcctgctctttagaagagattataaaggcggcggtcagccatgtgaaaaaagcagagcgggaggcgctcttacaaacaggagacgagcgtaaaatctatacggctcttgatgtcggacctacggggaaattgctgaaacctatgggagatctggaatttgagacggcatatgaagcttttaaggaagtagtgatcttaggagagcaggcgggagcagatttaatccatatagagacaatgagcgatacatacgaattaaaagcagctgttttagcggcgaaagaaaacacgtctcttccggtatttgctaccgtaatatttgacgagaggaaaaaacttttgacaggagcggatgtttcatctgttgttgcgcttttagaaggtttaggcgtcgatgctctcgggataaactgcgcaatgggaccaaaagagatgcttccggtgttggaagaactgatcaaatattcgtctgttccgattattgtaaagccaaatgcaggacttccgaaacagagagacgggaaaacatattatgatgtgacagaagatgaatttgcggcatatatggagcaaatcgtccggatgggggcatgtgtgatcggaggctgctgtggaacgacgccggaacatatccgtgccatgcgtaaaagatgtgaaaacgcagaacttgttccggtgacagaaaaagagtttacggttgtttcctcttacgggcaaagcgttattttgggtgagggttcaaaaattatcggagagcggataaatcccaccggtaaaaaacggtttaaacaagcgctgaaagaacacgatcttgactatattttaagagaagggattacacagcaggatcagggagctcacattcttgatgtgaatgtcggactgccggatattgacgagccggcgcttatggaagaggtagttcaggaactgcaaagcgtcgttaatattccgctgcagatagatacggttgatgaaaaagcgatggaaaaagcgcttcgtatttacaacggaaaggcaatggttaattccgtaagcggaaagaaagagtcaatggaaaaagtgtttcctcttgtaaaaaaatacggcggagttgttatcggtctgactttggatgaagacggaattccggcggatgcggacggccgtgtgaggattgcggaaaaaatcataaaaacagctgaaaaattcgggattaaaaagaaagatatcgtaatcgacgcactcgcaatgacgatcagttctgagccggaaggagcaaaagtgacattggagacgcttcgcagacttcgagatgagatcggagtcaatacagttctcggagtttctaatatatcctttggacttccatgccgcccgatcgtaaacgcagccttttatacaatggcaatgctaaacggtctgagtgccggaattataaatccatcatcggaagacatgatgaaatcgtggtatgcataccatgctcttatgaatctggataataattgtgaacaatatattcaaaaatatgccaattcggtagtgagcacaaatataatgaaaacatctgaactttccgaaacgaaattaaagggggaaaatgacagaagcagaaaaagcagctcaaaaatgacgcttcaagaggcaatcgaaaaagggctgcgggatgacgcggggaaaattacaacagatatgattgcgacagaagctccgctcgatattatcaacgaagaattgattcctgcattaaatcatgtcggcgacggctttgaaaaaggaactgtttttctgcctcagcttctgatgagtgcggaagctgcaaaatccgcattttctgttctgaaggaaaagatggaaaaaagcggtgagatcagagaaaaaaagggacgagtcattttggcgaccgtgaaaggagatattcatgatatcggaaaaaatatcgtgaaagtgcttttagaaaattacagttttgatgtgatcgatcttggaaaagacgtatcgcctgaaaaaattgtagaaacggcatgtgaaaagcaagttccgcttgtcggattaagcgctcttatgacaacaacggtagtcagtatggaagagacgataaagatgcttcgggaaaagaaaccggactgtaaagtgatggtcgggggagctgtgctcaaccaagagtatgcagatatgatcggtgcggatttttatgggaaagatgcgatgcagtccgtacattacgccgaaaagatttttaaagatgcgctgcaaaaaagtgccgataaaaaagaataaatacttgtcagagaaagaatattcggttgttgacaatgattttgtaaacagatatatttaaagaaataggaacagatgtgctcgtcgtttcaatttagtatatcaggaggtaagtgcagatgatgagaggattacatactccggtacgggcaatccggagaagagtgtttaaggaagtggcgcagcttggatttaaggcagatgaggatacgcttcttgcggatatggaagccattccgtatgcgatcgtaaatgaagattcagagaaatacagagaaagcgtttaccgcgcacgggcgatcgtaagggaacggctgcgtttggcgatgggactttccctgcgtccggaaaataagccggttcatttaactgcgggcgtggaagcaagcaatatctctgaaaaatattatgagcctccgctgatgcaggttattccgtccgcatgtgaaagctgcgaagagaataaatacgaggtaagcaatatctgtaaaggctgtcttgcgcacccgtgtcaggaagtctgtccgaaagacgctatttccatggtgaacgggcggtcgtatatcgatcaggaaaaatgtatcaaatgcggaaaatgcaaatcagtctgtccgtacgatgcgatcgcgaaaaaggagcgtccatgtcagaaagcctgcggtgtgaatgcgattaaatccgacaaaatgggaagagcatatattgataatgaaaaatgtgtttcatgcggtatgtgtatggtaagttgtccgtttggcgcgatttcggataagtctcagatattccagcttgcacgggcgttatcagaaggtgaaaatgtaattgcggagatcgctccggcatttgtaggacagttcggtgataatattacaccgagaaatattaaagccgctcttcgtgaactcggattttcggaagtgtatgaagttgcgcttggagcagacatcggcgcgattgcagaggcgcatcactatgtggataaagttgtgacgggtgaactgccgtttcttttgacatcctgttgtccttcatggtctgtcatggcaaaaaaatttttcccggatctgatcgaccagatctcccaggaacttactcctatggtggcgacggcaaggacaattaagcagaaacaccctgaagcaaaagtagtctttatcggaccatgtgccgcgaagaaactggaagcgtcaagaagaagcgtgcgaagtgacgttgattttgttgttacttttgaggaattgcaggcaatgtttgatgcaaaagagatcgatctgacagagtatgaagcagagtcttccttccatgatgcaaccggagctggcaggggatacggatgtgcaggcggagttgccgaggcaatagaaaaatgtattaacgaatattatcctgatgtacaggtgaatattgagcacgcagaaggattgaaggaatgtaaaaagatattaactctggcaaaggcaggcaagatgaacggttgtctgatcgaaggaatgggatgtccgggaggatgtattgccggagcgggaacgaatattcctcttccgaaggcgaagaaagatcttgcggctttcgtgaaaaactcaagtaagtcaattccgccgaaagaattagaagagatcgaacttgattaaaataaatacaaatttgacagccggactgcaagaaaagaaagcggaaatgccgtaaacggaaaattgcagataaaatatgggataagataagtaagcgggcgcctttttttggcgttgtaggtttgtcaaacatatgttacaccccgatcaataaattccctcagaacagtttgtggtgatttccaccccagaggtctcatgggaaactggttataat

SEQ ID NO: 7659 - DNA, 712 bp, Unknown
  gut microbiota DNA sequence
gagccccgggttttcacatcagacttgcccatccgtctacgctccctttacacccagtaaatccggataacgcttgcaccatacgtattaccgcggctgctggcacgtatttagccggtgcttcttagtcaggtaccgtcattttcttccctgctgatagagctttacataccgaaatacttcttcgctcacgcggcgtcgctgcatcagggtttcccccattgtgcaatattccccactgctgcctcccgtaggagtttgggccgtgtctcagtcccaatgtggccggtcaccctctcaggtcggctactgatcgtcgccttggtaagccgttaccttaccaactagctaatcagacgcgggtccatctcataccaccggagtttttacccccgcaccatgcggtgctgtggtcttatgcggtattagcagtcatttctaactgttatccccctgtatgaggcaggttacccacgcgttactcacccgtccgccgctcagtcacaatcctcttcatccgaagaatctaagcaaagtgcttcgctcgacttgcatgtgttaggcacgccgccagcgttcatcctgagccaggatcaaactctcgttaaaagtgtttgtcttggtcaagaatcactactagcaattctttccctctttactgttttggcattgaacacttaatgagtctctcacgaatttagtgtgaaagccg

SEQ ID NO: 7660 - DNA, 11119 bp, Unknown
  gut microbiota DNA sequence
ggggggggtatacgctaacgctgaaaaatgaggggagtacgccccatacttttcagatatatcagattttttcgggagatttagatgaaagcaaaaccctttctaatattcagtggggaacgggaattaaagaagcttcaaaagaaactttgggaactgcggctgaaaaagcgcaaactttaaccggcgaatcagaagcaaaagaattcgcaaagacgatccaagagcatttaaatgaagataataaacttgaggtacgcgtagaaaaaaatgattcgacaactgttgcaaatttaaatgcaggttattatcttattaaagataaggagggaagtcagacacaaacacctccaaactcagcgtatacgtcatacattttgaaagtagtaggcaatacgactgctaaaacaaaattagatgtgccggaacttgtaaaaaaagtgcaggaaaatagtaagaaggatatcgagggaaacgggtggcaggatgccgccgactataacatagatgaggtgattccttataaacttacgggtacattgccgagcaattatgcagagtacgaaacgtatttttatgagttcaatgatataatgtctgcaggattaacatttgataaaatgtctgtaaaggttacggtagacggtacgacgttaacggcagatcaggactatagcctgatagtgcattcggatactaatagctttcaggtccgctttgagaacttgaaggcgattcaaagtgtgatgataacttccacaagtcaaattgtcgtggaatacaaatgtagattaaacggaaatgctgtaattgccggaaacggaaatcctaatacagcgtatcttgtatattctaacaacccaaatcagagcggaggcggcgaccacggaaaaactccggaagataaaaatgtcgtatttacatataaagtagtagtaaataagaaagatgaagagaatcactcgttacaaggtgcacaatttgagttgcggaagatagtaaatgatcaagacgaaggaacaaaaatagacacagttactgttacggaaggaactaagtttaattttaaaggattggatgcaggaaagtataagttaatagaaacagtgactccatccgggtataatacgattcagccgattatttttacgattgaagccacatatgacgaggaatcggatgatccgcaattaacatctttgacaggacagacggaaggagaaatagtttttatacgaaagacagaagaaagggaagactctctgtcaacagatgtaattaataagaaaggcattcagcttccggagacaggtggaatgggaagatatttaatatatacattaggaacgatcttcgtattaaccgctctgggatatacagtgtataaaagaaacagaaaacatactgaaaaatgatgtttaagattaaaaaatatatacctgatatagtagttgcgatcattttgattgctgggataggcttgttggcctatcccacgatcggtgattatatcaatgcgctgcattcttcaaaagcgataggaagttatgtagaaaagacgaaagatttatccaaggaagaaaaagaaaacttgttaagagaagcaagagaatataatgaaagtctggttggtaaagtcaatcgatattatttgaatgaagaagaaaaaaagagatatgctcatatccttgatataacaaaaaccggtattatggcatatgtagaaataccgaaattaaatatatatatgcctgtttatcatggcacggatgaaggcgtgctgcagatagcggcaggtcatctgccgggcagttccctgcctgtaggaggagaaaatacccatagtcttatatccggacataggggattgccttctgcgaaattatttacggatattgataagttaaaaaagggcgatttatttttcatacacgtatttgatgaggttctggcatataaggtaaatcagataaaaatcgtacttcccgatgatgtggaaactttggagatagaaaagggaaaagattatgtaactttgatcacatgcaccccttacggagtgaattcccacagacttcttgtgcggggagaacgtactgtttataagcaatcagaatcgaaaatagaagatatgatcaaaaaaaataatctgaagtatatcatgttgacggcaggagttattctggctctgatcggcatgacagttctggtatcggtatttctgataaagagaagaaagaggaggaagttgaatgaaaaataagagaataaacctattgcttattctatgttttagtctgatattttttataacttctttcgattgcgcgtatgcggcagaggagaacggcagtttgaatattatactaacttatgaacggcaagcgatagacggcgccgaattttctgtttatcaagttgctaagtggaatgaaaaagagagtcggcatacagtaaaagcgccgtttcgatggaacggggattttgtaaatattaaaacggctgacgatcagttaaaattatcgctttattttgaaaagcaaagccgtaatataaaagaaatgatgaaaggggaaaccggagatgacggtacggcaaaatttacagatttgaaagatgggatttatcttgtggtacagacaggatcatccggaaaagcaaaagactttactaatgtacagccttttttagttatcattcctcaatttgaaaatggaatccagaacagggtggtgaatgcaaaaccgaaaactgagatacaaaggaaagaaaaacccgagatacctccacaaacaccaccggatctatctcctaaaaaacgtcctcaaacaggagatattacaaatatgtttcggtggaatggagtcttgatgttaagcagcggtatgctgctgctgtttttcaggatcaggcaaaaaagcaaaataggggaggagagcgttgatgaaaaagaataatttgctaataaagcttttaaccctgttaataattatagctgctgtcctgccggtgttttatatgcctgcatatgcggtggaagaagagtatggaacacaagatatatctgatcatgggataagcgaacaaggagaaaacatcacttcttccgaatcggaaacatcgtatgttgaagagggaaacaatgtatttgacatcgttccgaaaggatatacattgaaagcggttcaaacaaggtctgttgagtttatcatacagtatcccccggggcagccgacaggaaatgtaacatacgaattgaagaaagaaataaataaccgggaaatagtagtaaagagaggaacactaaataagtcacagaaaaaaattacttttaaagatttagaattaaatacgccatataagttttatttgacaaaagttccgaatggatatggaaaaccggacggttctgtggcagagttttattttgacaacgacgggattcattttacaaaaggtgaatcaggtattgctttgacgatgactactgcgtatgttcattttattgtacagaatacttccggactgcctgtaggaggagtagtacgatatgcattaaataaagtgaaaggtaatcaagaaactcaaattaaggcaggaacggcagacagggcaaccgggaaaattattcttgaaaaattagagtggaacactccgtataaactttatttgagaacagttccaaaagaatatgaaagaccgaacgattccgtggcagagttttattttgacagtgaagggattcactttataaagggaagtacagccgttgttttaaagaagaataatgagcagaacaacaacggacaggacgccccattggaggaaggacaatattatggatttacaggagaagacagcagaataaaaatatcgaaggagtataatatagcgacaggtacagatgcattttgctttggcgctaacaaggattttcctaactttggtaataaagctgtttacaatgaattaagtaccagcgccgaaacgctctttcaattagcggaaaatccgaggaagaaaaatccgaaagaactttatgattcagtaagaaaggtgatttattattgcgaaatgcataaaaaagaacttttaactgaccatcaattaggcagcgatgcattctggtttggaagcaatgataaagaaaaaggatattataaggctttgcaggaggcaatctggtattattcagatagtattgacggcttgaaaagctattcatctggcagtgtgggttatcatattatgaaaaaagcagttaaacacattattcaagaaagtgagaaagtatcggatgaagatatggaatgtgtaaagcttaaaatgtataattcttctatgctgggcgatcacaacagtccgctccaaccgttaattgcgtttgaaataataaacaaaacagatataaaggtgcaaaaagtcaataaaagcggtgaaagtctggaaggggctgcgttcagactggaaaaactgggggatgcatcgttcaccccggtagaaatgggaaatgaatcagctatttcggattttacgtttaaatgtttggacgcaggagaataccgtcttacagaaatcaaagcgccatcaaattatattcctttggaagaaccgattctatttacaataatagaagaaagcaacggtgtatttaaaattaaattaaatacagagaattctaaagtaacgttagaagaggggacgttgacgattaaagttgcaaatgaaaagactgtaacgacagagatcactgtggataaaaaatggtttagagctgacggaactgagtttcaccctcaggatggggagatttcttataatctgatacaggttttgactacggaaggaggggaatcttccgaaaaaatatataaatcgggagaaacattgacaagtcaggacggttggcaaaaaacttactcaaatctgccggcggcagacataaacggcaatggagaaaaagaaatctgcacgtattatgtgaaggagattttgattgcagattatagtacaagctacagtaacggcagcgtcggtgaatcagaagatccgtcggccgcggcgctttcgtcgggaactatcactgttaaaaatacggaaaagatgaaattcatattacctgaaacaggtggaacgggacgtgggattctgtacattgcaggagtgtttctgttagggatttctatgattctgttaggcaataaaaatagttctttttatgaatgcttacataagaaagggtgactttttgtatgaatttggatgagcgggatttaaaaaagatcaaatctttacatgttatgttgaaaatgccaatatggatattggaaaaagaaacaaataaagttttaaaaagctatgaatcaatttataagcatcctatttcttacggattcaaagaaaagaatatctcagaagaaacagtgcagttctacagtggaatattaaatgaaatttttttgtgcctgtggtataaggatataaaaatagtaataggcgcttttagaattaataatgttacaagggcagatttttcacatgcttataataatatggatgatgaaaataagaaaaatttgtcagaaaccgagtgttgggaatattatgaagcgcttccggtatatccgttgggggatatcagagattatttgatccttttagggtttttgtttgatatggatctggaagatatctattcggaaggattgcacgagcaagtagcgaaaaacaagttagaactggagaaaaagccatctgaagaagaggtatatgacactttccgtgtagagcgatatacattttattatgaaaataagatcatgaacctcgtaagtcagggagatattcaattattaaaaagtggtcttacagaattaggaacgagtgttttaccgattttaacgagcagttctttaaagacggaaaaaaactatactgttattattttggaaaagctggcatcgttggcgattcaggtaggaaaggatatcgtgtcagtaatcaggctgagaaacttttatatcaaaaaggtagaagagcaaacagaatttgtaggagttttggctacgagagacagcgcgatcattcattttacagaagaacttcacggtgtatcgaatcaggcaagaacatccctcatccggtgtgttctgcaatatattaatctgaaaatctatgataacatcaaggtgacggagcttgcaaaacaattttatttatcagaaagcgcgcttcgcagcagatttaaagaagagataggcgtacctattaacgaatatgtaaataaaagaaagattgaagaatcaaagatgatgatctggtcgggaattccggcaggagagatagcaaggcgcttgagtttctatgatctgtctcattattatcgtacttttaaaaaatacacaggcgtgacaccacagcagtttagagatacaaatatcataggacaggaaatgtaataataggcgaaaagtttgagtaaaatcagcttttcgcctgttttgtttttgtaaatatcgggtgtttggtaattaagaagaaaaaaatgttgttatgtacacgaggtggtcaaacggtacattgaagcggggggggtaataatatatgctaactctaaagcaaaataatataaaagctatacagttttatatacacggaaaggaggggggatatgcagttaaacagaacaacagattacgtagtaaggattgtgtactttttaagcaatgaaaacaggatatttacttctgaagagatttccgaggcaatagggtgttcaagaggttacgttatatcaattttaagaaaattatcgaaagaaggactagtggaggtgatcagaggagtaaagggcggttttcggttaaagaaaagaccggacgcaatcagtttgtttgatgtgataaaaatcatggaagatactatttgtatcaatcagtgtttgaatgaagaggaaaattgcaatctaaaagcaaccgattactgcccggtgagacggttttatctttcattgcaagaacaaatagaatcggagttaaaacatatgacatttgaaatgctgagaaaatcgggagggggcggatagaatattttaatagttcttaatcaggcgggtaatgcaaaatgaagtcaaatgaaatcgaaggaatcagataggaggatttatggaaacgttaagaaaaattattgaagaaaaaaagcgaaagggagaagaaaaaaagccgtattatggaatacgcaaactaagcgtaggtatagtttcctgtatgttgggccatcttctcttttttgcatcgcctgtagttgtaagcgctgttgaagcaactccggaagatgtaagcatcattcagatgcagtcggtgaaaggcgaagcgatcgaaagatcagcgacgttggttgccgttaccggagcgacaggtatcagggcggcttccggaaacatagattcggagaatttgggatatgctccgaatgcaaagtatagttttcaggatttaaaattcgatcctgaaaagctaagtaaaaccaattccgcgcggcagatccaatttaaaatctacggaaagcacaatattgccgcttcaacagataactggaagatcaatcttcaaatcgatgaaagaatcgcaaaacatgtaataggaatcgaagttgaaccaaaaaggctgacagaagcaaatccaagaccgatcagaagagcgcttacgagaaaaagcgatacgatagggcgaatgacaaatatatgggaagtaaattatatcagatctgaaaacggagtgtttgcaggaggagagacgacagatactcagactgcgcataatggaattatttatcttgataaaccgctgaataaaattcttgaagaaatcggagatgaaaatctgacaaacgaacggctcttttacagaatttatttgacaagcgttcaagataaaggagctattgttccgggcattgcttctacaggatttttcaaaattaacggtctggatatccagatcgaaacgatagaatctagcggcaatgaaaaatggtttaagcatgcggctgttgaaggcagatatgtaagaagtgataagtttaaaaatcctggcggagcgattaatcaaaacggagctatcgtcgtagatcataagatatcgaagaatactaactttgcttatataagcgcaaagaacaaaccgtggactcttgagtatggagtcgatccgagattggtaaaatatattggaggtatcgagctttattacatggatgcagctgattatgtgaatccggattattctctaaaaaacaaagcaaatcgcaaagttcgagatttgtcgatcgtaagaacagcaggtcataaaaaatatggttatggtgatattacagagaatcagtttacgcaaatagtagatgttcatggaggacgacccgaaccgatcacgataagatatgtctataagcttaataagccaatcaatgaaattttggaggaattaagaagagaagccggagtagaagaaggagaagcgtttggtaaagattttatattcagcgcatggattacagataaaacaaaagatgctctgataacgaatacatacggtacaggctactatagaattcaggatattgacggtgatggaaagcttgatgaggaggaagcaaataatgagcaaagtccttatatcggcgttccgaaaattacagctccttatgaaggtgataataaagtaaaagctgttgtgcatttaaatgaaaatgccggaaagggaaataaagctcagctgatcaataaaaacggagttgtcgttgctacaattaataatgtagatgcagaggaaaacggcataccaaaaacaatagatagagaacttgaatttacggttactgattcaagtgtattaggtaaagcaggagataaacttaccgttaagatcattccttcagatgaaaggtatgagaaagcggaagaagcagaaacaaaggtaaaagaagcgccaaaagcagtcaaagatcctctcagagttgtcaaaggaaaggatttaacagaagatacggtattagcgaaaaaaggagtagaaaattcaaataaaatgccgggaggaacaacatatcggtggaaaactgctccgaatacaagtcaggcaggaaatacgactgggatagtgtcagtaactgttcctgacagagaagaagcttttgaagtaactgttcctattgaagtgtttttagcggatgcagataaatatactccgcagacaacgtcgattattaaagagtatggaacatcaacgacagaagaggaaattataggcgcggtaacagtgccgggatatccggaagatacagtggatgaactggaaatagcacttgataatgcaactcagattccggatgggaatacagcaggggattatcctgtagatgtaacagttacttatccggatggaagtgaagataaagtacaagtaacagttacagtaaaagaacaaaaagataatgagaagtatattccggaattcgatcagattaataaaaactacggcgaagcaacaacggaagaggagatcaaaggtgcgctgaaggaagaaagcgtaccggagaacacggaagtcacagtgaagaatccggaaaaccttccggacggaatgacagagggaacattcgaaatagaagtgacggtagagtacccggacggaacaagcgaagatacgacagtgcaggtagtggtgacggataaccgcacggatgcagagaagtatacgccggaattcgatcagatcgagaaaaactacggcgaggcaacaacggaagaagagatcaaaggtgcgctgaaggaagaaagcgtaccggagaatacggaagtcacagtgaagaatccggaaagcctgccggatggaatgacagaaggaacattcgagatagaagtgacggtagaatatccggacggaacaagcgaagatacgacagtgcaggtagtggtaacggacaaccgcacagatgcagagaagtatacgccggaattcaatcagattgagaagaatcatggggaagctacaacggaagaagagatcaaaggtgcactgaaagaagaaagcgtaccggagaacacggaagtcacagtgaagaatccggaaaaccttccggacggaatgacagagggaacattcgaaatagaagtgacggtagagtacccggacggaacaagcgaagatacgacagtgcaggtagtggtaacggataaccgcacggatgcagagaagtatacgccggaattcaatcagattgagaagaatcatggggaagctacaacggaagaagaaatcaaaggtgcactgaaagaagaaagcgtaccggagaacacggaagtcacagtgaagaatccggaaagcctgccggatggaatgacagaaggaacattcgagatagaagtgacggtagagtacccggacggaacaagcgaagatacgacagtgcaggtagtggtgacggataaccgcacggatgcagagaagtatacgccggaattcgatcagatcgagaaaaactacggcgaggcaacaacggaagaagagatcaaaggtgcactgaaagaagaaagcgtaccggagaatacggaagtcacagtgaagaatccggaaagcctgccggatggaatgacagaaggaacattcgagatagaagtgacggtagaatatccggacggaacaagcgaagatacgacagtgcaggtagtggtgacggataactttttagttgtcactaaaaatccgccaaaacaaattgatggacagagagtagctgaaaatacaaatgtaattacagcaaatctgacatttactgtagaaggtgtacatgatgaaggattaaattcaggtctttccattgatgaaaatggaaatttgacaggaacgccaaaacttaattggggtgacaagaattccgacacttatgaagaacagacagtagttcttcatgcaatagcaacagcggaaagtggtagtaaaaaacctgtaacaatatcggtagtagttcaaagagatacggacggagacggagagccggatatcacggatacagacgatgatggagatggatttacggatatagaagaggaagaaaaaggtactga

SEQ ID NO: 7661 - DNA, 11513 bp, Unknown
  gut microbiota DNA sequence
agtgatatatattctatatattatgaaaaatcatggtgaaattcactatataagtataacttataaataaaggttaaaataaatcaatgctgaaaatcgtgagcattctctgaaagggttgacatcagttctgaatttttgtagtatatcaaataacatttactagtatggattggtagaaagagaggtcaaaggacatgggaaagattataggagaaggtattacgtttgatgatgtgctgttagttcccgcatattcagaggtaattccgaatgaagtagatctgtcaacatatttgactaaaaagataagacttaatattccgatgatgagcgccggaatggatacggttacagaacaccgtatggcgattgcaatggctcgtcagggcggcatcggtattattcataaaaatatgtcgattgaagctcaggcggaagaggtggacaaggtaaaaagatctgaaaacggggttattacagatccgttttatctgtcaccggagaatactttggaagacgctaataatttaatggcaaaattccgtatttcaggagttccgataacagaagggcgtaaacttgtcggtattattacgaatcgtgatttaaaatttgaagaggatttttctaaaaaaattaaagaatctatgacttctgaaggattgattacagcaaaagaaggaattactcttgaagaagcaaagagagttcttgcaaaggcaagaaaagaaaaacttccgattgtggatgatgagggaaatctgacaggattgatcacaatcaaagatattgagaaacagatcaagtatccgttgtctgcaaaagattcgcagggacgccttctctgtggagcggcaatcggaattacagcaaattgtcttgagcgagtagatgctctggtaaaggcaaaagtagatgttatcgttatggattctgcgcatggtcattctgcaaatgttcttcgtactgttcgtatggtgaaggaaaaatatccggatcttcaggtaattgccggtaatgtggcgacaggagaagctgcgaaagcattaattgaagccggagttgatgcggtgaaagtcggtatcggaccgggatctatctgtacgactcgtgttgttgccggaatcggtgtgccgcagattactgcggtaatggactgctataatgttgcaaaagaatacggtgtgccgattattgcagacggaggcatcaaatattcaggagacatgacgaaagcaatcgccgcaggagcaaacgtatgtatgatgggaagtatttttgcgggatgtgatgaaagtccgggaacatttgaactttatcagggaagaaaatataaagtataccgtggaatgggttcaatcgctgctatggaaaacggaagcaaagaccgttatttccaggaaaatgcaaagaagctcgttccggaaggtgtagaaggccgtgtagcttataagggaacggttgaggatactgtattccagcttatgggaggacttcgttcgggtatgggatattgcggaacacatacgatcgaagaacttaaatcaaacggaagatttattaagatttcagcagcatctcttaaagaaagtcatccgcatgatattcatatcacaaaagaagcgccaaactatagcgtagacgaataaagaaaatcagcatcattacataacagaaaaacggtttgtgtgacgatgggaatcaaagtaaatagaaaacgtgatcaaataaatgcctgttgaatttctgacaggcatttgtttttataacggcgacgagccaaagtccgggcttgtccaagactttgtcaccgcttataatcccggaatgtgctttttgtcactttcggggattcatcatatcagcagaccaaaatgcgaaagatacatagaacagaggcaaagaaatgagtctttataaaaaaaacagaagaaaagtatcgaaaaacagaaaaaatgcatcgggacataatactggaagatcaagtacaaagaaaagccgttctgtaaaatcgaattcgttaaagcagaagatgaaaaagaaaagaatcagaataacggcagttgcaggactcgcagtgcttcttattctgacgattattttagttgtgcgctcctgtatcggagagagaaatcagtttgtagaaacagatgcttcacagccggatattgatgtacagcttttggatgtaaatccctattcaaggcccggaatcgagagcgaaggagtaaaaggcgttgttattcattatactgcaaatccgggaagtacggctcaggataacagagattattttaatggccttcaatattccgggcagacggaagcaagcagtaattttattgtaggattggatggagagatcatacaatgtgtaccgacatgggagatcgcttatgcatcgaatgagcgaaatgcagatacagtatcgattgaagtctgtcaccctgatgaaacaggaaagtttactgatgcgacataccgttctcttgtacagcttacagcatggctttgtgtcaaatttgatttgaaagaagatcagattattcgccattacgatgttacaggaaaaaattgtccgaaatattttgtagaaaacgaagatgcatgggaaatgtttaaagataatgtgtgggacgcggttcaaaagaaatagatgatccgcttgtttggaaaattatattgaggacagtttctttgattttcggaaaatttgcgcagactgtatttgtaaaatcccttgtcatgtttctatggaattgatataatgtgttagatttgttagtttgagtgaaatgtggagggtaaagatgaacgatctggaaatgtatcgtgaacagcttgcgatgtgtgatgataagcttatagatgcgcttgtagagcgaaatggaatcatcgaaaagataatgtcatataaagaaacatacgggatgccgattttgcagcctgcgcaagaggaaaagcaggaaaaaaggttggaagaaaagttacagggaaataaatatcaggaagaaatccatgatgtattccagaggattttgcggaacagcaaaagaattcaggcaagaaagctgtttccatataatattgtattaatcgggtttatgggagcgggaaagtctacgatttcagattatctcagcacgatgtttgatatgaaacttgtggagatggatcaggaaattgccgagagggaggaaatgagcattccggatattttcgcaacatatggggaagaatatttccgcaatcttgagacggaattattaaaggaacttcagacaggcagaaattgtattatttcttgtgggggcggagtagcgcttcgcagtgaaaatgtcgttgaaatgaagaaaaacggaaaggtcgttttattgactgccagcccggaaacaatttatgaacgcgtaaaagacagtaatgaccgcccgcttttaaaagaaaataaaagtgtggagtttattgcacagttgatggaaaaaagaaaagagaagtatgaagatgcggcagatgttgtgattcgcacggatggaaaaacgatattgcagatctgcgaagaactgattacaagactgatggagttggaagagaaataatgtttgaaagatttttcccggatgaatatgtggtatctacatatgtaatcccatttgaaagattgtatgaagagggatatcgaggagtaatttttgatatagataatactcttgtgcctcacggtgcaccggcagatgacagagcaaaaaaactgtttcggagattgaaagagattggattttcctcctgtctcatttctaataatcaagaagaacgagtaaaaatgttcaatcaggagattcggacaaattatatttataatgcgcataaaccttcaacgaaaaattatgagaaagcgatgaagattatgggaactgataaaacaaatacattttttgtcggagatcaactgtttacagatgtctggggagcgaaaagaacaggaatacataatattcttgtgaggccgatcaatccaaaagaagagattcagattgttcttaagaggtatcttgagaagatcgttcttcatttctataaaaaaagattgaaaaatgaaagaaattagtatagaattattaaatggagtgctaaaatagtgaacgattttgaaggaggaagataaatgatttcagcaggagattttaagaacggaattactgtggaaattgatggaaatatttaccagattttggagttccagcatgtaaaaccgggaaaaggtgcagctttcgtaagaacaaaattaaaaaatattatcagtggcggtgcggtagagagaacattccgtccgacagagaaattcccgaaagctcatattgacagaaaggacatgcagtatctgtatcaggacggtgatttgtacaactttatggatgttgagacatatgatcagatcgctttgaatgcggatgtcgtaggagatgctttgaaatttgtgaaagagaatgagacagttaagatctgctcacataacggaaatgtattttctgttgaaccgccgctttttgtcgagctggagattacagaaacagagccgggatttaagggcgatactgcacagggagcaacgaaaccggctgttgtagaaacaggcgctacggttatggttccgctttttgttgagcagggagatgttctgaagattgatactcgtacaggagagtatttgtcaagagtttaatcaaagcgatattttagattttgtgtctatatagtgttttgaaattatataaaaagattccgtctgagggcggaatcttttttgtgcaatattacatgttgcattttcttttttgattctctataatcaagagcacataatatttttcaaattatcaatgtatttcaaggtacagttcgtaccggatttctcatttaattcaaattgaaccgcataaaaaggaaggagttatatgacttatattgaatttgcagatgcggtagaaaagatgatgaacaaaaagatgaaagggggcgttcgtgcaagcttatatacggcaatgaaaaataatgggaaagagagaacgggtattttgattgaaatgcccgggatcaatatttctccgacaatctatctagaagagtattacgaaagctatgtggcgggtagaaagatagaacagattgtagatgacatcaagcagctttatgaagaaataaaacaggaaaaaccgtgggattgtgaatcttttcgggattatgaaggggtcagaaaccggattgtatttaaagtgatcaacacggcaaaaaatcgaaaatttttaagaaccgttccccatttagcgtttcttgatctgtctattgttttttatgttcttgttgatgtgtctgaagaaggaacagcggcaatggttgttaacagaagccatgcagacacttggaaggtgcaggcagaaacattgtgggaagacgcggtgaaaaatgtaaaaaatctgcttccggcagaatttgttacgatgaaccatgcattaaaatctcttttaggggatgtggaatatgaagagggagatcttcttttagaaaagaaaaaagactatgatcagatgtatgttttatcaaataaattcagaaattatggagcggcatgtattgcttatcctaacgtgctcgaaatgatcggtcagattttaaagaaagattattatattttgccaagcagtgttcatgaagtgatcattgtgccatattcagaaatctatgtatgcagtaagttggatgagatggtaagagaaatcaacagtacacaggttgaagaggaagatgtattaagtaatcatgtgtatttgtatgacagagtttccggtaagcttcgtgtcggatcatctgtacagacagggaggatgatggcatgagacgatggatgaaagttgtattttgttttctttttggaatcatttttacgaacatgttcactatggatcaggcagtcgcagatgaaagctttggaaaaagagaaatctcagcagaatcatccgtattgacgcagaaaaaacaagcagtgttagatatggaaacaatgacattttcgttggaatcagaggcagatgaagacggagatacgatatcgaaaggtatgatactgacaactgcgggaatcacatcggatacatatccggcagttttgacaaaatcggatgagatgttcaaaaaagcggcggcaatttcagaaagatcaaaagtagaactgacagtaggagaagagatttattatggcaattacagcactaattattttgatgtaaacggaaaacctgcatactgtcttgaaccgctgaaagatactccaaattcaggttcgtatgaaacgcaggcattaaccggcggagctgtaagaaaaggattgtattatgcatatggcggtccaggatatgaattgtatagggcaaaatatggtgcgatcggcattggagaaaattattctgtaaatgacgaatactgtatgagtcattgcattttgtcgtatctttatatgggaacggaggaagcgtttctaggattagatcagcaggtaattgaaaatttaaaacagaaggcaaaaaatatagaaagtatgccggatccgccggaatcattttacgcgtttttgtttaacttaaattcagccggacagacaatgggaggaagtggaaaagacagagtcggatctattgagatttataaatattccgatcatccggaatggatagaaggaaacagatgctattctcttgcaggagcggtgtttggtatctatgaaagcggaaaagacaaactattatgggaattgactacagacgaatcaggttatgcaaaaaaagaaaatattccgatcggaaattatgatatcagggaattaaaagctccggccggacatgttatacaatttaagccgcaatctatccgaatagatgaaaacaaagtatgtacatataagtgcacagatcaggcgcagtattatccgatagatctgattttacagaaaaaagataaagaaacagatcaatcagaagctcaaggagcggcaacattggaagacgctcaattttctattaagtattattccggatattatgaaaaaaatccggcagattcaggagtaacaccggtcagagaatggattatgaaaacggattcagaaggaagaataagaatgaaagaagaacaaaaagtcagtggagatccgttttataaaaacacggaaggagaagttgttcttccgcttggaactgttacatttcaggaaataaaagctcctgaaggatatttgctcaacaatgaaatttttatagaaacggttagggaagaaggcacaggacagacagatacaatttttcaatgtcctacaatacctgatcagatcatcagaggtaatctgcagattgtaaaatttcgtgaagataaagaggaagaatcagagcagggcgaacaaaaagtacctttggagggaattgtttttacaatcacatcaaaaacaacaggctggcagtgtgaaattgtaacagatgaaaacggatatgcgtcaacattccgacaaggagaagaacagcagaaaggaggtcttgtatatgatacatatattgtgagcgaaaaaaaggcgccggaagggttgactccggtaggagattttgagattacaatagaagaagatgcgaaaacgctatattacatattagaaaataagaaaatattttctccggtaaagctcgtgaaaaaagatagcgagacagaaaaaataattcctgttgcaggagcggtgtttcggcttttggacaaagataaaaaaccgattacgatgacgacacattacccgaatgaatcagtttacgatctgtttaaaacagacgaaaacggaagttttgttttgcctgagaaacttcctgccggaaattattattttcaggaggtggaagcgccgcaaggttatcttatagaagatggattaattccatttacaattatagaaaatcatgactgggagaaaccttttattgttgagtcgaaagacagaccggcgaaagggcgcatttatattcaaaaaaatgattctgtaacagaaaaaggaatctcaggagtaaaatttgagataaaggcagcagaagatatttgtactcctgacggaactgttcgtgtggaaaaaggaacagtagtcggatcattagtgacagaccaaagcgggaaagcatggtcggaagaattgtatcttggaacgtatgagatcatagagacaaagcaggcagaaggttatattttgccggaaaagagcgttgagatcgaattagagtacgaaggtcaggacgtaccggttgtgacaaaagagacggaaatattaaataagcctacgtctgtagttatccgaaaatcagatggggaaacaaagaaagcactttctggcgtgaaatttgaactgcgggaaaaaatatcggaaataaacgaagaatccgatgcagaagaggaagatctcagcgaagagaaaacaacatatattacagatgaaaatggagaaatacatctttcttatctgcgtccgggagtctactgtctttatgagtctgaacctttgacaggatatataaaaaatgaagaagtgtgggagtttcagatcagggaagacggaacagtagaaggagaacaggaaaaaattctggagattgaaaatcatcatacacggatcacggatacacacgccgtttggaaagaaagcaaggcaaaagaaattattgcaggagaggaacatattatctgcgatacagtcaattttaaatatatggaagcaaatgcatcttatacgatgaaaggcatattgatggatgcagatacaggaaaagaactgcttcaggacgggaaaccggtaacatcagaaaaaacatttaaggggaaagacgcaaaagacgggattacaatggaatttgatgttgattcaagaaaatttccggggaaaagaattgtagtttttgaagtattgtatctcggtgattgtttgattgatgcacatcgagatctgagaaatcaggaacagacagtatctattttgaaaaaagaagaagttacggtaaaaaccggagataataaggtatatatgaagcaaacgattttgattatgtcggcgtctgtctgtattttatatgctacttggaaacgaaaaaaacgaagacattaaaaacgaccgatcaaggatgcagcagctgaattgttctatttgagaaattgctttagaaatttatttaaagattgcttattagaattattaaaattagtatttagagcttgctcaaaattactgggcttaaaattactgtttagaatttgctcaaaatcagtagtaatataaagcggttagtgttataatattgagaaagtaaagactgtttttcagaacagagaaaggacgtagattatgagcaaagtagaagaatttatcgccgagacaaaactgaatgatctgctgcacaaaaaagaggcggaaagtcagaaaaataaagtgatctgggtattggcaattattggagcagtggcagcagttgcaggaatcgcttacgcagtgtatcgtttctttacaccggattatttggaagagtttgaagatgattttgacgatgacttcgatgattatttcagcgaagacgatcaggtgtaagaaactgtttgcaaaagtaaaacagaatatacaggcagagtgtggatgaaactgcaccctgcctgttttgcagttgaaaaggtgtctgctttgcaatgatatatggatgaaggattgacataaaagttaacagaaaaattgataaaagagtaagagttaatgcggtaattttctgctgtgttaaaaagaaaaattattatgaaaggaaaagcttatgaagaaagggcagatttttgaaggaataattgaaagagtagattttccgaataaaggacttgtgaaagttgaagaagaaggtaaagatgccagatatgtgactgtaaaaaatgcagtaccggggcaaaaagtgcgattcattataaataaatttaaaaaagggaatgcagaaggcaggctgttagaagttctggaaaattcctctcttgaaacgaggaaacctgtatgcagtatttttccggcatgcggtggatgcatgtatcagacaatgccgtatgaagaacagatgaaaatgaaagaaggacagatccgaagaattatggatgaagctgtggacggcgagtatttgtttgaaggtgtgaaggcaagtccgaaagaatttgcatatagaaataagatggaattctcattcggagatgaatataaagatggtcctttgtcgctcggacttcataaaaaaggaagtacttatgatgtgctgaccgcatccgactgtaaactcgtgcatgaagatatgaataaaattctcgtgtgcgtattagagtattttaaagagcggaaagtcagttattataaaaagatgcagcatgtcggatatttaagacatttacttttaagacggggagatacgacaggagagatccttgtcaatcttgtcacaacaacgcaggaagaatacgacttatcagaactgacagaacagcttttacagcttccgcttgaagggaaaatcgtaggcattcttcatattttgaatgattctttgtcagacgttgtaaaaagcgatgagacgagggttttatatggtcaggatttcttttatgaaaaactgctcggattacaatttaagattacaccgttctccttttttcagccaaatacaaagggggcggaagtgctttatgaaacagtgcgtgaatacataggcgatatccgtgatctgacggtgtttgatctgttcagcggaacaggcacgatcagtcaggtgcttgctcctgtggcaaaaaaagtgattggcgtagagattgtagaagaagcagtggaagcggcaaaagagaatgcagaaaggaacggactttctaattgtgagtttattgccggggatgtgtttgaagtgcttgatgatataaaggagaaaccggatgtgatcatattagatccgccaagagatggaatccatccgaaggcattaccgaagatcttggattatggagtggatcgtatcgtatatatttcatgtaaaatgacaagcttggcgcgggatttagagttgatacagcagagagggtatacggttgaaaaaatgacggcagtggatcaattttgtgagactgtgcatgtggagacggttgttcttttgtcccaacaaaaaccagatgacacgatagagatcgacttagacctggacgagctggatgccaccagtgccgagttgaaagcaacctatcaggaaatcaaagattatgtgctgaaagaatttggcttgaaggtttcaagtttatatatttctcaggtaaaacgcaaatgtggaattgaagtgggagaaaactataatcttccaaaatcagaaaatgcaagagttccacaatgcccgaaagagaaagaagatgctatcaaggctgccctgaaatattatgcgatg

SEQ ID NO: 7662 - DNA, 10869 bp, Unknown
  gut microbiota DNA sequence
ctatataaatcccacagcctcggtccacaaaaaccacccaaagcactcaacccacgatgctcatgaacatctctatcttcaacctcaaagagcctatggaaatcatctccctcacctacataaactgatttgtcataattaagaaaagtagacttgccactaaattggtcacctgtgatatctataataatatatttgtctaccatcagccatgcatgagattgtccgtttccatccggtttaccccaatatgttccacagacataatctgttttgatacctttatccaataaatactgagctaacaaatcactcgtatctccgcagcaagcacgtggaaatctgcgatatatgctgtcgttatcaaactcccctgcttccaaagccaagtcaatcgctcttcgaaattgggttgcgaactgttcaatttccttcatcatacgctcctttaacaaaaccgcttttgcgaaaaagtattctttcgccaaaatgtatatctcccgttctccaaagcctatcccctggggtaaacctcctgatatatcatcactctgcggaaacagaaacacacatccatttttgccccaaatcggcgaaaacctttgatttaccgggcttttctcgtaagcagagcgactgtctcaactgttgtttcgttgtcccaactaagttcctgaatttcttcaccgtcaaaaaataccggaaacttaaattttatatgcttcaaaaatcttccgttcggctgttcatcctcgtaaatatcaactctttcaacaaaactgttcataaattcttttttctccatatcggtgaatttatcatacagtttgtcaaagtacaaaagatattgatacactccatcctcagaaattttctgctgacggatgtactcttttctggatactatatcatcgatcagactttccagtcgttcaatctcatcatacaaaccatttaaccgatcctgcatatcctgatacttcctgtcatacattttatcagaaatatccagattgtccatctgttgtcctaacctatttttagctcccaatacttgccgcagctgttttttcaagttctcatgctctgtttccaattctccggtatctatcttagaattgatttttgcacgtatagcggcttcaaatttcggattattcaccagctttttaataacttctgctaccgcatcatttactttttcttcgttccactgcttccggtaatcacatttatgaccattcacataatacctatgcttgcaggcataataaaaataatccttataaaatgttccgtcttttttcttcttacggtttacatttccatacattccctttccacaaattggacatttaagaattccggacaaaatatgttcatgctccaaactatggattttctcatgctttactccatttatatttcgtttctgttttgccaagttccaatcatcttcggaaataatggcttcgtgaataccatcacttaatatataagaatcctgctttacaatacggaattcatttctcttgcctggcactctttcagttttccttcttccaaatgccaatttaccacaataaataggattatcaaggacaccctttataaaagaagtagcaaacgcatccaacgtattattctgtctctttttcttcttgtagccatgctcattcagataggctgcaatgccatttactcccatattggtatgaatatatttatcaaaaataatacgaatgatttctgcctcatcttctgcaatttccagttctccatttaacagcttatatccgtacggagcaaatccgccgttccatttgccatctctcgccttttgtctgcgcccctccattgtctgtaccagaatattttcacgttcaatttctgctaccgcagacagaacagaaatcatcagcttaccgctgtctttagaactgtctataccatcttcaacacagatcaaatttactccaaaatcctgcattctctgcaaagaattaagtacatctgcagcatttcttccaaaacgggataacttatataccaagacaaactctacacgatctttaccttcttcaatatcccgaagcatttgcataaattcctgccgtccttcaatactttttcctgactttccctcatccgaatactctccgacaatcaccatttcctgaaaatctgcatattttctcaatctttctttttgtgcttccaagctgtatccttctacctgcatagacgtagatacccttgtgtatatataacatcttcgctttttcatttatattctccataccaaattacagtttactttttatttgtcccaactatattttaccgtagctgcacatactcgtcaatataggtaaaatgcacaaatatcacgcaagaaaaaagagagccaacatctatgctctccctaatcatttcccaatgtattctgttgctgctcttgctggcagttatcttctgctttgtcctccttcggtaatccattcagttcctgaaggagctcactgccatatttttctatcattctggcaagaaaatcaacacatcgttcaaattcaactgtgtgtgccatagctcctccttccaaaccgatatttcttgtcaccacgcatttttcggcggtactctttagctgatctggaatttgtgctataatttctattagaccaactccgttcagcctgatgtcagtttaatggaatttcataagaaactcattgagcatagattgagcggaaattgagtattttacagaacaggaggggattctatttggaaagatgtgattttggttcgattatgacgatcattcgctgttatatcagcgaagataaaggaatgaatcaaatagattttacctatctgttatttgacacgtttatgtgcagcgatgaagccatagactttgattttgacaatggacaggtctgccgttggatgacaggacaggcaaaagtaagtccccggatcgtaacctactttttagataaagaacatcaattagaattggcaggaaacattcagcgacatattattcctctgatgtatgattctgctatggcagcaaaagaattatatgagttagtattacaggatacatctatttcagagccaaaaaaacaggaactaatctgttcttattctcccgctgatatagacaccatacatattttcataacaagggttctgtgtttcggaatggaacggaattttgtgaaacgtgacacacgaaccaagaaattattagccgccggaaatctttctcctgtcttaacagattttgtaatgggaaatgacgttccccgtccatgcaggcatttttgtggacgttctgaagaaatcgaagtgctgcattctctgttggaaaaagagcgtaaagtatttttatctggaattgccggaatcgggaaaagtgaactggcaaaggcttatgccctgcagtataagaaagaatataccaatatcctgtatctcacctacagcggtgatttaaaacaggatattacagacatggattttgcggatgatcttccgcaggattctgatgaagaacgcttccgaaaacacaaccgttttctgcgttctctcaaagaagatactttgatgattgtagataatttcaacgccacttccatacaggacagttttctttcggtcatactcaaataccgctgtcagatattatttactaccagaagccgtctggacggacattcctgtatgctgttggaagaaatttccgataaaacaacgcttctgcaacttgcaggaaaatttttctccgacacagaagaaaaatctgatgtcatagaacagatcatagaagctgtccatgcccatacgctcgctgtagaactggcatcacgcttactggaaaccggaatattggaaccagaaatgctcttaaaaaaattgttggaagaaaatgtcgctcttgatgcaactgataaaatcaatattataaaagacgggcaaagcagcaaagaaacctactatggacacatacatactttattctctctatatcagctttctgaaactcaacaagatgtaatgagatgtctgtgcctgattcctttaaccggtattccggcacgaagatttgctgcatggctgaatttaccggatttgaatgccgtaaatgatttaattgaaatgggatttattcagccaaaaaccggaagaaccattgtactgcatcccatgatacaggaaatcgctgttgcagatatgcagccgtctgtaaaaacctgtttccctttactggaaagtctgcaaaacatctgccttttacacggcaatgatatttcctactacagacttgttttccaaaccgttgaaaacattattacaaaaacaactaaagatgatatttctggttatttattattcttagaagatgttttcccatatatggaaaaataccacgaagaaaatggtatgcaaagaatcctgcgtgaactatcttctttgctggaagacacttctatcggaaccgtgtctgaccgggcattattactggactataaagctacccttgaaagaaatattggaaaagccgtaaagctggaaaaagaagcgatgtctttgctttctcctgttacacctgaaaacgcccacctcgtcgcaaatctatatggaaatctgggtggactatatcaccagcagggaaataccgaactggcaaaacaggctatggagcagggaatcagcttattagaacaataccagcttctctatatgaatgacagtattgttcaaatctgcaactatgcagctctccttacagataccggtgaagcgtctcgtggattatcctccttacgcaaatgtgcccggctggtaaaagaatacaattccgatcagtgtctggactatgccattattcaggaagctatgggaactgcctatctggtacaggctgatatagaacaggctacctcccatctcaaaaaagctatggcaatctatgaaatagtatgggaatctgaaccggaagctatcgataataaataccaacaaatacaagaattgtatatcaatgctggaatacaaattggacaacaattattgagctctactaaaaatgtctgaatagtctacaaatcaaactattcagacattaaaacttataacaatatgaatattttatattaattagtcggcaataaatttcccatactcttcaaactgatagctaaagtagaagtattatgtagtaacgcagaggtcgttggttgaataattcctgccactcctagtgcaatcagcattgcattaataccgacaatccccctgtaattcccctgaatacggtgcatcatcgcattagacaaacgtttcagtactacgatttcccgcagatcctcagcagcaatcgtaatgtctgcgatctctcgcgcaagttctgctccatcactgattgcaattcccgcatctgctgctgaaagcgctggcgaatcattgattccgtcaccgatcatcactacttttcttcctgccgctttctctctttcaatgaatcctgccttatcttccggaagtacttcggaataatattcatccactcccactcgtttcgcaatagatgctgcagtacgttcactgtctcccgtcatcatgacgatcttggaaacaccttcttctttcaaaaatcttaccatctccccggcttcttccctgagaggatcttcaatacagattacagcaactaattctccgtcaatggcaaggaacaaatgagagtattcttcaggaagcgtatcaaatcgttcctgatattccggacgtatccggcacttttcatcctcaaacacaaaatgactgctccctattatggtcttctttccttctatataggaggaaataccatgggctacaatatactccacttttgaatgcatttcttcatgatacagacttcttctctttgcagcatccacgacagcttttgccatggaatgtggaaagtgttcttccagacaggcagcaatccgcagagcttccggttcaggataatcgccaaacacaatgacttcttttacagttggtttcgcctttgtcagcgtaccggtcttatcaaatacgatggtatctgcctctgccacagcctccagatacttcccaccctttacggtaattccattctgtccggcttcccgtattgcagaaaggacagaaatcggcatagccagcttcaatgcgcaggaaaaatccaccataagaacagaaagagcttttgtcatattgcgtgtgacagcccagacaagccctgtccccagaagcgtatatggtaccagacggtccgccagatgctctgccttgctttccagattggatttcaacttttctgagtcttcaatcatagtcacaatcttttcaaaccgggtagcacctgatacggccctgactatgatttccaactctccttcctccaaaacggttcctgcatatacggactgaccctcagttcttcgtaccggaagagattctccggtcaaagatgcctggttcaccattccttctccgcaagacacctctccatcaaatgggattacattgcccatgtgtacgatcactctgtcacccggcaaaatatcggatgccggaacaagaatttcctgctcctctcttttcagccatactttctttatgtttaaagacatgctgcgtgccagatctcctacagactttttatgtgtccattcctccagcaattctccaattcccagcagaaacatgacagaaccggcagtattaaagtctcctcgcagcacggacacgccaatcgctgtagcatctaataccggcacctctatcttccgtctggccagacatcgaatcccttttccgatatattggaccactttaaaagtaagccatatttttctcaccgaatttggcaagagcaatttccctccataatggagcaatgtttttgctatcagcttttccctgtatgcggaatttaaagcacgccctgaacttgataatacattatccggaacatctgctttctcaaaatgaaacttttttaatttatggatcagttcttctctgtcccctgtataatagatcacagcatctgcggtgcgctcatatactttgacctttataacacttttctgtttttcaagagcccagcaaagaacatccgcctccgtacatgtcattcggtttcggataacgtggatacggagacggccctgtacttcatgcttgataagaaatctcatcttttacctattcgttttcttcctgttcagacgcaccatcctcctgaacatcatcttcctgcacctgcattgcctcttcctgtgcacgcttttcattgatctgttgtgcttctgcaaggatatcctctgcgttctcctgcactgttgtagcagtcttcataacacagtcttttgcccgcagtacagccgcagtgcagtttgtatatactttttttgcgtccttactggaaaggagctttacacccgcagtcccaaatacgactcctcctacaaaacatccgatttttttcaaagtagaatcactaaacatcctatgtacctcctgattatttgtgtttatagcctgtatagaataccatcaaaaagcaaaagacggacgcccacgcccaaaacctatgttgtttcacaaccacatcacttccttttctataagactctgtttattttttcatagtaacaactttcatttaagatagtcaattctaacagtccttattgataaattttgtcatttgcaggctacttatatacgatttctctgctaagcaccccgatattctccaattcctttaccagacggtaaacggttgccatcccaatgctctggtcaagtttcaccacccgggcataaatttccttgcagctggaacacctgtcttccaggataatatctaaaatcattttacgctgctttgtaattctgcagccattttctttcagttttataataatactttctttttcaccgttcatacccgctttctcccatatgaaataccacggtctagctttgaatagactcaactaaaaaccctgctttttctactgcgcagatcaggatatcttcccctatttcacgatcaagggatatctcagcacaacttttattaagatctactctggcggagactccatcaatccgattcaagctatctgtcacactttgtacacaatgttcacaatgcattcctgtaataaacatggttttctttgcgatgaccggacccgtcaatttcttttttttctttttatttttgctgctgcaatttcctcccgctggacatccaacacatttcactccgcttctttttgccttaataagatatgcagctgcactccctactaagattacaataacaagaactgctatcatattttccatagagcatttcacatccttttctaataaaaatggtggacaaagtacttcttctctgtccaccgtctgctataacttttatcctttatgattttacagaatgcaggctgtattctgaagcaaactctttatctgacttacggattctccagagaataatcaaagcaaatacaataaccgcgataagtcccggaataaatgcggtgccaaaagatcctgttgtgatcaatgtaccaatctgatatacaccaaaagctacggtataccccgttgcaagttggagacagattcctccaagcagccattttccactcttcatttctgaattcatcgctccaagagctgcaaaacaaggtggtgtgtaaaggttaaacatcaaataagcaagagctgctacctttgtcagtcccataacagttgctacttcattcccacttccaaccaacgccagttcatctgtatctattaagtttgtgataccgtaaactactgcaagcgtcccaactacgttttcttttgcgataaaacctgtcactgccgctgctgcaagctgccacactccaaatccaagcggtatgaacaaaatcgcaaacggatgggcaatggatgccaaaatagatgtcccttctgcaccttcttctacaagctggaactgccagttaaagctctgcatgatctgtaccaccgtattgcataccagaatgatcgttcctgcttttacgatatatgcttttcctcgctccagcatagagccgcatgcccttttcaagcttggaaacttatattccggaagttcaataataaagaaagattttctgtatttttgtcctgtaatctttttcacaagtaaagctccaagcaaaactaagagaatacccaccagatacatagttgctgaaacccaccatgcgtccgcaaagaatgcacctgcaaaaagagcaatcactgggattttagctccacatggcataaatggtgtaagcatcgctgtggtacgacgttctctttcgttacggattgtacggcaagccataacgcccggaatcgcacatcctgtaccaatgaccataggaatgacagatttaccggaaagccctactctcttaaaaatcggatccagaactactgtagctcttgccatgtatccacaatcttccaataatgcaattaagaagtacatgaccataacaagcggaaggaaaccgacaactgcaccaacgccaccgatgataccatctacaaggagtgcatacagaagcgggtttgcattttccatcagtccgccgacccatccctggaaagtctcgatccatgccaccagccagtctgcgatccaggtaccgagcgttgtctgggatatgtagaacacaaggaagataactgctgcgaaaatcggtataccgataatcttatgtgtgatgataccgtcaatcttatcctgtacgtttctatcctttgtaaaaacttttctcttctctacctgctttacaattccattcacaaactcaaaacgctttctgtcagccgcttctactgccgttttatctttgaaatcaatatccccctgcacataaggtgctttctgaccttttcctcttaatgcagccgcagcatttacagtctctttgagtccttcatgtccggaagaagtggaaatcgtcttgattaccggacagcccagcttttcagacagaatcttctcgtcaatttttgtctgtttcttattaacgatatcgctcttattcagtgcgacaactactggaatcccaagttccagaagctgtgtggtaaaaaacaggcttctgctcagattcgtagcatccacgatattgatgatcacatccggattctcattcttgacgtatccgctggtaatgctttcttccgatgtaaaaggagacatagaataagcgcccggcaaatctaccgcaactaactcctccgtcccgtcataataacctttcttgatcggactttcttttctttcgaccgtaacgcctgcccagttcccgacacgttcattcctgccggtaagtgcattgtacatggtcgtctttccactgttgggatttcctgcaaaagcaatcctcataattctcctccttttcgacgtctttaattatacgcatcttatctttattagtatgcactaacctttgtgcaaaaaaaatagtggaaactactatttttttattatattgaaatggctttcgccagatcagtatcaatattataacgcccatccttaatggaaactacacagccacccttcagatgagaaaccactgtaattggttcaccactgtaacagccaagagaaaacagaaaagaggtcagttcttcatcatctgtcaaaatttccttaatgatatattcttccccttctttggcttctgttaaattcatatccactcgctccttatagtcatttttacaattatacttaaaatttactca

SEQ ID NO: 7663 - DNA, 28569 bp, Unknown
  gut microbiota DNA sequence
agatcttaagaaagaccttccgaagatagtgaccgtacatttcggagaaggcgagaaagcagagacggcagacgtagaagtgacatgggaaaagggagaatacaaaggtgaagcggaaaagacatatacgttaagcggaacacttggaaaacttcctgaaaatgttacgaatacgaagaatctgaaagctgaaatcaaagttgaagtgacaaagaaagaggtaacgccgccggtggaaaaagaagagtacacgattacagtcagtgtaaacgattcgaagatgggaactgtgaagcttaatccggaaaaagacagctataaagaaggagacgttgtaactgcaacggcagcggcaaaagaaggatacaaattcgtgaactggacggtagacggaaaagcagtttcagataaagcggagtttacgtttaaagttgacagaacgctgactttgaaagcgaactttgaaaaagcagcggaaaatccgaatcaggaagatccgaaggatgatgataaagcagtgcagacaggagacacggcaggatcaccgatcgttccgatcgcaggactggcgttggcagcaggcgctgttatggcagctgttagaaagaaagaagactgatgctgtgcaagtgattggttatcgctgatataataagatttaaaagaaagacataataaaaattccgtatcaagatcggtaagatcgagatacggaatttttatatgctcatttatattcgatataggtataagatgtattatttttcctcggtgaaagctgtctgtgcggcgctttcagaggaagaaagttcgcttttgttgtcagcatcatgtttttctggaagatacatacgaacagattctacccggtttttatcaagcgcctccacgataaggcgaattccgttatcggtacatacttcatctccgacttcagggaggcgatccagatgttcgatgataaatccgccgagggaatcgtaatcttcggatacaagatccgtttccagacggtcgtttatatcgtccagattcatagatccttcgatgatatattcttgttcggaaatctgtcggaacatatcgtcctctttttcgtcgtattcgtcatgaatctcgcctacgatttcttccagaatatcttccagtgtgatcagtcctgccatttcgccatattcgtcaaggacaatggcgatgttaaaagtagaatcccgcatttccacaagaagttcggaaatatctttgtattcatatgtgaaatgcggctcgcgcataatatcacgaatgttgaacgtctctgtctttttgttatagagcagaagatctttcatattaataataccgacgatattgtccggagtatcttcataaacaggaagacgtgtgaacttatcttcgcggaaaatggcgatcaactcttcgtaagtattatttacttctgcgaatgtaacgtgaacgcggggaaccataatatcttttgcgttggcatcgccgagatcgaacacgttgtagatcatctctttttcgtctgattcgattactccgtcttcgtgacttacatcgacgatcgtacgaagctcgtcctctgtcattgcggttgaagctgcgttcggatcgatacggagcagaaacataaatgcgcgcgaaaaaaggttgatgatgaaaataaacggagtcaaaacgatcataaagaatcggatgatcggtataaattttagagttaatttttccgtgttcattgtagcgtaatttttaggggtaatctctccgaagacaaggatcataaccgttaaaacagcagtggcaatgctgaccatataaccgccgaatgaataggcgagagaggtagcgattgccgatgcggaaaggttgacgatattgtttccgatcagaatggcgctcagcattttggaagttttattctccacaatatcaagagccagggcggcccgcttgttgcctgattcggcaagggaacgcagccgtattttatttacggacatgagcgctgtctcgcttgatgaaaaaaatgctgaaagcactaaaagaattataagtataattagttgaaaactgtcaccagaatccacagttctaaattcactcctttttaataaaaaataaaataagccattttatggcatgcaaaaatatagatacctcatcagtatacactcttttggagaaatttgcaagaatcggataataatgacaaggagcggataataatgacaaggaacggagaagagaatccgataatatcagtaaaatcggatatgcggcggtaatcggtgacgtttcgctttactttgcattaggcgtgaattataatgtatcattataatgaagataattaatatataaaaaacagaaatatggagatatttatggagttgtataaagcattatgtgaaatatcaggagaaggtaatgtattaaaagacgaaccgatgaagatgcatacgacatttcgcattggcggaccggcagattattttattcagccgtcgaagatagaagagatccgccggatcgttgctgtgtgccgggagtgctctaccccatattatattatgggaaacgggagtaatctgcttgtaggtgacaaaggatttcggggagtgatcgtacaggtctttaagcagatgagcgatgtgtatgcagacggagagcgcgtttatgcacaggcgggagctcttttatcaaaaacggctgctgttgcgtgcgaggcgtcgcttacagggatggaatttgcatcgggcattccgggaacgctcggcggcgcgcttcgtatgaatgcgggagcatacggcggagagatgaaacagatcgtcgaaagtgcggaagtgcttacgtctgaaggcgaagttttaaatttgacgaatgaagaacttggtatgggatatagaacaagtgttattgcgaaaaatgattatgtggctctgtctgcggttttgaaactggagaaaggagatcggcaggagatccgtgcatatatggaagatttaaaggaacgacgcgttacaaagcagccgcttgaatttggaagcgccggcagtacgtttaagcgcccggaagggtattttgcgggaaaactgatacaggattccggtatgcagggatatagagtcggagacgctcaagtgtctgaaaaacactgcggatttgttatcaacagaggaaatgctacggcagcggaagtcatgcagttgatgaaagatgttgcggatagagtggaagagaagttcggggtacggttagaaccggaagtaagaaggataggagagttttaacaatgcgttttgttatcgtgacgggaatgtcaggggcaggaaaatcgacagcgcttaaaatgttggaggatatggggtatttttgtgtagacaatctgccgatcccgcttcttccgcgttttgtggagatgttcagcgaaccggacgaagaagtgaaaaagattgcgctcgggattgatatcagaggaggacaggatttcggaggactgaaagatgttcttgatgagatggatgtcaaagagatcgagtacgagattctttttcttgacgcgcaggacgatgtgcttattaaacggtataaagagacaagacgtcagcatccgttgagcggttccgggcgtgttgatacagggattgcaaaagaacgagaaaagatcatgttcttgaagatgagagcgacttatatattggatacaagtaagatgcttacgagagaattgaaactggaacttgagaagatttttgtgaagggacaaaacttttgtaatctttatattacagttatgtcatttggtttcaagtatgggattccaagcgattcggatctcgtatttgacgtgcgttttttgcccaatccttattatatagacggacttcgggagaagacgggaaatgatccggaagttcaggattatgtaatgggaaatgaaaaggcggaacagtttttggacaaattaaaggacatgacagaatttctgattccgaactatattctggaaggtaaaaaccagcttgttatttcgatcggctgtacgggaggaaaacatcgttccgtaacgttggcgaacgcgttgtataaagttttggaaaaacaggaaaattacggggtgcgtattgaacaccgcgatattgagaaagatacaattacaaaaaggaagtgagacgatgtctttttcgggaaaagtcagagaagaactttctgagaacatcagtcaggcgagacattgccggatcgcagaactagctgcgtttatcggcatgtgcggaacagtatcgattgacagttttgacagatatcatattaagattcattcggaaaatatcgttgttgcaagaaaagtctttacattgttaaaaaaaacatttaatataagaactgatatctctgtaaagagaaatgtaaaaagagagagtgtatcatatcttgtcgtgataaaaagtcacgaggatgcgctcagagtccttcaggcaacgaagatgatcggagaacagcaggtgggaacggatgcgatttgcggatttaatcctcttataatccgtcaggtctgctgcagaagagcatttctgcgaggcgtatttcaggcggcaggctctatgagtgatccgaataaatcataccattttgaaattgtatgcacgatttcggagattgccgagcagatcaggtcggttatatgcagttttggtcttgacgctaagattgtacgcagaaaaaagtcttatgttgtttatttgaaggaaggatctcagatagtagatatattgaatgtaatggaagcgcatgtagctcttatggaattggagaatgtaaggattctgaaagagatgcgtaattccgtaaacaggaaggtgaactgcgagactgccaatattaataagacggtgtccgcggcggtaaaacaagtcgaggatattacatatctcagagatatgatcggttttgaaaatatgccggataatctggttgaagcggcatatgcaaggctggatcatcccgacgctacgttaaaagaactgggagagagtcttactcctcctgtcgggaagtcggggatcaatcacaggctgagaaaactgagcgaaatggcagagagtctcaggcagaaacaaggaggattattatgattaagacacctgttgtagtaaagacggaagaagattttgatggacgtccgatcgcattgcttgttcaggaagcaagtcagtacgcaagtacgatttatattcaggtcggagagaaacacattaatgcaaaaagtattatgggtatgatgagtctgagtcttgccgatggggaagagatcactgttgtgacagatggagaagacgagcagcgagcggctgaaggtataaaaacattttttgcaaaaggcagaaaatagagtggatggataaaacgaataaaaggaggagggctgtacatctgtgtgcagtcctctcttttcacgagatggaaataacaaagtataggggcggtgacgcagtatgaaaaaaatgttatttatctataatccgaatgccggtacgggaaaattaaaacctaaacttgcggatgttttggatatttttacgaagagcggatatgaagtgactgtttatccgacacagaaaagatatgatgcggctgaaaaaatacaagaaagcgggagtcagtatgatctgatcgtatgcagcggcggagacggtactttagatgaggcggttacaggaatgcagctttgtaactgtaaagttccgctgggatatatcccggcggggacgacgaatgattttgcgacaagtctcggcatcccgaaagatattcttgaggcggcggagacggcggtaaacggaacggtcttcccgtgtgatgtagggatgttcggggaagattattttgcatacatcgcagcgttcggactgtttacggacgtgtcttatgccacggatcagaatgtgaaaaatgttcttgggcatatggcgtatattttggaaggcgcgaaaagagtgtttaatattccgtcttataagattaagatcacgcatgacggcgaagtgatagaggatgagtttatattcggaatggtgacaaattcccgatctgtcggtggattcaaggggattatcggtccggagatcgtatttgacgacggagtatttgaagttacgctgatcaagacaccgaaaaacgcaatagaattgaatgaacttctcggcgcgatcgtgatgaaacagttagattcaaaacggatgtattcgtttaagacgggagaaattaagtttgagtcagaggaagaaatcccgtggacgttagacggagaatttggcggggcgcacaaagaaattaccgttaaagataagaagcaagccgtgcagatcaaagttgactcagaggtggcggcaggtttatcagtggattccgaaaaagtaaaaaagtaaaatgtaaaaaataaatcaaaaaaattaaaaaaatacttgcatatagtaaaaacatatgttatatttatattcgctgtgaggaacaccaaacagcgaatataaataaggctccgtggtcaagcggtcaagacgctagcctctcacgctggaatcaggggttcgattcccctcggagtcatttggaaagtccgtatttacggactttttttattttgccaaatggattcccgcgactgttccgtctgcgactgccgttgatacttgacgtacttgttttactcggatatctccgactgcataaactcctgctatgtttgtttccatattttcatcaaccgggataaatccgttatctaattctaattctgaatataactctgtattcggtgtcgttccggcgtagacaaagataccgcatccgcagtctgcgatcttttcgacagaacctgtcttttcatcggaaatttccaacgcttctacctgttctgctccatatacggcgtgaagtcttgatcctaaacgcagttttatgtttggagtttgttctgctttgtttttaaactcctcaatgcagccgagtgtatcttcaaaatgaatgatcgtaacttgtttcgcaaattttgataaatacagagcttcctttacagctccgtccgcgcctcctacgacgtaaatgtttttgtctgtatattttcttccgtctctttgagcgttcattcccatccctttgccggtaagttctgcttctccggggatgttgagttttctgggggttgtaccgtttgccagaacgattttttttgcatcataggcgccgtcttttgtgaacacttttttaatgctgccctgcagctcaacttgcgtcacttcttcgtatatgatatcaatacctgtattttctgcctggattttcagtctcttggcaaaagaacttccggtttcttctgtcataattcccgcataatgggtaacggtagatacttttccgatcaatcctcccacggtgtttttttctgtgatcaacactttttttcctctgcttgccgcataaattcccgcgctgatccctgccggtcctgctccgatgatcactacgtcatacatcataacttcatcctcttttctttcataaattgcattttaaagtgttcccttaattcatactatacacttggatagttattttgtaaaattataataaactatatattcataaatatttattatgataataggcattatataaagagcggattatggatattttcaaaatataatatgaagaaaacagtattgtaaaatcgttatgagagcgttatttgaaatttcattcgtgacgtctgtaatataaatcgaattttgattgtctttttttaagagataagctataatgaacgcagagcttaaattaacattttcggtcagatgcagcttgcttatgagatgtatctgcgcggagaagagaattggaggaaaacaatatgttagtatcagcaacagaaatgcttcaaaaagcaaaagcaggacattatgcagtaggacagttcaatatcaacaaccttgagtggacaaaagcaattcttcttacagcacaggagtgcaactctccggtaatcctcggtgtatctgaaggagccggaaaatatatgacaggatataagacagttgtaggcatggtaaacggaatgctggaagaactcggaatcacagttccggttgctctgcatcttgatcacggcagctacgaaggatgtatgaagtgtatcgaagcaggattctcatctatcatgttcgatggatcacattatccgatcgaggagaacgtagagaagacaaaagagctcgttaagatcgctcatgagaagaacatgtccatcgaggcagaagtcggttctatcggcggagaggaagacggagtaatcggaaaaggcgagtgtgccgatccgcaggagtgtaagatggtttccgatctcggaatcgatttccttgcagcaggtatcggaaatatccacggaaaatatccggagaactgggaaggattaagttttgagactctggatgcgatccagcagcttacaggcgatatgccgctcgttcttcacggaggcacaggtattccggaagatatgatcaaaaaggcaatcagcctcggcgttgctaagattaatgtaaatacagagtgtcagcttgcgtttgcggcagctacacgcgagtatgttgaagcaggaaaagaccttgaaggaaaaggatttgacccgcgtaaacttcttaaaccgggtacagacgcaatcatggctactgtaaaagagaaaatggaattattcggttctatcggacaagcttaagcagcggcgcagcatatctgacgtctgctttcggcggctgaatttttcaaaaaaatacttgccttttttagttggcggagttatactgactgacagagacatgaacaggggcgttccagcatagcatggagtgccctttttgtaatagcaacgagctaaagcacgggagtgccagagatcttggcggctgcttacgatcccggaatgttctcttcggtgcttccggtgatttatggtatgccataatcttttttgtattatattgtaaaagcagtaatacatagagtagtctgatacaaaaaagcgttcatgcagtcttgttaaaaggtaggaaggaaaggtgaattatgagtacagaagcaatcaatgtagctgaaatttttggacagaatgtttttgacgatacagtgatgcaagagcgtctgccgaaaaagatttacaaaaatctgaagcacacgatcgaagagggcagggaacttgatctggagacggccgatgtcatagctcatgagatgaaagagtgggcgattgaaaaaggcgcgacgcattacacacactggttcctgcctttaacaggcgttacggcagaaaagcatgattcatttatatcggctccccagccaagtggaaaagttcttatgagtttttcgggaaaagaattgatcaaaggagaaccggatgcttcctcgtttccgtcaggaggattaagagctacgtttgaggcaagagggtatacagtgtgggattgtacttctccggcatttataagagaagacgcggcaggcgcgatcctgtgcatccctactgcattttgttcttataccggagaggcgcttgatcagaaaacaccgcttcttcgttcgatggaagcgctcgatacgcaggcaatgcgtctgcttcgcttattcggaaatacaacttcaaagaaagtgacgccgtctgtcggtgcggaacaggaatatttccttgtagattcagaaaagtttcttcagagaaaagacctgatctatacaggaaggacgctgtttggcgcgatgcctccgaaaggtcaggagatggacgatcactatttcggaacgatcagacagagaatcgcatcgtttatgaaagatgtaaacgaagaactttggaaggtaggcgttacggcgaaaactcagcataacgaggctgcgccggctcagcatgagcttgctccgatctatgcaaaagcgaatattgcggtagaccataatcagatcgtgatgcagactttgaaacgggtggcaagcaggcacggaatgaaatgtctgctccatgagaaaccgtttgcaggggtgaatggatcgggaaaacataataactggtcgctgataacagacgatggcatcaatatgctcgaaccgggaaagacaccgcatgagaatattcagttccttcttgttctgacatgtgttttgaaagcggtcaacagacacgcggaacttctcagagaatctgcggctgatccgggaaatgatcaccggcttggggcaaatgaagcgcctccggcaattatttccgttttccttggagagcagctcgaggatgtgatcgatcagcttgtaagtacaggggaggcgacacatagtttgaaaggcggaaagctggagacgagtgtgcgtactcttcctgatctgatgaaagatgcgacagaccggaacagaacttctccgtttgcatttacgggaaataaatttgaattccgtatggtaggttcgagagactcgatcgcatctgccaatattgtgctcaatacgatcgtggcggaagcgttttcggaagcatgtgatgttatggaacaggcggatgacgttcaaaaagcgatccatgacctgatcaaggaatatgcgatcgagaaccagaagatcatttttaacggagacggatattcacaggcatgggtagaagaagcgcaaagaagaggacttccaaacattaagtctatggttgagtcgatcccggcgcttgtatctgataagtcggtagaactttttgagaaattcggagtatttacacgcacagagcttgaatcccgcgcggaaattcgctatgaaaattattcaaaggcgctcaatatcgaggctcgtacgatgatcgatatgggaagaaaacagtttattccggcgatcattaaatatacaaagacgctggcggatacggttaattcggtaaaagccgcaggtgtggatgccagtgttcagcttgcgacgcttgatgagattaccgtgctgctcaaagaagcaagccgcgctcaggcacagcttgagaaagtgacggagacggcttcttccatggacgacggtcctgataaagcggcttattattatgagacagtgtgccctgcaatggaggatctgcgtgcgccgatcgacaagctggagatgatcgttgataaagaggcatggccgatgccgtcttatggagatctgatatttgaagtataattagaaacaatgttcttgcgaacgatgtttcgataaagtggaaacagagactttttgagatatgattccgaaagcctctgtttctttttataattgacatctgaaaaatctcggggcatacttattgcagaaagaagagctggagactgtattattaccggaatgcggcaaaaacacacattgtccgaaatgaaaacaggaggttgtactatgataggaggacacttattacacggtggagactataatccggaacaatggatcgaatatccggagatattggaagaagatttaaagttgatgaataaggcaaatgtaaactgtgtgacgctcggagtgttttcttgggcggagttagagcctaaggaggacgtttatacgtttgaatggctggaggaaattatagataaactccgagagaggaagatacaggtagttttggcgactccgtcgggaggaatgccgcactggcttacacaaaagtatcccgagacgcttcaggtgcaggcggacggtacggtaaacctgccggggaagcgccataacttctgctattcctctccggtcatgaggcggaaggtaaagcagatagaccgggctcttgcgcagcgattcggaaagaaagaaaatgtgatcctctggcatatttccaatgagttcggaggaaacttcaaagattccacatgtcattgtgaaaaatgtcagaaaaagtttcgggaatggctgaaaaacaagtacggaacactggataagcttaatgcgtcgtggtggacgggattttggagtcacaaatatacagattgggatcagatccacagcccttctccgcagggcgaatgtctgacgacagcgttgactttagattggaagagattttcttccgagcagattacagatttttgcaaaatggaagccgatgcattgagagaattttccgatcttccgacaacgacgaatatgatgggatttttcaaaggagttgattacaatactctgaaaaatgcagttgatatcatatcatgggataattatccgttttggcatgagagaaaagatgaagtgccggaggcggtatatacatctgcgggtaatgctcttatgagaagtctgaaaagagagccgtttcttttaatggaaagcacgccctcttctgtgagctggcgttctcacaatccgctgaaaagaccggggatgcacatgctttcttctatgcaggcagttgcgcacggagcagattcggttcagtattttcagtggagaaagagcaggggcggctatgagaaatttcacggagcagtcgtagatcataagaacggttctgatacgagaacatttcgagaagtgacggaagtaggaaagcggctggagcacttaagcggcgggatcaaaacttttttaaacagggcgaaagcggccattgtttttgactgggaaaactggtgggctgtagaagacacgagcggaccgcgtcaggatcttgattatgtgaaatgtgtgacggatcactaccgtgcgttttgggagtgtggcttggacgttgattttgtaagtatggacgatgatttttcgggatatcggcttctggcggcgccacttaattatatgtataaaaagggatattccgaaaaggtcagagcgttcgtggaagcgggcggaacttatgtgacaacgtatttcagcgggattgtaaatgaaaccgatctttgttttataggacggcatccgttggaagatgtactcggggtggtttctgaagaaatggacgcgccgtcaaaggagtttgagaattgttttgattataacggaaaagaatatccggcgtatacgatgtgtgatatcgttcatgcaaaagctaagacggaaatttactctgtttataaaaaagacttttataaaggatgtccggtagtaactgaaaatgcatatggaagcggaagggcgtattatctttcggcagaatcggatcagaggtttctaagtgcattttataaagatgtgtttataaaggcgggattgttgaaagaagcatcatctgccgaccgcatattaaaacgacttccccatggcgtgacggctgcaaaaagagaggatgagacaggaagaaaaggtcttgtttttgtgatgaattttaatgacaggcaggttcgtttggaaggcattggaaagcagattgatgcagaaagtggagaagtatatgaaaatgtgttggaaatggccccgttttcatgtacgattttaaagttgaagtaaagcgtcagtatgaatattgtcaggcagtgaaatcagaacattaagataacggcagacagagtaaaagaacgtaaaacgtaagccgatgcgcggcgcgggaaaatagtggaagaaaggaatcgagaaaatgcagtcagcagcagatttgagaagtttattgaacaggatcgatcatcgtggatatcctgcttataaagatacgaaaggaacatatcggtttccgggatatgtgttgtctatagatcatgtacagggagatccgtttgcgtctccgtcaaaggtgagcatacatgtagaaggaaaggcagcggcatttccgagtgatctttactgtgggaaagatcagcggatcgcgcttcaggatgaattgacgcgtcagtttgcaaaaaaggcggatcagtttgcttttcaggcaaaaggttcgggaaaaagtgggatgatcgctgtaagccgctgcgggcaggaagttttggaacgtacggcctgcagacttgatccgaacagtggagatatcattttgcggatggaaatcggttttcccgcaaacggaagaacgatcaatgcgcgggagcttgagaagatcctgtttcagtttgtgccggaatgtgtaaaggcctctttgttttataaaaatgcagatgcggcccgtctgcgtaaaattatagatcttgcggaagatcagaggtatataagagatcagcttccgaaactcggactttgcgcttttgtggcaaacggaagcattcttccgagagagtccggcgtttcgtctaagccgatgcgcggcgcagtaaagtttcagtctccaaaggagcaggaagtgacgattacacttccgcatgcgggagtcataagcggaatggggatcaaaagagggatcacgcttattgtgggcgggggataccacggaaaatctacgctgttaaaggcgttggaaacaggagtttatccgcatgttgcaggtgacggacgggagtatgtgatcaccgacgatacggcggtaaagattcgcgccgaggacgggcggagtattaaaaagacggatatttctatgtttatcaacgatcttccaaatggaaaggacacggttttattttgtacggaagatgccagtggaagtacgtctcaggcggcaaatgtaatcgaaagcatggaagccggaacttctctttttttgatcgatgaggacacaagcgctacgaattttatgatacgggatgaactgatgcaaagagtgattcatcgggagatggagccgatcacgccgtttatcgagcggataagagaattgtatgaaaaacaggggatttccaccgtgatcgtagcgggaagttcaggagcttatttccatattgcagatacgatccttcagatggatcgatacgagccgaaagatattaccggatatgcgaaaaaggaagcggaagcatttcctgcgatcagtctttctcaagagccggcgcggcagcctgattttaagagatgtccgatcgcaaatgcagatttaaaggggaatgaccggatcaagatgaagacgatgggaaaagaagctgtcatgatcaacaaagaaatgatcgatcttcgctatgtggaacagattgttgacagcgaacaggtgacagcgctcggatattgtatgcgatatgctcaaaaacatcttatgaacggaaagaaagatcttcgtcaagtgatcgcagagatggaaaaagttatagaaaaagagtcgcttgatgcgctctgtgagagcagatcaagtatcgcatgtatggcgatgccaagagcgcaggaaatttttgcctgctttgacagatacagaaaactgaaactttaataagcgtgttttcgcagaaaaagaaaacgatcaggatgaagcggaaaggaacagtaaaatgaaatttatacatttatcggatctgcatatcggaaaacatctttatcattacaatatgaaagaagatcaggaacacattttggaggaagtgatcggatatacagagaagcttcggccggatgcggttgtgatcgcgggagatatttatgataaatctgttccgtcggcagaggcggtcgcagtgtttgacgattttctgacacggctttcatcggtaagccctcaggtgtcgattttgatcatcgcggggaatcatgattcggcgcaaagacttgattatgccagccgtctgcttggaagccgcggcatctatattgcggggaaagcgcctgagacggaaaaagaacatttgaaaaaagttgtattaaaagatgagtatggtccggtgaatttttatctgcttccttttttgaagccgggatatgtaaggttgttgtgtgaaaacgagacgccgggcagttatacagaggctgtcgatgcggttttaaggagagaggatatcgacttttcggagcgaaacgtacttgtatctcatcagttttatacaggaaacggcgagactccggaaacgtgtgattcagaacttttcagtgtcggcggaattgataatgtagacatttccgcaatcagccgatttgattatgcggcgcttggacatttgcacaaggcacagagagtgggggcggaacatattcgatattgcgggacgcttttgaaatattcggtcagtgaagcggacttagaaaagtctcttcatcttgtgacgatagggcagaaaaaagaggcggtcacaatcgaaaaatttccgcttcatccgctgcgggacgtacagaaagtgcggggatgtctttctggaatcttaagttcggcagatccgaaaaagcgggatgattatgtgagcgtgacgcttacagacgaaatcgatccttatagaccgaaagaacagttggaaaaagtgtacagccgtattttagaagtgcggacggataatgaacggacgcgtaaaaaacttgagtttaaggatgaggatatccgcatggaaaatccactggaaacattttcggatttctatgaagaaatgcatggaagaaagatgtctttagaagaggcggaaatgatgacgcagatttttgatgatgtgaaaggagaagaaagatgagaccgatcaaacttacgatgtctgcgtttggttcttattccggtatggaaacgattgactttacgaaaattcaaggcgggctgtttctcgttaccggcgataccggagccggaaaaacaacgatcttcgatgcggtgacatatgctctttacgacaggacaagcggcggacggcgcgacggaaatatgatgagaagccagtatgccgacgacgaggcggaaacattcgtggaatatacgtttgcatatcgggacgggcagtatacgatccgaagaaacccggaatatatgcgcgcgggaaagcggaaaaatgcagacggaaagatccgccttgtaaaggaaacgtcaaaagtcagcctgatcatgcccgacgggaaggagtttcaggggaaaaagcgtgaagttgatcagaaaatagagcagatcatcggattagacgccgggcagtttacgcagatcgctatgatagcgcagggagacttcctgcggctgctgcatgcggaatcaaaagagcgaaagaagatattttccaagatttttcagacgcagatatacagagacgtccaggaacaattaaaagagcaaggaaaagcattgtatatacagttaaaagaaaatgaagccgatattcggcgtgagatggagcgcgtcgatgcagacggatcgaaggtgcaaaaggtgtgggaagatttgatttcccaggaaatgccctcggcagaggctgtaacagaaacgctcggccggatattaaaagaaggaaaagaagcgtacgaaacgatggaagccgaagaaacggcgcttcggaaagaatcggagcagctccatcttatgatcgggaagaaagaggagatcaacaggatcttcggtctgttagagcgaacagaatcggaatataaaagactgcaggaacaaagcgcggaatatgagcttttgaaaaatcacgcgctgttgggagaacgttcggaacaggcgagaagattggaagtgcaggcgcttcgtacaaaggaagatgcacggaggatcaaagaagaaatcgttactctgaatgagtggatggaagagcacagtaagcgggagaacaggctgaaagaagatgcggagcaggcggagagtgagatggatcggatcgaaccgaagcttcgagaacagatcgtgcgtttgcgtgagattcttcccagatatgcaaaagtacggaaattaaaagcagagtatgagaaacagacagttcagatgacacgctgcatagatcagtgtaaagcggcgtcggaagattatgaagaaaaatacagaatctttttcggcgaacaggcggggattcttgcacaagaacttaaggaaggttctccgtgtcctgtgtgcgggtcggtgcatcatccgcataaggcgaaaatttccgaaggcggagtcgatgaaaagacagtagaagaggcgaaaaagatccgtgatgaagcggagcgaaagagagcggcggcacaggaaaaatatcaggaagttcgcgcacaatttgaaacagaagaaaaagcgctttttggagaaaggtattctcgggaagatgaaaaacaggcggaagaccggcttgcagaatatgagagcctgcttgcgcaaaaaagatcgaatttgaaaaagcttcaggacgcatacagaaaaactgcagaagaaaaccaacgtcaggcagggcgggcggaaaatctggttttacagaaaacggaactggaagagcggttcgagcaggaacaggaaatgtttcgtcaggagatacgaaagcagcggtttgcggatcaggaggaataccgggaggcgaaaaaatggatcgaaggctggaggcagatgaacgatcaagtaaagacgtatgaaagtctggtcgttcaaaagaaaagcagtgttgagacattgaaaggtcagttaaacggtaaaaggcggcaggagacggaaagtgacgtcagaaagaaaaatgagacagatatgcttttgaaagaaaagaatgtgcgaaaactggagattcacgggaaaaatattacccatcaaagcgcctgtgacagccttaaaaagtattttgcggcagaggaggaacttcgggaaaagtatgaagttgtcggtaatctgagcaggacggcgaacggaagtttgacaggcagtgtgaagcttgattttgagacgtatgttcagagaaagtatttccggcagatcatacaagcggcgaaccgaaggcttgccaaaatgacttccggaggatttatcctgcagtgtcgggaattgaaagatttaagcagtcaggggcaggccggattagatctggatgtgtacgatctggtgacagattctgtccgcgacgtaaaatctctgtcaggcggagaatcatttatggcggcgttgtcaatggcgttaggacttgcggatatcattcagaacacagccggagcggtgagtttggagacgatgttcgtagacgaaggattcggttctttggatgatcagtcgcgggagagggcgatccgtatcttgaaagaacttgcaggagaaaaaggacttgtaggtatcatttctcatgtcaatgaattgaaagagcagatcgactggaagctgactgtgacaaaaagcggccatggaagccatgcccgctggatcatataagacttttataaagctctttttaaataccggatgctgtatgcgggcaggacgagctgtccgttaagttcctgtacggaagtgtccttgccgcttgtgatcgtttcgttttcaaaggaaaggatctgttcatatgtgccgtttaactcatggtgtccggctgtgaattcacagtcggatgcgttgacggcaacaaggaattgctctttttctgttttgcgctcgaaaataagctgatgatttgtaataacgatatttcgataagaaccgctgcacagcgcatcgctttctctgcgaagagcgatcaggcggcggatcagatcggtgagatcgtttggcttaggcgcatcgaaacaaggccttaaggcataatcattatcaggtgatttcgttccttcctctccccattcgcttccgtaataaatacagggaatacccggcataccgaacaaaagtccgtaagcaagggggatatgccgcttgtttgtcaatatggaagcaagccgcgtgacgtcatggttatctgcaaaagtcatgagatgctttcctctgtaaatgcaccactgctccggtccgtattggcggtttaatgagtgggcgatctcgaacaagttcatgctgttaaagctggaatataatcctttgtaacattcgtagttcgtgcagctgtgaagcatttcgttgttgacgatcaggttgtagtctccgaataaaacttctcctacaagagcgaatcccggcttaatctcttcgcagaaagagcggaggcggcgcatgaagttatgatcgagagaataagcgacatcaaggcgcagtccgtcaatgccgaaagtttcgatccacatttttatgcagctaagcagatggtctgtgacggcaggattttgcaggtttaacttcacaagttcgtagtgtccttcccagccttcataccagaagccgtcgttatatgcgctgttgccgtcaaaattaatataaaaccagtctttatacggagaatcccatttcttctctaacacatcctgaaatgcccaaaaacctctgccgacgtgattgaataccccgtcgagcatgatcttgatattgtgcgaatgaagcgtttcacatactgtttggaaatcttcgttcgttccgaggcgacagtcgatcttcgtaagatctcttgtgtcatagccgtgattatctgattcaaaaatcggatttagaatgatcgatccgatcccgagctcttcgagatatccggcccagtctgcaattttcaaaatccggtgcattgtcacgccgtcattgtgcgtcggcgcgccgcagaagccgatcggataaatctgataaaaagtttcattgtaagcccacataatttcagtcctttcagttattatatttttgctgtgatcagatatatgtttcctcgtaaacggacatctgtacagccaactgttgataggtagattgtaacatatcaaggcagaattgacattaaaaagtgtagtagatatactgaataaaggcacaaaaacaaagataaaggaagtaaaaacggtaaaaaatgagtttgatggaaaggatccccaaagatttttataaattattttcaagtaaatatacggattactatatgctgtttctcacggcaatctatgaggaaatgagtctgtcttattccgtgcttggattgacggaaaaagagtgcagggcagttatgaatgaaaagatcgcggcagcggctcttctgtgggatgaggaaaattatgatgaagagggagagtttcttacacgttctaatatggcgtccgtgtgtctgaaacattttcaggagtggggatggctgaaacaggactatgacgaggctttgaacagttacgttgtgacatttcctgaatatagtcagatgtatgtggagttgtttaggagtctgcttgatgaacaagagagcgaagagcgggaaagcgttatgacgatatacagccatctgtatacatatagttccgataaagaaaaaaataatgagattttaaaaagcgcccttcgtgtttccaaaaagcttgtgcagatgcttgtaaatatgcaggacggtatgagagggtattttgatgaactgtcccgtcagaaagattttcggggaatacaggacgtccttgtaaaggagatcaataacagtgacagccgaaaatatgcgatcttgacgacaacggacagtttttatcgatataaagaagctgttaaagaactgcttgacagaaatttacaggaaaatgatatgagcaggctgaaactgttgcgggaactggaagaggtccgtcaaaagaagatgaaagacgaagaaaacgcgggaaaagttaaagatccgaaaaaaacagatgaggcggagaaaataaaagaactgcggctggaacgggcggcggcaatgtgcgaggaagcggcagatacgctgatacgaatcgaaaggcagtttgatgcgatcgaaagaagatataataaactgatcgaacagaagacgatttttgcgtccagggcggctgcgagaatacggtacgttcttcaggaaggagcagaagaagaacgtacggttgcgcttgtagatctgttgaataaaagcaggagaaaagaagaaatatcggaaaaactggcggagcgtatccgccttagcagacctcacagagcgttgacggatgaaagtctgtacaaacggaaagaaaaagggagagaagcgtttgttccggctactgtttcggaaggcggacaggcggaagaaaatttggagtcgtttgtcttaaaaccgctttatacaaggaaagagctgcaggagttcaaagaaagaaacagtgtcggaaacgtatttagaactacgcggcagacggttcggtcggctgaagatttggaaaaattgttttttatatggcaggaagcgacggaaaatgcgtttggcagtggggagatcaccgtaggagaggaagaagaaaccgaacagggaatgcgtttttcaacgctggaaataagagaggactaagtcatgtttgagtatttggaaagtatttctatcacagaaggggaacagataaaaaagacgatacaggcgttgtttcgccagacatgtattttgcaggtgaaatatgatccggcaacacttgtgccgaaagataatgtacagtatgaaatctgtgtccggcacagacattttatagaagactatctttcgctacttggatgtgagcttacgcatgatgcacaagagcatattttctgtttgacaggcgacggagctgcaagggaaaaactgaatatgacagaaacggtgatccttcttatcataaaactgatctataaagataaaattatgggagaagggttaaacgctcctgtgacaacgctgaaagaaatgcgcgaatacggaaagaatacgaacctgatcgtaagaaaattgaaggcagatgaatggaaagcttctctttatctgatgcggcttcatcagatcatcgacgtgccgggagcggtgagggacgtagaagacgatacgccgatctatatttacagtacgatcaatctgtatgtgacggcgaaagatatgaatgatttgattgaagaatatagagaggaggcagacggatatgaaacagccgaagaaaatttttacaagaatgctgatcaataactggggcggcatcagccataaaatgttggaattccacgagtatgtgaatcttttcagcggaaagagcggatcggggaaatcgacggttatggatgcgatacaggttgttctgtatgggagtgtgtctgctaattttctgaataaagcggcagatgattctaaaaacaagagaagcgttttaagctatcttagaggagcgcaaaaagacggaacggcaaacaggggagacgttgatttttgttcacagattgttcttgagattgaagataccgccactcatattgtgacttgtgtcggggcggcgttcgaggtggcaaaaggggatacggatctgaaaaaatatacttatttcagtcattcgggaagaattccaaaggatgaatatttggaaaataacgtaccttattcgatcgcacagattagaaaacttacggaagaaagaagcagaagcgccgataacagaggccggggtgaagtaaataaagtgtatccgtcgaaagaagcttatctttatacgctgtacggggaaatcttcggtcaggtagaacaaggtcgtatgatcacgatggaaaaaagcgccattgctctgaaaatgacgagtggaacaggtcagtttataagagattatatgtttccgaaaacgaaagaagatacggtggcgacgatcagtgaacagcttggcgcgtacagagagatcaaagaacgggtggaagatctggaaaaacggatcgaaatgctggataagatccaagtatatgacagagaactgacgaatgtgcgtgcggagaaagtacgaacggaaacagtgctcaaatgcattgatatcgaggaaaatataattcgactcaaaggacgggaaagtgagttggaatccgttgaaaaagaagcggacgaggcgaaaaaagaacagaagatacttcaggacgaactgcagacgatacgggatgaaagagcccgggtacaggcagaattaaataacagcgattatggaaagaaagaacaggaactaaaagatttagaatacagaattgctcttctggcggataattcggcacagtggcggcagatcgtgaaaggattgaaacgatgggaagaagaggatgttgtcactgattatgtgagcaacagagctcttcagcttattcaggaaatacgaggcggagcgcttacggaaaagttatgtaaagaactgaggacacatcttgacttggcccttgataatattacaaatgaattgtcggaacttcgtatttcgatccatgaaacggaaaaagacatcaaagaaaaacaagatgctgtcgaagatctccaaaacgacagaaaaccgtatccgttggaattgaaaaaggcgagacaggaactgcagcgtgcgttgagcgacaggtacggaaggaaaatcgaagttcatattttcgcggatttgtttgatattacggatgaaaaatggaaaaatgcgatcgaaggacggcttggcaggattaaaaaaagtatgattacagaaccggcatacgctcttgatgcagcgaaaatatttcgcaggatgcagcagtttgaagaagttgatctgatcaatagtgaggcggttcaaaaggattctccggaagcggacgaaaactcgctatatgaagcggtacacgcagaaagcggatatgttgaccggtgcttgaaacgttatcttggaagaatacaaaaatgtgagacggtggaagagttaagtacggtaaaagacggagtcacaccggattgttattcgtacagcggatatatgttccgccatctgcgcaggaaggattatacgaaaaatgcatgtatcggtacaaaagtatcgaaggcaaagctaagagagctgcaggaggaaattatagatcttcaaagttcgctgatcgcagatcgtcagacggaagagtcgttgaaagaagcccggcaatttgaacggttcggtcaggaaccggaacatttgatgcgtcttgcgggtgcggcagacgaactggccgatcattaccgccgccaagaccggctcaaagaagaaatcaaagaactgaaaaacggaactttggcagcagaactgcaggctaaaacgaaagaacttacaagccggattgaagaaaaagaacaggcggcaggaagattaagagaaaaagaaatcgaaacagggaagaaaaagggcaaactggaagagaaaattaaagcgctgaaagaaagactcgattttttgatgaagggatatgttccgaatgatgagatatttgccgaagtgaggtcggctttggaaacgaagagcgaagcggcttataaaaaagagatgacagtgatggcggagaggctttttgagaaagaaacaaaacttcaggatgagcggataaaatcaagaaatgcatttaacaatacatatcccgcatatggattttcaggtgtagaacatgacaatgaagtttacgacaaagttttggagcgatgcagaaaagattttgagccgaaatataaagaagaatttgaaaaacaatacgagctcgtgtaccattctctgcgcgataacgtgatcgcaacgatacacggggaaatcaagtcggcatacagacatcggcgtcagatcaataaaatgctgtcgcagatccgtttttcggacagcatttatcagattgatatctctccggcaaaaaatgaaaacggacagttttatgagatgcttatggcagaagaactggacagcaaagtaatagatcatagtgggtttgacggtcagatgagtttgatggaagatgaatttttcagaaaatatgaaaggaagatcggacttcttaccgagaaattcatgccgtccagagaggaagacggggcagggcgtgaaaagcacaaaaatgaaatggaacgctttgctgactacagaaactatttggactttaatatgtatgaacaatctatcgatgaaaacgggatcgagaagaaaaattatgtggacgacatggcgggcgtcgattccggaggagagggacagaacccgaaatatgtggcgcttcttgcaggattcgcaatgctctatatgcagcagagtaatcgggattcaaagattcgccttgttcttcttgatgaggcattttcaaaaatggataaggagcgaagcgaagtctgcttaaaatacgcaagagaattggaacttcagttgattgtctgcgtgccggatgaaagacttcagtctctgatccgaaatgtggacagcgtatacggcttccgcaggtttagaaatcaggttacgatgatgcatattgacaaaggaaattatctcgatatgatcgcaggggaaagcagatcggaagaggtgtagaaatgtttttggatgatggagcaatagttaaaagttgataaaaaggaaggaaaatgttgaatcgcatatgagcggcaatttgttggcaaagtggattattgggaaagcggaaaaaagtgaagcttatcgggcgggaacgctgacaggcatgaaacatccgaaaccggacagagaaatgatcaagacagcaggtggcttgcctgagctgatcagacaggctgatgagttggagaaaagcggatatatccggacagaaaaaagcaatctgggcgcggatatgaaaaaaatctattattccatagatgtcattccaaagctgtgcgaaaaagaaggaattgaagatccaagaaagcagcagcttcgttatataaaacaaatagaacaactgcgcgctgaggtacaaggcagttttttggaaggttattatgatgagatcataagacggttggaacttggggagatcgtaaaatcacccgatatggaggacgttgattttttccgatgtttgaatgcagttgtgaatttgaaaaaatctctgtggatgcgcgtattcagtgctgctgtgcttaatgactctaagcgtttaaaaaaagattatgagaaaaaagtggtgaaagtactggtcagatcacctttgtatgaagaggggatgactgacgatgagatattaagcgttcatggaattctcagttatgcacaggtgatggaatggaaaggtccgcttctgtataaattaaagggcggacaggagtatatagaagataaggcgagggaaaaggaatatgaaatagatacatctcaaaatcaatacggaacagtgattaattcgcagacattggaacgtgcctttcccgtttctataaaaggagtccaaagaattgtaacgattgaaaataaggcaaattatgaagaaatgaaatacagagaggatacgctttatctgttctgtcatggattttattctccgaaagaacggatttttttgaaaagattaatggaagtggcggaaggagagatacagtattttcattggggagatatggatatgggaggcattcgtattttccggtttaataagaaaaatatttttccgaaattgaagccgtataaaatggatcgagaagcatttcaagaagcgcttgaaagaggagcgggcattcctctggaagagaaaaagaaagaaaaattggaaaagcttaatgcgggagaattagaagagcttaaaaagtgtattttggaaaaaggagtagaaatcgaacaggaaattttattggcggaaaatgcgatagcggaaaattgaaaaaagtgctgagaaatgcaggggaaacgataagatttgtaaatagtatgatagattttgtgaaaataaggaaagaggttttataaaataagggaagaggttttacaaaaaagcttgacatgtgtgagagcagggattataatattacagcatgactaaaggagaaacagtatacgccatagccccggagtgtgctgatttcacatatacaggcaagtaaatgttatctgatgattttataggaggaacacccatgaaaacttatatggctaaccctgacaagattgaaagaaaatggtatgtggttgacgctgagggatgtacactcggacgtctcgcatctgaggttgctaaagtgctcagaggaaaaaataaaccggagtacacaccgcacattgatacaggagattatgtgatcgttgtcaatgcagcgaaagtaaaagtaacaggaaagaaacttcagcagaagatctactacaatcactctgattatgtaggcggaatgagagagactacgctggcagagatgatggctaagaaacctgagaaagtgatcgagctggctgttaaaggaatgcttccgaaaggacctatgggaagagacatgatcaagaagcttcatgtttatgccggagcagaacatgcaaatcaggctcagaagccggaagttctgacattttaggtaaaggttgaaaggaggatataacagtggctaacgcaaaatattacggaacaggaagaagaaaaaaatcaatcgcaagagtatatcttgtaccgggaacaggtaaaatcacgatcaacaaaagagatatcgacgagtatcttggtcttgaaacattgaaagttgttgttcgccagccgctcgtggcaacaggaacagcagataaattcgatgtgattgttaatgtatgcggcggtggttatacaggacaggcaggagcaatccgtcatggaatttcaagagcactccttgaggctgacgctgattacagaccggtgcttaagagcgcaggttacttaactcgtgatccgagaatgaaagaacgtaagaaatacggtcttaaagcagctcgtagagctccgcagttctccaaacgttaatttcagttcagcaagagataatcttcggaact

SEQ ID NO: 7664 - DNA, 4495 bp, Unknown
  gut microbiota DNA sequence
tccagttcagggaaaaggatgttaacaaggcgtgagatagaagttttcagttttgctcgttcttgtactttatcaaacctgtatctggttaatgacttaagcgctctttggtctttaccatgtccgcataggcattttcacaggtacaccccatggcatcctcaaaaatggtctcttctgttttttcccggttgcatgcataatcaatggcttcttccaaagaaccggcgctcttggtggtcttcgtccggtccttcacatagtcgatggaacgctccaggcggtggacggggaggacactggtatatgccatctaccattcctctttcaccagacgccaggtctctttggaaatccggagcatctcctgtacgctggcttcccctgccatcccggtgccattggcaacatgggcaagctggttggcattgttgcaaagtcccgcaatctttcgaagaagttctgcatgatgctcacagggctttgtctgaagctgtgcgcttaagatcagggaacgtaaaaattcctccctgcttagtccactctttgcgacctgcccgtccagatgccgaagttctttcgcattcaaacggacaggaactacatggtttcgttttctcattcgaccacctacctttccttcttttatgctgtctctaagggatacacctgaatccccctgcgttccatctgccagaggaattccccgatctcccaaatctgcccattcacatccacctgcttcccatccacaaagcggcagagcccaatctctttcgttccgtcctctgccatcatgcaaaggctttccccatccgaaagggagaacctctctattccttcccgatcccggaaatggattgttttcagttctcccttcttctgtctgcgtatccgcatctgttccatctgctgatcctcctgctttccggcaactacacagcacatgattccaatgccaaaggctgcgcctgccactatcccaagagccattcctgcaaaaaacatttcacttctctcctttctcgactgccgggggattggggttctccccaaagtgcgtttggatatccaaacgctatgcttgccaaaccagttccatcgattcaaatcgactcccccatgcaagttctctttaacgttctctttgatatttcttcactggatggatcaactttttatagtcattcgccattcgacctaaaatacaatatccatcggcaccatccgccacctgattttcatattcctttattggtaacataggcagtttcggatcatcctccttccaaagtttcattccataagaaaggcggggtacagggctaccatctggtgcagagttttgcaaaaggggaagggaaacctacctggaggactgtcatccgcatggatatccgggatgccattggcgtgagcttttcctggagtcagtttgtaaaagaaatggagaagcggggttatacctggaagctgaaccggaagtatccggcattaaagacaccggatatggagaggtatgtccgtctgcgttccttgggaaaaggctatggggaggcagagatccgggagaagatcctgcgtccaaagatccaacaggtgtatggaaaaacacaggtgcagtttccaaagaggaaacttaccggacttcaaaagctgtatttttcttatctgtatcggatgggagtgcttcagcagaagccgaaacggatttcttatgcggtccgttccgatatccgaaaactggatctccgcatccggcagatggagtttttgcaaaaagaggggatcaacaccagggaagagctggcagcataccggaaacctttggaggaacaggtgctttccttaatgaaggagcgaagaacgctataccgaaaagaaccgggcggtatgcggattcaggagatcaacggggaattaaaagaacttcggaagaagatccgtttaagccagcagattgagatccagtcgaaagagatggaagagaggttaaaacaggcaaaggaacaggagcagatacaggaatcgtccgggaaacaacgaagggaagaagaacggaagcggtaaggaggtgagagcgtatgaactatggcggtgatgcggcagatcagattgttcggtattccatggaaggcatggaacataccttacggatcagcgggagcattgcaaagaatctggcggtgctgatcgttgcggtgatgaaggaccagaaaaagaccaggggaaagaccaatctgcttcggatgttaaaggaacagcgggcaatgaaatttttcaccattccccatgacaggctgcgggagtttgccggggaagccaaatccaggggacttttgtatgtggtcatccgggataagaagaacccccagtttcccgagatcatggtgtttgctgatgatgcggcaaaggtgaaccgggtgctggataagatgaatctggactttgtaaaatccgaagccggggaagcggttgtggaacaagcgccagtccgggaaggagagcgtgtgatcgatgcagagtttaccgagaaaaccgaagcaaaagaagaacttccggcaaagaccgaaaaggtggtgctgccggaagggaccattgagttcgaactggatgaagaagagcatctgtttgatgtaggggaagtctctccttcggagggaaattttacccaggcggagaaggcagggaatctgtccggaccttcctcgcacagcagcggttctttttccgggcaggaaactagctggaaaggggagaaaccatctgtccggcaggaattaaaaaagattgaaacggaacagaaacagcggcagaagcaacagcagagccggagaaaaccgagaaatcaacaaagaagggaacagaagaaagtgaaaggcaggtaaggctatggatttaacgaacatgatccctggtggggcaggggaagaaaaaactccacaacagcagttatcaaaagaagaatatgcagccatgaaaaaacagcagagggaagaagtatgggcagaggtagacgcccaggcacaggcggtgttccaaaacggggattctttaaagggatttttagattttatggcacagtgcaatacgcagaaaacacccaaccttctgttgatctacggacagaatccagaagcaacggtggtaaaatcctatgattactggaaaaaagaacaccgttctccgaaatccggggtgcatggctacacctatatggtcagtacggaatatgaaaaagacggggagatgcggacaggctatgccatcggtaaaggatttgacatcagccagatgtctgggaaaccgctggaggaacgtccacagcgttccatggaagaactgatccatgcagtcttaaaggatcagccagtgcggatgcagattgcagacaatctgccggagggcatccaggcacagtatatcccgaaacagcgtaccgtctatgtgcgcaacggaatggatgagaatacaacattccatgcagtgaaccgggaactggcttgtgccgccctggatcagcacgatgggaactatgcaaggaagaaggtgaatgcccaggcatactgtgctgcgtatgtgattggcaagcggtatggggcagaggtgtccggcttccagtttggaaaagtggcagagatgcaggcaaatggacagaaagatccccaggaactgcggggatttttaaatgatgtccggcaggcagcctatactatccgtaaccatatggaacgaaatttcggggaacaggagcagaccttttccaaagatgatttttcttttgaggaacctccaaagcaggcaccgaagaaagagaaaaaagagaaacagccggagcgataggttcttaaaaaagttccgccgttgggatagctattgcagggttcttgtggtatgttgggtgtaacaaagataggagggaacggggatggcagattactatttaaaaacggataacatcatgaaaaatatgtttacagtggcactcaaagatgagctggcagcccagagccggatgggaacggttcacccagagacagaagccatgctgcagaaagtccgagcctatgagctttccgagaaaaggcttcccattataagcgaggaacagcgggaacttcgcaatgccctcaatcggctgcgggacaagtatcttgccatgggcaggtacagcgacggcattgacagcgtgatcttaaaggtcatgaaaccaaacaccagcaggcgcttcttctggtaacagaagggagggatgtctatgagtatgtacgatcaaaaacaagtggaacaattacgaaagcggtatccgaaaggaacaaggctctgcctggactttatggatgagccggggatgccgccgggattacaaggaacggtagcatttatcgatgatgccggacagattcacatgcattgagagaatgggcggagtcttgccatcgttcccggtgtggattcttttcatagggtagacggaccagcaaaggaagtgcca

SEQ ID NO: 7665 - DNA, 17488 bp, Unknown
  gut microbiota DNA sequence
cttctaaaacattatttacagaaaaagtttcacattctcgacattttcataagttattgacaccacgggattcaggcaaacattcagatacaatcgaatttttcattttcacatacagcagatactttttattcacgaatcggggtgatcacaatattttgcggtgcaatttttgtctttcttgtcacaatatcctcgatttgagctcgattcgcatctgtaagttcttctgcttttactacgatatccgcagagtctgcgtcaatacttacaaccgcttccgaaaatccttttgaagccatcattgtctccactgccgcttcctgctctgcaatctgagtcatctgtacaagctgtgataccgcttcttgtttttccgactcacttaaatttgtattatctataattgcctgaagcgtctctttattctgagctcttacctgctcccgtgttacctttgcctgtgcaactgtcgtttctgcgcttccattcgtcagtacagcttcccccggtgttccctctacatcggaatcattacttgcaatctcgtctcctaccgtctctatatcctcttccgaaatatcgagcagctcctgatttgcaagatctgcatttgcttcctcagctcccccgtctttttcatgaaatatttttccggaataattcaaatatcccgccactgcgatcatcaccgccaacgcagctatgataatctgatttttcttaaatactcgtttcacttcacaagcctcctttttatgtatcatccccgtttcattatttttatcttatgcgcttccacaccaaataatgcctgtaccgcttctgtaagattacgggcaacaactgcatcacctcctccgtccgcaatcacaatcaccccttcaacttccggcgtcagttctttgcttacataaggaacagatgctccgtctgccgtctgctcatatacgctgattttctccgacgtactttccgaatctttccgaacattgccgtcggatgtctcttcttgggtctgcgtacttcctgaatgatctttttcaatcaatttctgtccgtttgatttaagcgtcaccatcacggttacttttcctgctcctttcacctgcgacagcacggaagatgttttttcttctatgtatgtttcatattctcccgtttgtgaatttttattttcttttcttttattttcatctaatccgcctttttccgaagtcggggcagaggaaccggtcggaagaacaataacaaacagcagcgcaccaagcaaaaacataatgagaaacatatttttcttcggaaacttttccccgttttttaatgccttaatatactcttgagcctttttcaaatccatcttttatcgactcctttccggcatctgtatccgctttttttgttcctgtatgttcttcctctttattttcttctatataatttttcagcatttcctcataagagttcccggcctcttccagttcttttctttctttttcatatacctgattactgtagattgctccgaatgtttctttcatgccaaacacacttaagaccggcataaaaataagaacgatcaatacaagaccggaaaaaaaacgaatatatctttcataatcttttcccggtaccgcatgaagcatcgccgtcactacaacaagatatactgctatattttgaatccatttatatacttcttcaagcatttttgcctccttttaacgaaacaaagcatacacatatgtattttcagtcctgcactttttgttctttatatagttatcatttttcatatttcatgtagttactccggccacaaccgctattgtaagcaaaaataaaaatcctactgtaaaaataacggaaactatcatttcatacccctcgctcactccgcggatacaagcggtaattcttttgtccgaaaccggctgtaccgctgccgccgccattttatacaaaagcgcagacaacaacatttgcagaatcggaaccgcacatattaaaaccgctataaaagctcctgccattccgattccgtttttaatcaaaacaatcgttcccattgtcacttccgccattcctcccatcacatttcctatccacggaagtgcctctgccgtccttgtaagcgcacttctttttaccgtatctatcgcaggtgccaacagcccttgcacaacattcaccccgacaatacatgcaacgatcgtacgaagcgtccatgtcaccgcttttttcaacagatcggcaaattcagaaaagagatcttcttccgttaagtttccaagcatttgcaccataatataaacatttatcaccgggaagagaaaccttacgatcacaagctctgaaatataaatcagaaaaagaatcaaattataaaaaaagattgaagtcgcgcttcccgacgaaaacgccaccgcaagaaaatatccgggacaaagaactctcataaacgtcgtaagagactccaatttttcactgattccataaaccgccgtccgaaaagacatcaaacaaagcgtgatcaaaagcatatatacaacgtaaaaacttattcccgaaatctgtctgctttgaaaagctcccgcaaaattgctgaatacagccgccataacggcaatcaatataatataaacgagagtttttttgctgtacaaaaactcataggctatctcgtctcttatgtatcccgtaagcaattctaacatttcccccggctctcctgacagaaaagaaaatacaacttcttcaaaggaaattttctcttttggaaacaattccgatagacttttttcaatttctttaaaatcaaactcttcttccaatatttttgtttccgctgtttctatgctttttttatccgattgaaaattatccgtttcatctgcccggacgatccttgtcccgaacccaaatacgagaagcgttaaaaataatgtaaaaagaaatctcccttttcttcctttcatgacagaaactccctgactgtttcaagcaaagctgtcaaaaccggcatcccaagcgccaatatcgtcagctttgcgaacgtttctatctgtcccgcaatcgtttgatatcctgcatctttgcaaattccggaagcaaattccgcaatataagtaatgccgaccatcttaagaattacggaaaaatagcttgtttcaagatgagcgtatgctataagttcttttacagtacgaacgaaaataccaagcctgtctgagatgagcacaaatagaacaatgcttaccgctacgcttacataaatcccgtattctgccttgcttccttttaactggatcgccaacattgcaccgatcactccgatcattccggcctgtatcatgctcatctgctctcacctcttcctcttctattttcattttcttttctcatttcccgcactttcgtttactataatgagaataattgtctgacagtacgaaaaagatcataaatgtaaggaagcacccatgacaacactaaaataagtccggccagacttgcaagaaatgcctgttcttctctgccgctgtgttttaatacctgacttaaaatagaaacaagtattcctactgccgcaattttaaaaataagactgatatccatatttcctcctgctgttatccggtcaaatcaacagcactataaaaaataaacccgccataactccgagacacctgccgacttttaccttcgacgccagttccgctctaagtttctcgatctccagatccattttattcaaatacatttccattgcacgatctgatatatctttttcaaaacttccgagaaatgttccgggttcttttataagtatcttatgctcctgttttaatcccggtatttccaaatacttgtccgtacatctgttccataccctcgcaaaccctgataagtctcgacactccatttcttccgccgtttttttcagccaccttcggtacggttctttcacacgggcagagacgccgaaaaaaatttcaggaagaggtgcgcaagtatattctatctcccccctgattagtccaaatacatatcgcagataaaccatgttccgtaaatatcttttcaattcatttccatacacaacaccggctcctgcagttgcagataatataagaatccctccgatcactttctgcacaaaacactcccccgctcatcataaatctcttttactttccccggatgtccgtcatttccaagcacaatataccgttcaaacatttttctgcgtatcatttcccccagaaccggctttctcgccgcctcctccatatccatgccatgtacactggctatcagtttgcagccacactgcatcgcatattcaatagcatggatatcttctgccgtaccgatttcatccactgccacgacctgaggagacatcgaacgaatcagcatgatcattccttctgctttcggacagcagtctagaacgtccgtgcgcataccgagattgttttgcacaatccccatatagcatcctccgatttccgaacgttcgtctactacgccgaccgaacagccttttacatattcatttccatctgatatctgacgaatcaaatctctgagaagtgttgtttttccacaacgcggaggtgaaatgatcaatgtatggcatacttttttatttttcgtaatatatggaatcaattcatcggcacaacctatcacttcgtgagcgattctgatattaagcgatgatatgtactgaatattttttactttcccacggtcgacgatcacttttcctgcaactcccaccctatgtcctccttccaatgtcagaaacccctgccttaactcattttcatatgcatataaagagtatctgctcatatattctatcgtctcttttatttcttcctttgtaacaatatgtgctctttcttttaacggaagtatctgctcttcaccatcgatcataacagtaagcggctgtccgatcctcattcttatttcctgaagtgctccgccttcacgcaaaatattttcaataattatacgcaccgatctggctaaaactcctgtcacatgtgatattttcttccctgttttttccatcttgtccacctctttacacaatatatgtacatctcccgaaaatatgaatcaaaaaagtttttaaaataacaaaaaggcaactatccgatgtttcttacgaatagtcacctttgttcttacgtctttttttattttcctacaatttttcctatataataaaagcctttgcattcatcaagactcacatccgcaaacgtaccgatcatagattcatctccggggaaatgtacaagcagattattgctcagacgacctgtcatcaacctctcgtcatgctcattgcaagactctacaagtactctttgaactgttccttcatgccttgagcacatttttgacgaaatcgtctgtacttcttcaagaagacgtccgaaccggtcttttacaacatcatccgatatctgatcttccatagcagccgcaggcgttcctgtacgcttagaatagataaatgtgaacgcactatcatattgaactttacacacaacatccagcgtttcccggaaatcttcttccgtctctccgggaaaacctacaataatatccgttgtcagtgaaatatccggtattgcctttctaagcttttccacaagtttaagataatgttcttttgtataacgtctgttcattttttctaatatgcgcgtgcttcccgactgcacaggaagatgtaaatgacgacagattttttttgactgtgccatcacttcgatcagttcatccgaaagatcctttggatgggatgtcataaaacggattcgttcaattttatcaatcttctcgatttctcgaagaagctgtgcaaacgtcatcggatgctccagtgttttcccataggaattgacattttgtccaagcagcattacttctacaacaccgtcctctgccaggcgctcgatttcccttatgattgccttcggatccctgcttctttcacgacctcttacataaggaacgatacaataactgcagaaattattacatccgaacataatattaactcctgacttgaacggatacttcctttcactcggcagatcttctactatcttgtcggtatctttccatatatcgatcaccatttttcctgaattcatccgtgagacgatcagctcagcgaatttatatatattatgcgttccgaaaataatatctacaaaccgataactttttttcagtttttccacaacctccggttcctgcatcatacatccgcacagagcgatcatcatatgaggattcgtttttttaatcctgcctaactgtcctaaacgaccgtacacacgttgatttgcattttcccgaacagtacacgtattataaataacaaaatctgctttttcctcatccggttcttctacatatccgatctgttccaaaataccaaccagcttttccgaatctctcgcattcatctgacaaccgaatgttgtaacgcaaaatgtaaattctcttttttcctcttccttaagctttgttaatttttctttcgctttctctataaaataatattgtctttccggctctgttaccggaatatttctctctgcatctgctgttataaatgttttattttccataacttcctcttattccactcacacaaactgattactgcctgcatcatatgtataatcgatcatctctaatttaccgatcaattcttgtttatcaacctgcatatcttcacacaacacatccagcgtcgaataataatctcttaattttgtatttacaacacttaagagcatcaccggatctcttggcaagcctgccgacatgtgatcatctccttttccgtaataatataatctacaggtacgtcatgcacttccggaacaatctgctccacacattgaaaatcaaatgccactccgacttttatgcaatccgcctgcttcaaatatgagtcataatatcctccgccatagccgattcggtttcccgctctgtcaaacacaactccgggcacgattacaagcagcttgcttccacactttggaatttcccgacaccatgattccggttccggtatcccatgaaatcccgcttttaaatctgccatactgtgaatcagggcaaacttcattttttgctttccggtcactttcggaaccgcagcacattttcctcttctaagcgattcttctataatttcttccgtagggacttcacttccgaaagacgcatagcagcatactgtgccggcgtcttcatacacctttgaagaaaaaaggcgcgccgcgatgatgcgccccgcctctgctctttctttttcagacattgcggcacgaagcgccgtcatcatttttctaatgtccctttttgtttccatatttttctccgagattgatcacacttccgtccttttcttcaatgtcgatattattgagctgacttcttaaatttctcttcaccgagtccatatattctgtccttaaaatcttctgttcttttttctctgcttcagtcaggccttccgctttcgattttctgtataattcattgatccttgctatcttctgttgatccattataatccctttcactttttatcttctatccataataacttcttattttacaggtctgtattatacactatttctttgattacgtccatcgccattttgcggcttttatcattccggccttttccgttttgcttttcaactcgaataattttctaaaaaagcatataattcttctgcagttgcaatttgctttccctgtgcaatttcctggcgcacttcttccggaagatctgacagaggtatttcggtaaattcataaatcgtttttttatcttcaagataaacgacgacaaatccgtgaagttccttaagataaaaccccttttttgctccgccttttactgcctctccttcggccgcaatactttccgtttttccgatgccgtctgccttttgtacatcttcgtttctttcactcaccttttccatatacttgtccatcgtataatcatatgtcattttatatgcaagcgttataaacaagaaaaatgccgcgcccgcacacaaaaagccgatcctgtattttgagttcatataatctaccccttttctatacagtatcagcttttttcttttatttattcacttatttttttattcttcgcttggaggcatcaatttcagcgcctgacatcctctcaatatccgtgttcccatcggaagcgcctgaatatctttctccgaaagagctcctaattttaaaataaggactccataaacaataactgccacgataattgccaaaacagtcgggataactcttcctccgatcagacggtgaagtccgaaatgaacagcatacgttataacacccataatcgccgaagcgatcaacggctttacaaatgttcttcgtatattgattctgaatccgcatacctgacgtatttttctttgatttaaaacacacataataacagcaaatacaatgttgcttcctacgagcgcatatacattcaatttaaacactgtgagcattaaaacaagcgctcccagatgaacgaccaatgccgctgccgcgttttttgccggagaagataaataattcaatccttgcaaaactgcatttgtaattgtagaccatccgtacaaaataataactacggaacctaacattaaaagctgcgccggcacttttcccgcatcattatatagaagcaccataagcggagatgccagtacaagaaatccaacacagcttggaagcgttatgatcgttgttaaacgaagcgtctgatctatctgataatgtgtctttttcctgtttcttgccatcacaaccgttgtcagtgcaggaacgatcgatgtgctaagggcataaggtattgacatcggcacgttaataagcggatcatattttccggtataaattccctgaagagccatatactcactttctgtaaaaccttgcgcatccataatatgattaaaaacggtaagatccaatatctggttgatgttgtaaatcgccgtgctgaaaataacgggaattgccgtcataacgagaatcttcaaaatatgagaataactttcttttccttttgtatgatccctttgaatctgacggcgtattccgcctttaaatatccaaagaacaaacaacaagaacaaaagtcccgccgcggctccgattactgttccaagcgtacctcccgccgctccataagcaggacctaacagctcttctcccgccttctctcccgcacgacttcccattccgaaaaggacgcttgctccgacaatactgacaactgcattgatgatctgttcgataatctgcgataccgctgtcggaaccatcgttcccagtccctgaaaatatcctcttaaaacagccataacagcaacgatcaaaagccccggcgacagcactttaagtgcgtaaacactgaaaggcgctttcatcatatgttccgaaatcgctcctgctccgagaaagatcgcaagagatataataattcctaccgaaacagcaaatataagggaacataaaaatacgcggaacgcattgcgcctctgtccgacagccatccttaccgacacaagttttgatactgctgtcggaagacttaatgaagaaagcatcaatgcaatcgcatatacttgataagcatatccgtaaaaaccgtttccctcatcccctaatatgtttgtcagcgggatacggtacacaactccgataatcttcgtgatcacaaccgccacagccaggatcgacccttgagcgatgtaatcttctccccttgttttttttctttgatttgcctgtgtatcccccatagttgttctccttttatccaatgatcccgaacctgaaaacatttatcttgtaatattcacaagttccataatctttttttgatgcatctccatttcttttctttccacttcttccatatgatcgtaaccaaataaatgaagcatgctgtgcgcaattagaaatgcatattcccgaagcagcgaatgtccgtattcttctgcctgttcaaacactttatctacagagatcacaatatccccaagcatcagctctcctgtatcgggatgaaacagtccggcatcttcatccaaatgcgaaaaatctcccggtgtctcataatctgccataggaaatgacaaaacatccgttgcccggtcaatctgccgctgcatccggtttatttctttaatctcttcatccgttgtaagaagaagactgacctctgtttcataaggacatttcacataatcaagcgatgtttcgattacaagctccgcaatttttcttgcatcaaacggcagttttctgtctgtctctatttccataaataaactcacgattttttcctcctgccgtttttccctttcggattattctttttctcatactcttcgtacgcacggacaatcttctgcacaagcggatggcgaacaacatctttacttgtcaaactgcaaatacttacaccttccagatcttttacaacctttaccgctacatccaaacctgaaaccgttcctgccggaagatctttctgcgtagaatctcccgtaatgacaacttttgatccaaatccgattcttgtcaaaaacatcttcatctgagccggtgtcgtattctgagcctcgtcaagaataataaatgcattatctaacgttctgcctcgcatatatgccagaggcgcaacttcaatcagacctttttctgaatttttcaaaaaactttccgctcccatgatctgataaagagcatcatataacggacgcaagtacggatcgatcttactttgaagatctcccggaagaaatcccagtttttctcctgcctcgattgccggtcttgtcaatatgatcctgtttacctcattgcgtttaaatgctgtaatcgccattgccattgccaaatatgtttttcctgttcctgccggaccaagtccgaatgtgatcattccttcccttatagaatctacatattttttctgtccgagagttttaggcttgatcggttttccctgcagagtatgacagatcagatcccggtcaatttccactattccctcctcctgatcttcaaaaacaagtgaaattgcataatccacattctgttccgtaatagtatttccacgccgtgataattccaaaagctgagtgagaacacgatgcgttttttccgcagccgtattttctcctacaatcttcatacttccgtctcttgcaatcaatgtgacatgaaatgttctctctagtttctttgcataagcatcaaactgcccaaacacgtttgcctcgtgctctgcaggtatatcaatcatcagttccgacagactcatctgtttctttcctttcgatcgttattatttctgtatctgcctcttgtgtaatcctctcattcaaaaaaagagtacccattgctttggcagatttttcatacagatgtattttaacactattttctcttatttgaataccttttttctgtaaatctttacaaaatcgctcaaaatctttactgagaaccgccctcatctcttcctttgtatatatcttttcacgcaagtgataagaacggacggtttccatcccatatgaaaaaggaagataaaaattttttcctgcttttactccgtattcttttgatataaattcacagcggttcggtttcatttttacacttccaaaggaaacccgggtatctttaactttcacataaaaacgatgtttttcttttttatcatatactttttcctcatatgaagccgataattcatcttcgtactccatctgtgtatccgcaaaaatgtctgcatcggcatgacagtatttatagccgatcacttccttactgtcgtttacgatctccactcgtccgctgacaagaatatctcctttttttactgtatcaccgacatgaacttgaggcgttcctgttcttgtcacaatttttgtgatcaccccatctgaagacgcgacaagatctacagcgttctcatctttctttttttcttccttctcgaaagaatcttcattttctttaatttgaatttttagtctgcttccgtccagtgatgcggatacccatacaacgtcatcatattgcgtcctgatctcttttacgatttttcggcagtctgcctctttttttagcatccccgcaaacacacctttctctcttaaaaaagacgacaacgcttcatccgttcgcgtctcattccccgtaaaatgaatatcccatataaacattgaataaatctgcagtaaaaaaatacagataataaaaccggcaaaaaataactttcgcttccgattattataaagagaaaacggaaatccatatttctctttcacccttacttttgtatgcgtctttttcgcaaaaggtctgatccttttaaaatctcgtacactcatacaaagttcatagcagtgatcttcataggccaatccccagattaaaatatggtgataggaacacagattcaaaaaacgctcaggagaatatccctgaatctgtatttttacatacccccgcagatatcgcattccattttcaatcatcggagattcctcccctcctgaaattcaatcaaattgatcgaaccggtaatcttcatttcgtcattcgtataaaactctatttccaaacaacttccttttaactgtatctgtccgtgttttgttcttatacgtacgagagtgtctgtatactccgtgatcccgctgtaattttcaatacacacttccgacattcccagaactgtaacaaccgaagctcccataataacatctttcggcatacttgcagccgatgccaatttctttttaatctgttctttttccatataaaaaatgccacacatacgccttttataacaagtatatgtgcggcactttctgtcctattcttctttatttccgttgatcggcaatcaataatcgagacatgctctctctgtcacaaacggccttacatatgtatcggcaacagctacatgagccgggtgttttgcgtaaacagaaatatcttcttccttctcaaacgtactgactaaagccatatcatgagtgctcgatccgaacggacaagcaacaaactcaagagtcaaaagtccggggatttttcctacaagagctgtaagattttcttccatagctttttttaattcttcttttttattttcttctatttccggtttgaatttccacataacaatatgatgtaccatttttctacctctttcttaatattttcctgctttttatgtatcttgtatttttttgttctccattgtttgcagcgctttcttgaatcgtactgtaaacaagatcgccgtaaacgtcacagccagcagatctgccgccggttctgcaaggtaaacagccatcgttttatttgacgaaaacagcagcggcattatgtaaatcagtggaaggagcaaaataaacttacgcatcacggcaaccacaatagactctacagctcttccgagtgcattaaacgtcatctgacacgccatctgaattccgaaaatcagcataaccgccatataaatacgaagcgccggacgggtaaatacgatcaaatcggcttctgtcgtaaacattcctgcaaacacatccgggaaaagcataaccgctccccataaaattgtcgaataacaaagacttacttttaacaagagcttaaacgcactttttacacgccctgcattccccgctccgtaattataactgatgatcggctgcgcaccctgtccgaggccttgaaggggaagcagtgcaaactgcataacacttgtcaaaatcgccatcgcgcttactgccatatctcctccgtaactttgtaaagaagcgttaaagcaaacagaaatcacactttcgctcgcctgcataacgaacgtcgccgctcccaatgccagacacggaaaaataattttcgggcgaaggagcaaattttcttttcggatcttcagcatcgttttccttcccattaggaaagagattacccaaatacaggacaatgcctgcgatataatcgtggcaagagccgctcctttgacacccattccgaatccaaatataaagatcggatcaagtatgatattggaaatcgcaccgatcaatacagacaacattcccgtctttgcgaatccctgcgctgtaataaacgcattcatgccaagtgtaagttctacaaagatcgtaccgactgcataaatgttcatatagctgactgcatactcgattgattttctgctcgcgccaaacagcataagcagatctctgctccatataagcagcactgctgtcaggattgcagatattattatctgcattgcaaaacagtttcccaatatcttttcggctgtttcattgtctttctttcccatataaatcgacacccgcggagacccgccatagccgacgagggccgcaaacgccgaaacaagcataatcaaaggcatacatactccgactcccgcgagagcggaaactcctacatttgggatatgtccgatataaatcctgtcaacaagattatacagcatattgatcatttgcgccgcaactgtcggaagcgccagttttaaaagcagttttccgatcggttcttttcctaaaaacgctttatcctgttccattttttagctcctgtcttttccgttatttgtttttaaccataaagaacattataattcttaaaattcaagtgtcaagctaaaaaatatcatatacacatctacaaaaaatatcatatacacatctacacatcatttccatatgaaaacaattacaaaaatttaatccccgctccgtctttgatatgctccccctcctcgataaacagttttattattttaactgtctacctagaaggggacatatcactttcaacgaaacggggattttttctgcctcttatgtttcacttatgaaatctgattcacgatatcttttataacgaatcaattttaccacacacatatcttaagattttccgcagatcttttatatctaccttatcgtctttttccacatcagccgcaagctcctgcatctcgttcaattctatcttctgacatatgctgcgcaatactacacgaacatctccgatcgcgacatttccatccaagtccacatcaccttttttgtagtcggaagtatctgccacaaaagtgcatccgtttttcttcgcaaactcttctgcatatgtacctctgtttccgtaaaccgtaacctgcttcaaattcactccgttaaacgcatccgcctcaatagattcaagactgtccggaagatataattctttaatgcctgtacaatagttgaatacatatggcataaccgtcgtaataccttcctccagttctatcttcgtaatatttgatcttgaatcaaatgttgtattatcaagcacaaccgttcccggtactttcacttctgtttttgcttccggaattgtcaaaagcaacgttttctctttgttatatatacagccgtcataggaagaatacttactgtttccctcttccacatgaatatctttcagcttctcgcatacaaaagtctctttctcatcatacttttccgtctctttcggaagtgtaaaactctcatctgtccttgcagcaggataacataagatctcttttaaatcttttgtaaaaagcaccccatccacggaagcataagccgtattttcttctgccacacgaatctcctgtaaagaaaccgcattagatacgagctgtgtatcgatatgggtaactctttttgaaatatctaatgttttcagcgtactgttaaaaatgtcggatgacacagatacaatatccaaatcattaaatttttccggtatcttcacctctgttattccgtcttttactcccactacagcaataccgtttgaaaacccgatctgcgtattatttgctccttccaaacgaacctgcacaagatcctgcgttttatgagaacccgaaaaatcttttacatccggagcaaaatagtagttaggattggaaactccccatgtagtatcagaataaaaccattttccatccgcatatacgagattccatgcatgaccttgtccgcctgcccagccgataacataaattgccggaatacctgccgcattaagcatcgctttatacagatttgaataacctccgcacacagccactttcttcgtaaacacatcatacggagcaagtccgatatctgtatcatttgatcctgcataccgtacgttttttgtaatccaatcataaataagtcttgcttttttataatcttccgtctctccttttacgatctgatcgtcaacaaatgttttgatctcctgtgcctgtgcatcgttcatcggagccagagactgatcccatgttttaaaatcatctttattacaatacttaagcagatccaacgcagcctgatcatactccaagttttcctggtttttctgctctgcctttaaatcataaactacgggactgtcctcaactgcatataccggcactgatgtaaccgctaccgaaactaccgccgtaaatgccaaaacacctgcttttatccgtcttgcttttttcatattctttttcctcttctgcacatatcattacattgcaacattcttttacaagatatcatatttttttgtgcatttcaacatttttatgctcttttctttctgtattttaggctgtttttgcacctgatcttttggcattcctttcttcatccggcaatatatccgatccctcatctctctttacagatattattcagcaatgtttttatatctttgagctgttcaccggaatacagttttctgtcaatatacatattaggcgacgtcctgcactgtttcaggcaatttcgtgtccgcaattcaaatcgtccatcagatgaaatcccgtcttttttgattcccagctctcgtctgagattttgaaggatcgtcattccatctttctttccgcacctctcgcctgtgcatgcaataatttcatgagcctgcttcgcctcttttatactcggatacattttgattaaacaatttaaaaatttatccgtaatttctgtcgtctctataacccgcaccttcaattccggcgtaatgcacccctctgcttcctgaagctcacgcaacaatgcaataaccatctcctgactgctcttatcccgttgtttcccatagtaggcaaaaatttcttctatttgttccgacattttcttcctcacctcgtattataaagtagtagtatttatagaccctctccaaagtctgtatgctatttccatcataaccattctttaccttttctacaggtatggttatgatatataagatgctgtggactggtgtttcctctctaccactttga

SEQ ID NO: 7666 - DNA, 1214 bp, Unknown
  gut microbiota DNA sequence
ggcttttaaaagggctgtatcgcttggaaagacgcttctctgacggttcagcttccgataagtggaattcagagattcaatggcatttgttgtataaatgacctttctaaccgctgctgaaaacttgaagattggggaaatagcatcccagttatccttccagcgtttcatggaattcggatattttgcagtccatttttccattacccgatccaaagctgccaaagctttcttttcatccgctgcctgatatatcgttttcaaatctgtggcaaatgcttttctgtctttatctggaacatatttcaaggtatttcgcacttgatgaacgatacatctttgatattctgtcttaggaaatgctgccgcaatcgcttctttgatacctgtgagtccatctgcacaaatgatcaggatatcttttacaccacgattttttaattcgtttaagacggagagccaatacttggaactttcattttctccaatactgatagtaagcacttctttcttaccttccgcattaatcccaagaatgacatacgcagcaagcttccggatcactccattatcacggacggaatagtgaatcgcatcaatatacaggattggataaacttcatctaatggccgattctgccagtcttcaatttgtgggagaatcttgtctgtaacatctgatataaaaccttcggatgtttcaaaaccataaatatcttcgattgtttctgaaatctgccgggttgtcataccttttgcatacatagaaataatcttctgatcgatatctgaaatgtctttctgacgtttctttactacttgaggttcaaaagttgattttctgtcttgtggaacttcaatctccatagaaccataacgactattcactctttttcgcttataaccattgcgataatcaccgctatcagaacgttgtgatttttcatatcccaagtggtcatccatttccgcttccatcatctctttgatggttccaccaagaagatctttcagcgcatcctggatatcttctgctgattggatatcgtattctttcaagagctggtgaatgatgttacgttttccttctgtcatttgtactttgtgtacaggtttcttttctcttgccataataaaaggcctccttatgataaaatattttaccatagaagaccttctaaaacattatttacagaaaaagtttcacattctcg

SEQ ID NO: 7667 - DNA, 23549 bp, Unknown
  gut microbiota DNA sequence
gtgtttgtcttggtcaagaatcactactagcaattctttccctctttactgttttggcattgaacacttaatgagtctctcacgaatttagtgtgaaagccgttcggcaaagccgaacctcatcttgtatcaatgtagttcttaaaaatttttctctttaaagaaattttcaagggttgttgtctattgttcagttatcaaggttctttctctgttctgtctcaagcgacagcttttatattctatcaaaagctttatcgtttgtcaagaacttttttaacttttttcattttcttttttgtggagctttctctcaacgagtcagctcatctataataccatttcgtttcatctttgtcaactgttttttacaattttttcaaactttttcgacttgtttttttcaagcctccaggtattatattacgtgttttctcacccgcttatgcagaataccataaagcgtacaaagcctccttcaatctgaaaactttttgagataacacttaacggagaaagagggatttgaaccctcgcgccggtttcccgacctacacccttagcaggggcgcctcttcagcctcttgagtatttctcctgattctgaatccgactgtttacacagctttttttcaattcttgcttgataatgcgaaatttattatactaaacgttctatataatgtcaaccattaatttagttttttttaacctttttccgccctttttcagcaactgttttagtaaacggctagttccgtcttttcctctatcgttttcctaattctttcctgaactatcgctgcgatttccgtcgttttcatatctttgtattcatcataataaagcggaggcaaaaaacaaacctgaaccgtcactttactgatagacttcgtatcaaacggtttaaacgaatcaatcagcgccaccggaacgattggacaacgtgcctttgttgccgctttaaaacttccacctttaaatgttccgattttatttccgtttctcgaacgagttccttccgggaaaataatataatttcttcccgccttcacttcttttgctacattcataatgacctgcattgcctgccgcacatcttctctgtcaatcatatatgcttttgtacaagcaaacacctgctttaaaaactgaatatttgcaacttctttttttgcaacaaccgagatcggaaccggacacacatccataatagccaaaacatcatacattccctgatgattcgggaaaaacataaatccattttctttcggtatgttatccagcccttcagccgctattgtcacatttccgcctttgtttgctctgcggacaataaacttcagcatcttataatgctcttcctccgtatacttatctacgtgatgcgcatgataacaaagcttgcaccacataaacggaacaagaattatatttcggagcaccatcatcaatattcttttcatattttccgatactcctttaccgctgtttcataaagattatttcccttagagtcaatcaccactatcaccggaagatttactactgtaagttttctaatcgcttctgtaccaagatcttcataagcaacaatttccgatgatgtaatacattttgacagcagcgcgcccgcgccgcctacagctgcaaaataaaccgctttattgcgaacaacagcatcgatcacttcttgacttctttttccctttccaatcattgcccccattccgagatccaataattcgggagtatatttatccatacggcttgccgttgtcggacctgccgatccgatcgggcgtccttcccgtgccggagacggtcccatgtaatatatcgcctgcccttctatattaataggtaagtctcctccctcacgaagcgtttcgtacatccgcttatgcgcagcatcacgcgctgtatatatcgtgcctgtaatatatacataatctcctgcccttagttcttctgccgtctctctgccgacaggcgctgaaatatgtcgatccatttctgtttcctttcacttctgcctttttccactgctgctatcttatccgctgtttttacaaaacacagactgtatgcctgttcacatggcagcatatattcaccgcaaccggaagtcccgcaatatgagtcggatatgtgttgacatttactgccaaagccgtcaccgtgccacccaatccgcccggtccgatgccaagacagttgatcttctccaacatttcttcttcgagttttctcacatatggaatatccgaatgttttcccacttctcgcgtaagcgctttcttcgccattaaggcgcatttttcaaatgttcctccgattccgaccccaactaccaacggcgggcaagcatttggtcccgcgtctttgacagctgtaagaatcgcattttttactccttcaagtccttccgccggtttcagcataaacacacggctcatattctcacttccgaaacctttcggagctaccgtgatcttcactcgatcaccttccacgatccgcgtatgaataaccgcaggagtattatcttttgtgttttcccgcaaaatagggtctcctacgactgactttctcaaaaaaccttccgtatagccccggcgcaccccttcgtttaccgcatcttcgaaacttccgccttcaaaatgcacatcttgtcctacctcaagaaacacaactgccattcctgtatcctggcagatcggtatcatatccgaagcggcaatttcaagattatcctgaagctgtgccagaatttgttttccaagcacggactcctctttttcctctgcttttcgcatcgctttcaccatatccgaagaaagcgagtaatttgcctctatgcacatcttttttattgtttccgtaattatctctgtctgtactgtccgtatcataattcaatctcaatctttctgtttgtacgatgatattgatggtatctgactcccgccgcatccatcattcttttcgacgcaataacgctcggagtatcggcatatttatcacaatcatagattacttctttaatccccgcctgtatgatcgcttttgcacattcattgcagggaaagagcgaaacatagagcttcgctccggccaaacttcctccgctgtaatttaaaattgcattcaactcgctatgtgtcgaatatacatattttgtctcaagcgggtcttcgccgtctcttacccacggaaattcatcatccgaacaccctaacggaaatccattatatcccatagagaggattttattatcctgactgacaatacaacagccaacctgcgtattcgggtcttttgatcgcatccccgaaagcatggctactcccataaaatactcatcccacgtcaaataatctgttctcttccccgacatcaactccgctcctttcatctctgttctgttctctgtaagctttttattttgttccgaaaatacgatctccggcatcgccaagtcccggaacaatatagccatgatcattgagcttctcatcaagcgcccctatataaatgtctacatccggatgcgcttcctgcatcttcttaactccttccggcgctgcaaggatacaaaggaaacggatatgttttacgcctttttctttcagcattctgatcgccgccacactggaacctcccgtagccagcataggatcaactacaaacacttctctctcttcacaatctgccggaagtttacaataatattctaccggttctaatgtctccggatctctgtaaagaccgatatgtccgaccttcgccgccggaatcagagataacattccgtctaccattccgattcccgcacgaaggatcggtacgatagccagttttttgcctgaaagcattttccctgtcatctccataagaggtgttttgatctgaacatcactcattttcagatctctcgtcgcctcgtagcacatcaactgtgcaatttccccgatcacctcacgaaattcttttgttcctacgttttcctgtcttacataattgatcttatgtgtgatcaaggggtgatccatcacaattacttttcctgtcattattcttcctccgcaatgtaatttaatttttctgcaagttcttttattaattcacgcaatatctcatagcattctccgtaagctgtcaaaggtttcccatatggattcgggatttctccgtcgcttcccacgaattcattcaacgtataaacgttagcttttgttccgtattcggacaagattttgtttttctcggcttcctcgatcgtaaggacaagagtatcctccaccagcgtttccggttcaagctgtctggaaacatgattttcaagggtcatctgggcgctcttcatgatcgcctccgctttctgattcgccggttcgggaaacagcacgaccaatccccgtgaatcaatcacatattcctgcgccagatcttcatgccttaacatctccgccgccatcggcgcccgggcagaatccgtaccgcttataaatatgattcttcggtacttctgccgttttgcgatctccgccgccgaaagacgcgtatgccccgccgctttttccaaacgattcataatcgcttttccgattccttgcgcggcaaaagattcactgtaaatctcttccacatcttcctcatcaaattctctgagcactctatagagatttcgagcgatcgttttctcattttcccgtgtaccaatatttttcactacgccgtatttataaaaaggaagtgtctctgtcgtagcaataacccccacttttcttccttctttataagccttgtatgcaagctggcgaatcgcaaaaatctcctcccgcagatctccttctacaatcatcagttttgctttcggagcgtaatgtctgtacttcatccccggagctttcggagctttctcactctccgccacaagaagcgtctcatcaacatctacttttccgatcacttcttcaaacatttccgcagtaatcgctcccggtctcaagatcataggcggcgtcaccgtcatatcaagtatcgtagactctagtccgatctcaactgctcctccgtctaagatcatatcgatctttccgcccaaatcttccgcaacatgttccgccaacgtcggacttggtcttcccgaagtatttgcgctcggggcagaaacgaatccgcccgctgcccgtataagcgctctcgccacttcatctgtaggcatacgaaccgccactgtatcaagacctcccgtcgtaccataaggaacaacctcgctcttttcaaagatcatagtaagcggtcccggccagaagtgagctgcaagggcatctgtttcagccgggatattaacagcaatcttcctcaaatcttcatattctgcaatatgcacgatcagaggattatccgacggtcgcccttttgccgcatacgtcttcatcgccgcctcctctttgagcgcatccgctccgagcccatataccgtctcggtcggaaaagcaaccaaaccgccgtttttcagaatcattcccgcttcttctataatctcttcatttattttgtttttatcgatcttttctatttttgtttccatgccctatattatagcattatttatttcaaaaaaaaactcttaattccttttactacagcctctgctatttttccttgatacgcttcatcagaaagtttttccgcttctttgtgattactcaaaaaaccacattccacaattactgtcggcacttctgttttcttcaatatataataagtattatttgctttttcacgctttttattttccggatcaatttccagaagttcattctgcaaaatttccgccgccgctttcccttccccggacgtcgtataataaaacacctgcgctccaaaaacactttcttcatgataactgttttgatgtatacttacagcaagatctgcctttgattcattcataatgcgaacccgctctttcaaatctccgatcctggtttccgcaagccatccgtcctcttcacgtgtcatgatcactgcaatcccttcctcttcaagaagctttttcactttctctgcgattattaagttcagctctttctcaagcttcccgttgactcccgtttttccgccgtcaggaccgccgtgtccggcatccactacaaccgttctcttcttatgcgcttccccttgtttttccccgcgctcctttttatccgatttctcattctccttttctttcatccctataaccgcccccgaattagtttcttcactttccctaaacgtctccttaagcctcacccctgctttttgacacaaaacaatgattgccacaagagaaataatcgccattccgaaaactatttttttccgcatataaaaacaccctccttttccatataaatatatatgcaaaaagaggatgtccttttcagatattttatttcatgttttagttcacattttaatttacatattgcaggatgagatcccacacgccggaaccttccattccaagactccactccgcaacacccgcaagctggttttctttaataactttcagcttctcttccagcgactgagtatcttctaaccaaattttataaacgcctccgtcgccttcccactgggcataattctgcttcgtcttatcatcccattccgtctgtgcccccattgatgagataagttctgccgcatcatccattccataagcggaactctttactttattcggataattttcggcttccgttccctcatctgccgcaaattcttcgtcagtctttggccgttcaaaccaaagccgggtataaaacggtactcctgcgatcaatttatccgccggtactgacttaagggcctctgatattccgtttttcagatacccgatcgacgcaaccgaacctgcttcatacgatccttctgtatgttcatcatatcccataacaacaacatagtccgccactgccgcctgttcttcaatgtcataatgtgcattataaggctgcggaacataattatctacagaaaaaacaagtccattctgacggcacttcaccgaaagttcacgcacgaactgcacataatgcggtccgcactcatcggatacaagttcaaaatcaaggttaattccatccacgtcagtctccagcgcttttgatataacttgattgatcagttttgcccgcttcgacgtatagctcagcacttgatatgtttcttcataagaattgattcctccatgaaaatccctcagcactgcccatacttccaaattagactgatgtgcgtaatttacataatccgcatctgcaagcgatgtaatattaccttctgtatccgcaagactgaaccatgtcggtgcaatcgtattcagcccttttgtcgacgcaatcgtttccaatatataactattagcatcggcgttagaaacattatgccacgccatattgatcgtatagttttccgaaatattcgtatattccggttcttcataatcccgggataccagctctttttcaacactgttgagcgcatttgttttcacatatccgataaacccgtcttttgtagccactttcatccagtcattctcatcttcaagaacagttaccttatccgatttctttacttctgtcaaaaccggacttttcacaccgccctgatagcgtacctgcgtatcccttttgatggaagccactttcttctctccccactcagttgtaatcactacgcgggtcggatcatcatacacttcgtattccatattcgtgtattgctggataaacggaagggcaatatatgcaatctttccttctgttttcaggatcacataatcttcactctttttctctgttatgtctgtatattctttactgcctaccgctgccgaaacactgcctcccggaagtgtataaagaagaacgttctcattagaatcccaataaaaccgcttattgatccgattatgagcaacagaatattcgacataatactgcccgtcataaactttcaccggatccggcgtatttccttcttctgcattctgaaaccgtttcacaacctgatcgtcaattacaagcgcaggatctgtttctgactccactccataatattgtttcaaatcggccttctcattcgttgaaccgtatcttttccaaataacaaatccgcctattgcaattatgatcaacacaaaaaacagaaaccaccgtataacggcattccgccttcttctccttgctctgctgctttgtctcgcaggtcttctattccgtccaggtcccgcttccgacattctttgtctgctttgtcccgaacggtttaccggtttccgggcattgttttcagggcgtcgtctgcgggtatctgatgtctgactccattcccgcacatcccgtttttctctttcgtccatgccgtacctcctactagcaattatacgcgtacattatatcacacttttaacacgcgtcgttaataatttgcctctttcagcagattttagacatcttttttcacacaacctccactttgtccggcattaaggggtaatttctgcccgaaagtgttcattaatatcagtaaatctaagagtttctatattgccatccccactcatcgtataatcgcgcatatatgttcccgcttcttttaccatatgtgccgtcacgatctgaagcggacttgcctgatatccgtcaagcagcatatcaatcccacgcttctcatacttttccagctccatatataattctgtatattccgtttcatccattttcatctcccgcaatactcctttccatgcaaaccgtgataaatatagttttcctgccctttcattatgtatcgtacggaggtttgtgacatacatccggattttcaggcagggcaaaagacagccgatacggaaataagagtttaaacagcattccctcctttcattttatttacttatcagtgaatactatcttttgtaagtgccattatattgtccgcattttatgttttcaatgtgttttttgttcataaccgcatgggatttgttgataagtctttacatccttttcttttttgtttatacttatcttgaggatatgtatctatttttattcccgatgcatattatcttatatagtataaaggatgtgattgtatgaagattgaaaaacttaatgaaaatcagattcgttgtacattgacacatgctgatctggcagcgcgccatctgaagctaagcgagcttgcttacggcacagaaaaggctaaatctttatttcgcgacatgatgcagcaggcgtcattcgatttcggatttgaagcagaaaatattccgctgatgatagaggcaatcccttcatctgctgattctattgtccttattataactaaagtcgaggatcccgaagaattagatacccggttctcaaaattcacaccggctgacaattcagaccctctgaattccgagacactggaaaaactccagggggcagaggagtttctcaatctcctgaacaaggtcaaagaagcggcagcggcgacatcagctcctgttgaagagccccggcagacggattcgttctcgatccggttgttttctttttcttcactggacggagtaatcgaagccgcgaaattaattgctcccgcttatcacggcgcaaatacattatataaggatgaaagcgctgagacatttattcttgcccttgcaccggtggaaaataaattaaatgaatttaacaagatctgcaatatgctttccgaatacggatcgccggaaaaagccgacgcttccgtgcttgcatttcttgaagaacattgcacgattctcatatcggcagatgcagtatgtaaattatccgcattataaacttgtatgcggacaacggatctcaaaagaaaagggtcggcgctttaacgatcaatcaaatcgcaaagcgccgacccttttacgcaattcttatttacccattgcctttgcagcagcattgattttttctacaagaagtccacaatcaattccatgaaccattgccgcttcctctaatgtctccatctgagacgccgggcatccgagacaatgcattccgatctccatgagaatcggcgcgctctccggaaattgatcaataagttctccgatttttgtatcttttgaaaattctgccattttctcttcctccttgaatttatgaggctattataagccttgttctgcaaattatcaacagttttcctgattcacctttttccgctagcaccctccgaattattccctctgaattcccccttgcttttttaaccgtatgactgtttctgcatcctctttcttctctgtacacttcataaatctacatcgcattaaattgtcagatatatcctgcctttatttttgtttttttgaatactcaaaagtcaataatttatccgagttttttcgacatatttgcatttttatcataactcaccaaaacatccgttctttttttattataaagtaatccaccgaaaacatatgtttttatgtggataatgtggataactttgtgggaaaaccgactttttccacctttttcgttgttttcagtgtggataagttgaaaactccacgtttttcaatttcgacatttttttacaaataaacacaaatttgtgcattttgtctttttatgtcgaaaacgggaaatctgtatttctctcatcaaaaatacaaattccccatttcaaaaaatttgtgttacagaactcttcttactgcaataatatcagtataggtagcgctgcatattccgattccatctgcttcgttcattgcattcacgatcgttccgtcccccatataaagcccgacgtgaccgtcatacaaaatcaagtctccgggaagagcttcctcgtaactgacggcgtatcctgaattcaccatatcatatgtcgtccgtggaagacttactccgaaatgtgcataaaccgactgtacaaaacccgaacaatccgctccgtttgtcaggcttgtacctccccaaacatatggatttccgataaactgacaagcataatcaataacagcctgccccggagttcccggagcttgcgaaggcgtattcactctcccctgcgaaacagcgcctacaggccgtgttcccggtctgccgtcagcaccgcaaacgacagatgctgccattttttcttgcgcttcttcttctgcgatccgcttttcttcctcttcttttgtctccccataagaataagaagtttctgcaatcacgtagtcgcctgagacccaaccgcttttatctcctacttttaccggataccatccgccggtcgcttctcccacagtctcataaacttcgcctttttttatctgtgtcaaaatcttactgtccgttccgcagccttcccgaacattaagcacatatgccgtaaccgtcactgtatccttctcatactcctgtgcacgcgcctgcgcctcctctcctgtaaaaagcgcatcttccggcacatatccttcagccgaacccgatctgatcttcgtccagccatccagatattccagcacctgagccgccgaatctttataaagtttcccgacccagtcgccggaatcatccggtgcgtttctgatataggtaaactccttcgtatcagaaaacgccatattcaaatactcaccctcttctgttggtacaagatagagattaatattatcttttacttctgtctcgtaacatttctccagtaccgattcaatccccgatgcctgtataaatggctgctcgtctttcctttcggccgccgatacttcagacacgctccccgggatcagaaacattcccgctgccgcaaacagaatgcctctcgcttttgtgtgtggtttcttcatataaaacctcctctatatttcggtcatttaccgcattacatttatcttttgtaggaagctttaaatgttacacatttgttaaatttgttacattcacattatatcaactcgctatttgtttgtcaacttctcttactgatttttcattgacatctctcgacagcaagtttctatattattcttttttcttcttctttccatttgtttcattaattattttgtaacattttatcgtaaatattcaattttaacagccaaaaataatttttttcaaaataatgattgacaaacatctttctttgtattatattctaattacagtaatcgttactattatttattaaataacggttcttagttagttatgaaagggggattcccattggcagctttaaaatatagtagacaacgagaatccatcaagcattaccttatgacaaccaaagagcatccgaccgccgacacagtttatatgcatgtgaagaaagaatttccgaacatcagtcttggcacggtttacagaaatttaaatctgctgaccgatatcggcgaagccataaaaatatctactcccgacggaggagatcgatttgatggacggattgaaccgcataatcattttctttgtgaagagtgtggacggttactggatctggatctggatatgaagagtatcgaagaagtcaactgccttgccggtaagaattttgacggagcgatcacttccagttccactttgtttttcggtaaatgcggtgactgcattaaaaagtcataacaaataaacaatattattttcaaaaaaggagatcaaaattatgaaaaaatttgtatgtacagtatgtggttatgtttttgagggagaagcagctccggcagaatgtccggtttgccacgcaggcgcagataaattcaaagagcagacaggcgaaagagaatgggctgcagaacacgttatcggtgttgctcagggcgttagcgaagacatccttgcagatctgagagcaaactttgaaggcgaatgtacagaagttggtatgtaccttgctatggctagagttgcacacagagaaggatatccggaaatcggtctttactgggaaaaagcagcttgggaagaggctgagcacgcttctaaatttgctgaacttctcggcgaagttgttacagacagcacaaagaaaaaccttgagatgcgtgtagatgcagagaacggcgctacagcaggtaaattcgaccttgcaaaacgtgcaaaagccgctaacctcgatgcaatccacgatacagttcatgagatggcaagagacgaagctcgtcacggaaaagcatttgaaggacttcttaagagatacttcggctaatcaaaatcccgaatattgaaagataggttatcagaaagatgtcggctaaactgtcggcatcttttttatctccttttcttacatttttttatttttgtctgtttttttgtttttcttttctttcttttttattttatatgcattcttaccttgtatctttttttctatctagtataatagaaagaaaaggacaaaaaacgaggtgctatcatgagaaattttattggtgttgacttaggcggaacaaacatccgcgctgctatcgtttccgaagacggaacgattaaatgtatgaaaaaatcagaaagccacccggaacgcggtgcagaagctgttatggaaactatgatttccctgattgaaagtcttgacggatatgaagaatgtgaaggaatcggaatgggtattcccggaccgatcgacacgatcaacggcaagatcatcgtttctacaaatcttccaaaactgatcggttttccgatagcggaatatatcgaaaatcattttcataaaccgacttacatggacaacgacgttaaagttgccgctctcggagaagctgttcagggagccggaaaagattatcctatcgtttactatgtaacaatttcaaccggagtcggcggagcacttgtaatcgatcaaaaggtaatcggcggtcagaacggacacgcaggcgagatcggaaatatctgtattgacagaaaccgtgaaaaatacaatattttgaatgtaggcgctgttgaaaacgaagcgagcggaactgctgtcacaagaaaaggtaaagctgtattcggagataagatcaatcacgcgggcgatgtatttgatcttgcccgctcaggagacgagcaggctctcaaaattgtagatgacatggcatatgatcttgcaatgatgttctgcgctatcggacatattatcgatcctcatgtattcgttgtaggcggcggagttatgaagggaaaagatgtattctttgaaaaaatggaatcttattaccgctctatgattcatgtaggtatgcagccggttgtattcaaagaagctctccttgatgagccgggtatcatcggcgctgcgatgcttccgatgacacatttaaagtaaaactgtttccttcctttcaatataagcagtttgctacataaaagaactcttttttaagttcttaaaaagaaaaactgagcatgacctaactctttgagttttcgatcatgctcagtttttcctttctgctcagtcgcttaatttcccactcccgcttcatcgcttcctgctttgtcggaaattcttccttataaacaagcacaaccggacggcgcgcttttgtgtatttcgcgccccgccccgcattgtgatctttgatccgtttttcaagattgtttgtccagcccgtataaagcgaaccgtcactgcactttacaatataggtataattcatgtcttttattatttcttttctttcgtttttcttttcttgttatatctttggtcattgcttcttttattattacttctttttctattccataaaattcatcggatcgaccggctctccgtctttaagcacttgaaaatacagattcgttccttctacgctgtaatatttcgtcggctcattcaaactgccgattgcgctgcctgctgccacataatctcctgttttaacttgtacatcttttaactgtccgtacactgctgaatatccgtttcccatatcaagcgtcaccgtaagtcccgtctgcgccgactcctcgatcgcagtcacagttcctgccgcagatgcattgatcgtttctcctgcttccccggctataatcatcgcaggattatattgatactgttctaatgtctggaaaaatacagtctcatccatactatatccattgatcactgctccgcttgcaggccatgtaagaacgctttcttctgaaaaccaaagatttgacgcggcgcttcccgtctgctgaactccttcttccgtccctgttgtatcagacacatcttccctgctttcttgttcattttcatccgtttcttccacttccggcaggaggatttcatctgtagttgtttctttcgtgttatcttctgtaaactgttccgcctctttttcagctttcgccatctgctctttcatatcttttttgtagtttccgaccgtatatgttccaacgaccgccagaactgccataaagcagactacaataccgatggctgctcctttgccttttaaaaaggacattttttcatttttattcattatcatcacctctggttatatttttgccggaaaatgataactttattctgtcctttcaaaaaagtttttctctgactctattgttgattataattactttatttattttttgcaataaagttcaaatccttctctgtctttgtcccttcataaaaaaactccaaaatttctttatatgtttttccgtcttttgccattttatttgcagtccaacaactcagccccatgccatgtccgtttcccgccgttataatttttattttcttcccgctttccgcaaacgaaaaagaactcgacggaagcgacagcgcatcccgaaattgatctcctgtgcaaattgtttctcctatccgaagctttcccacatatcccgccgaatcatgttctaaaatttcaaaatctttaaaagaatatcctgccgcagctttttctccgtctgtctctgccgccagaaaatgatgacattttttctgtatttgatcataggaaaacgtaaatacgccgacctgttcttccgattctttatctgccggacattctttcactttaatatacggaaactccgaacttccgagcacttcttccgcactgcgcgacattcccgtatttgactgatggaacggtgtccatgcatatgtatcattataaaataacacctcgttttctgtcgcttctatggcatttctgtatttttcatatcgctttttatattcatcggcaggccattgatcctgcatttccttctgcgacaaataatcgatctccaaaataacatctgatacatttccggttctgtccgacttttgattctccgtctcttctgcctgagtgcttctttgcagcgcacggctgatctgtgtcctcacaagaaccgcctgcgccttcagtgcctccgtctctgtatctgccggtacgtcttttgccaacactcccgtaagatactcattccactctacttctgcaatcccgtctgcctcttcttcctccgaagctttaactctgatgtaaaaattttcattcgttgtctcttctggatctactccgtttacaaacacagaaacaatgtacggaaacaatatcaaaataacaaggaatgcagctgccgatttgaatttttgttctatcgtatatcttttcatcaaaaaacagccctccatatttctatcatatgaagcgctgttttttttataacttttgttttatcggacaaacggtctctttctcataataaacaggcatatcgcctcgtataacggtactaacgatgataatactgcatgaataaccggcatatttccttccgcgaagttttcataaatctgtttattcaccaagacgttcaaagcgatctgaactgctccgaataagatcgaaacaatgatcactacgaaatacataaagaaaaacgcaagtacgctcatccccgcccctgtcacattttgattcaccgcacttccggcgagcgtcattccgatgccaaatacgagtaccagtacatagatgccgatcgctccgctgtagatgatcggaaaaagcagtttccacaatcccggatttttgatcgtcgtatttttcagtcggatcggacctgccatattcccgtggtaatatgttctcgcaaaaggtacaaatgccatccatgcatcttttttccccatccgctttgcgatcgtatacagaccgaaagaatgcagaaggtaacttccaagcataaatacgagcattcctatcatgatcgcaagccaaagcgaagcgaacactacggcaaacatttctcctgccctttccggatgatactgatactcgtattcatatgcgtaatcatacatatttctcatcttactacctccttatcccttttccgaaaaatcaatcagatgtttttactcttcaagcggagcaacatctactttttctaatttccaaatatcacttacatattcttcgattgttctgtcagaggaaaatttcccgctgcatatcgtattcatcattgccattcttgaccatctctgctgatctctgtaagcttcttccactcgtttctgagcctctgcataggaacggaaatctttcagaataaagtaagtatccgctctgtctgtacactgcgtattcaacagagaattatacagatttttatacatctcgtgatcgccgtttgcatatgtgccgtccataagctgatcgatcacacgttttaattcccaatcgttaaagtaaatatccgtcggattatatcctccgttattctcataattaattacttcttctgaactaaggccgaagataaacgcattctccgctccgacttcctgcacaatttccacattcgctccgtccatcgttccgagagtcggcgcaccgttgagcataaatttcatattacctgttcccgacgcctcttttgacgccgtggagatctgctcgctcacatcggctgccgcaaaaataatctccgcatttgatacacgataatcttcaataaatacgactttcagttttccgttaatgcttctgtcattatttacaacatcagctacggaattgatcagtttgatcgtctctttcgctcttaaatatcccgccgccgctttcgctccgaaaataaatgttctcggataaaacgacatctcaggatgttctttgatctggttgtacagatacataatatgcagaatattaagaagctgacgtttgtactcatggagacgttttacctgaacgtcaaagatcgagcgcggatcaacttcaattccattatgctctttaatatattttgcaagacgtactttgttctcgtatttaatctgcataaactcacgtctggccttttcgtcgtccgcaaacggtctgagcttttcaatctgcgacagatctgtgatccatccatttccgatcttatctgtaatccagtctgccagaagcgggtttccgtgtgcgaggaatcttctctgtgtgatgccgtttgtcttgttattaaatttttccggcatcatctcatagaaatcacggagctgctgtgttttcaagatatctgtatgcagcttcgcaacgccgtttacagaaaatcccgcgataatagccatatttgccatgcgaacctgaccgtctcttaagattgccattttctttactttatgctcatttcccggatacatctcattcactttgatcaggaatcttctgtcaatttcctgcacgatctgataaatacgggggagcagtcttgaaaacaggtcgatcggccatttttcaagagcttctgccataattgtatgattcgtataagcacatgttttgctcgttacttcccacgcctcttcccagcttaatccttcctgatcgatcagcagtctcatcagttcgggaaccgcaactgtcggatgtgtatcgttcatctgaatgattactttctcatgaagtttacgaacatcagaatgctttttcttatatttctcaagcagagcctgaagacttgcggagatgaagaaatactgctgtttcaaacggagttcttttcccgaataatgattgtcgttcggataaagaacgtcaacgatcaatttcgcaagattttcctgctctaccgccttatggtaatttcctctgtcaaattcatcaagcttaaaatctgtgatcgcttttgcatcccacacacgcagtgtgtttacgacatgatttccatatcctacgataggcatatcatacggaatcgccaaaacagactcataattttcctgcacaaattttgcttttcccgtctcagggtcattttcaaaccggatattccctccgaagcggacttcttttgcatattcttctcttctgatctcgaacggattaccttctttgagccagttatccggcacttccacctgatacccgtctttaatcttctgtttaaacatgccgtaacgataacgaatgccgcatccataagccggataattcaatgttgcaagtgaatcaaggaaacaggctgccaaccgtccgagacctccgtttccaagcgctgcatccggctcttgatcctcgattacattcagatcgatctccatttcttccagcgcctcttttacctctttatacgctgtcagattgatcaggttatttcccaatgcacgccccatcaaaaactccatagacatgtaatacacagtctttgcatctgcctcgtcatacgctttctgtgttgcgatccaatcatcgatgattacgtctttcactgcataggatactgcctgaaaaatctgctgaggagttgcctcgtcaatcgtttttctgtacagcgtcttaatattttctcttacggtttccttaaatgtttctttctcaaatcctttattatgcattgctttattcccttccttttgatatgccgcggcgcatcgcatcctttatcttacaagaacgaatgcgcccggatgtgccgcatatcttaaaattattgtttctcaacgcccattgtaactgcttctccgttgatcttccactctttcacataacctgccggctctgcctttacaactttatctgcaagcacttccccgccgatctcgtcactgtgttctgcaaagatcttttccgctttctcacttccgttatacgttactttgatgcggtccataacttcaaagtcagcttcttttctcattgtctgtactttactgataatttctctgacaaatccttcttcaagaagttccggtgtcaggttcgtatcaagaacaaccgtgattccattgtcgttttcagaaacatatccttcgatctgcgctgtatcgatcagaaggtcctctttgaaaagtgtgatctcctggccgcttacatcaagcttaagcgctcctgtttcattgatctcatccatagcagaatttccgtctgcatgatcaagcgccgctttaattccccctaacattttaccatatttcggacctactgtctttaattgtggtttaaaactataagaagtaaagtctcttacatcatctgtaaactttacattttttacattcagctcatcagctacgatatcctgataaaattcaggcagatcaaatgctgcttttacgaacatctgaccgatcggctgacggttcttgatgttcgatgtatttctgcaggcgcgtcccataacgacaagcttcagcacatgctccatattctgctcaagctctgtgtcgatctgatcctcgttcacttccgggaacatgcacagatggatactctccggcgcattctggtcaacgctgcgtacaagattctgataaatctcttctgtcataaacggaatcatcggagctgccgcttttgataccgtaacaagcgctgtatatagtgtcatgtatgcattgatcttatcctgctccattcctttcgcccagaaacgttcacggcttcttctcacataccagttactcatatcatctacaaattcctgaagagcgcgcgccgcttccggaatacgataatttccgaggtttgtatctaccgtttttaccatcgtgttcatctttgacaaaagccacttatccataacggacagtttattatattctaattcatattttgtggcgtcaaactgatcgatatttgcataaagaacaaagaaagcatatgtgttccacagtgttcccatgaactttctctgaccttctactacagcttttccgtggaaacggttcggaagccacggagcgctgttcacatagaaataccagcggatcgcatctgcaccgtatttttcaagagcatcaaacggatcgactgcatttccttttgatttgctcattttctgtccgttctcatcctgtacatgaccaagtacgattacattcttatacggcgctttgttaaacagaagcgttgagatcgcaagcagggaatagaaccatcctctcgtctggtctaccgcctccgaaataaagtccgccgggaactgtctttcaaacagctctttattttcaaacggataatgatgctgtgcaaacggcattgatccgctgtcaaaccagcagtcgattacttccggaacacggtgcatctcttttccacacttcggacatttgatcgtcaccgcatcaatgtacggacgatgaagttcaatgtcatccgggcaattatcggacatttcttttaattcctcaatgcttccgacagaatgcatatgtccgcactcgcattcccaaatattaagcggcgttccccagtaacggttacggctgataccccagtcctgcacgttttcaagccagtcgccgaaacgtccttttccgatactttcaggaatccagttgatcgtattattatttgcgatgaggtcctctttcacggcagtcatcttgatgaaccatgattcacgtgcataatagatcagcggtgtgtcgcatctccagcaatgaggataactatgctcaaatttcggtgcatcatagagcagacctctggcatcaagatctttgagcacttccggatcggctttctttacaaacaatcctgcaaacggcgtctcctctgccatatttcctttttcatctacaagctgaacaaacggaaggtcatattttcttcctacgttcgcatcgtcttcaccgaatgccggagcaatatgaacaacgcctgtaccgtctgtcaacgtaacatattcgtcacatacaacgtaaaacgctttcttgttctgcttctgcgcacaatctgccgcgcactgataaagcggctcgtattcttttccttccaaatcagttcccttatatgtctcaagcacctcatacgctgcttttccttcttctgcaagtcttccaagcaccgtatcaagaagcgcgcacgccatataataaatatttccgtccgcagcctttactttcgcataatcttctttcggatttacacaaagcgcaaggttcgacggcagcgtccagggagttgtcgtccatgcaaggatatacgcatcttcttcttttactttgaatctgacgatcgcagaacgttcttttacatctttgtatccctgtgcaacttcctgtgcagaaagcggcgttccgcagcgcgggcaataaggaacgatcttaaatcctttgtaaagaagccctttatcccagatctgctttaacgcccaccattccgactctataaaggaattatgatatgtgacatacggatcgtccatatctgcccagaaacctactgttcctgaaaaatcttcccacattcctttatatttccaaacactttccttacacttatcaatgaaaggttctagtccatactcttcaatctggtctttcccgtcaagtccgagcagcttttccacttccagttctaccggaagtccgtgtgtatcccaacctgcttttctgggaaccatactgcctttcattgttcgataacgcggaatcatatctttaataacacgagtcagcacatgaccaatgtgcggctttccgtttgctgtcggagggccgtcataaaaaatataatccggacatccttcccgctcttccatacttttctcaaaaatgtgattgtcgtcccaaaacttttcgatttgtttttctcgatcgacaaaattcatgtctgtagaaacttttttgtacatgatcttcttcctttcctccttaataacaaaaagcttccgtcctgtaataggacgaaagcttattctccgtttttaaccacctgttacaacatacttggatctcacgccttgactgtacgcgacagaaaacatctatttacagtatagtacatctctttctatatctcttcttttctgtagcttatgcatacgattcggatccgcatatggtgtcctgtaacgtcggacttacgtcggctcttacttctctgtatttatttcagatgccgcggctcggaagtgatattcagaatctgtctaccggtatcggacttacaccatccccgactcgctgtaacattcgatcagatcttactgtctccgtcatcgcctttttcatcatatttttaatatgtcatataaaatattataaaaaaaatattaata

SEQ ID NO: 7668 - DNA, 13401 bp, Unknown
  gut microbiota DNA sequence
cacgtttttattatacacattaggagtttttatttctgaatacaccgctaaagctttcacggaaccacgcgactatcgcgtggttttcttgatacaaaaagaaactgccgtcattttgacagcagtttctctgtaacctgtttctctgaattaaagattcgcaacactttttgtattgatccaagtcttgaaaactcacggattaataaaactcgtataaacctttttctctttttcaggaagaccgaacgcttcctttccaagcgcgatactcttcattagaaagaccatatttctcgcaacaccgcgcattgtctgtttcccttcttcatcaagcgccgcctctccgacctttcttccatgaatacagttccagtattgtcccgatgcgatcggcatatctgaaattgtaaaatatttatttaactcatcaaatgttgcagaacatccgcctcttcttgcacatacgacacttgctccgactttcatcgtcttatcgaatttagtactgtaaaataaccggtcaagacaggcgatcagcgtcgcatttgcagatgcataaaagacaggacttgcaataaccataccgtctgcagcctcgaatttcggtgcaagctcattcacgatatcatcaaacatacactttccgtttttataacatgttccgcatgccgcacatcctctgatatccattttcccaacttggatcgtctcatattccacgccgttttcttcaaaaacatgttccatctcgtggatcgcgatcgtcgtgttgccctctgttctaggacttccgttcaaaatcaatactttcaatttttctgccatttccccttctccttttcatttcatctctctttgtttttctgcttatactttttactatattttttactatatctcttactctatctctattctattttccggttgtatatttctattcctccttaatcggcatcattcatttttaagctgctttgctcctaatatccattcattttccgtatctttcttattcttgaaaatattatgtatcatctgaagacagatttttgcctcgcagcttcagatagtaatatttcactttttcgacaagtgttgtcaaataacgaagcaccggttctgtagcaatcgcaaatactacaaagagcataatacattcttttgtcatacttgtaatagcgaacagatcttttaggaagatgctgcagaacaataatcctgcaatacatccgcttacaatactaaaccgtattttattcatcggcgcgctgatcttatataagatcataaatcctacgatcgccaaaagcatcgttgccgccgttgatatatccgtagagcttacgtcaaatgttcttccaaatatgacaagagccgcaactgcaagagcatctgtcaacgcagcaggaagcgcttttaatagcacatttgtaaggaaatgtcctttgatcatatttttattcggttccagagcaaggaagaatgcaggaacaccgattgtaaacatactgatcaatgatacttgagacggctccaacggataagtaaacataaacacgacagacgcaacgcttagcaaaaatgagaaaatattcttcacaagaaataaacttgccgatctctgaatattatttacaacccgccttccttccaacacaacttccggcatacatgaaaaatctgactccagcaaaacaagctgagatgcctgtgccgcagcgtcgcttcccgatgccatggcaatactgcagtcggcatctttcaaggcaagcacatcattaaccccgtctcccgtcattgctaccgtatgtcctgcctcttttaaaatacggacaaacttccgtttctgactcggcgtaacccgaccgaaaaccgtattattcagaagcgctttcctcatggactgttcatcttcaaactctgacgcatctacatatctgtctgcatttttaattccggcctgctttgcaacattggaaacagtaaccggattatcccctgagataacctttacttctacgccttgttctgcgaaatactcaaacgtctcttttgcagcttctcgtataggattggcaagtaaaacaaagccaaacggaagaatgccatgtgtcagaggttttccgtcaacctctccgtcataaattccaaaagcaagaactctggatcctgtagatgcatattctgtgatctcttccgcataatcgtcatacttttcttttaaaacaaattccggcgctccgagcacataagctccgtcttcaaatgtaacgctgctgtattttgttgcggaagaaaatcctgtttttgacaaaaccttctttcctgatgcttttgtaaaatattcttttagggcagccatcgtaatattatcatttgtcatagctgccgcaaaatctccgacaagcaaagataacccgcccttttctttttcatcgtactcatccgtcttgatcagcttttggactttcattgtattttccgtaatcgttcctgtcttatccacacaaagcacgtctacacgggcaagcgtttcaatacatttcatatcatgcaaaagcacttttttctgtgcaagacgaattgaactcaccgcaagcgccacacttgcaagaagatacaatccttccggaatcattccgatcaccgccgcgatcatagatgtcacgctttctctaaatccatcatgttgaatgaaaaatgcctgtgaaaaaagaacgattccgatcgggataatagctactcctacacatttaacaagcttatcaagcgaacgaatcatttccgactgttcttttgactgcatcgcttttgcctgcaatgtcaatttcgatatatatgaatcctctcctactttatcaagccgcgcgtgacattgtccggaaacaataaagctgcctgacatcagtttatcgcctttacgttttgtaatctcatcggcttcacctgtcaaaagcgattcattcacctgaacttctccggcagatacttccgcatcggcacacacctgatcgccggctttaaaaattacgatatcatctacgacaagatcttcggcattgatcaccgttctttttccgtctcggacaacagaggcgcggggcgcattcaacatagtcagcttatccagtacttgttttgctctaatctcctgaataattccaatcaatgtatttgcaataataaccggaagaaatgtcaaatctctgaaagatcccacaagacagagcaatactgcaagcacgacaaagattaagttgaaataagtaaatacattttcatgaacaatctctttcgtcgtctttgacggaggttcaaccgccttgttcgtccaaccgtgcagccggtgttcctgaacttgctgacttgtcagtccctttttatattcgggattatatcttgttgtcgggagccgtcgttcctttttttcttctacctgcaatttttttcttcttgccatacagcttttcacctctgtctcttcttttgtgtctaacttcttattgctgttcttttttattttctattcataccgttgtacaagggtagcgtcgatgtacagaccgtaaacggttctttctgtacagcgacgctatcgcctgcaattttttaattttaacagataatctttattcctcagaaatatgcacttctttgtctgatgctttttcttcctctaaaatctgtctgccatctgccgcaaactctgcgcctgatgcagtctctccatctgaagaaagttctttctgtgacaagatccgcataaattcgtcccctgtgattgtttctttctcatacaaatatttggcaagttcatgcaatttcccctgattatctttcaacagctttcgcgccttctcataagactgttttaccatatctacaaccatatcgtcaatagttgccgctgtctcaggagaacaacttaaactgctgtcgcctccgaggtacggatttgactgcgtctcaagagcaaccattccaaatcggctgctcataccatatctggtgatcattgccctggaaagcttcgtcgcctgttcaatatcatttgacgctcctgttgtcactgagccgaatacaagctcctccgcgcatcttcctcctgtcaatgtcgcaattttatttttaagttcttcttcagtcatcagattacgttcctcttcttctacctgcatcgtatatccgagcgcacccgaagttctgggaatgatcgtaatttttgtcaccggagccgaatgtgtctgtaatgccgccaccaaagcatgaccgatctcatgatatgcgacgatcagtttctctttcgtcgaaagaacacggtttttcttttggtatcccgcgatcacaacttcaatactttcctctagatccgactgcacaacaaattttctgttttcacggacagcccgaagagccgcctcattcaccatatttgccaactccgctcctgatgctcccgaagctgctcttgcaatcgcattaaaatccacattatccccgagttttatttttcgtgcatgcactttcagtatttcttcacgccctttaagatcgggaagttctacagggattctccggtcaaaacgtcccgggcgcaaaagcgccggatccaatgtgtccggtcggtttgttgccgcaagtattacaacacctttcgacgcatcaaaaccgtccatttctgtaaggagctgattcaatgtttgctcccgttcatcatttcctgccattccgtggctgtcacgtttcttgccgatcgtatcgatctcatcgataaatacaatacaaggggctttctcatttgcctgtttaaacagatcacgcacttttgaagctcccatgccgacaaacatttctacaaattccgaacccgaaatagagaaaaacggaactcccgcttcccctgcaacggcttttgcaagaagcgtctttcctgttcccggaggccccacaaggagggcgcctttcggacatacggcgccgatttcctgatatttctgaggattatgaaggaaatcaacaatctctgtcaaaagttcttttgcttcatcttcacctgccacatcgttaaacgtaatacccgtcgtagactgcacatatacttttgcattgctctttccaaactgcataaactggtttccgcctgccgctccgcccatctttttcatgagttgacgtgacaaaaactgtccgaggagaatgaaaatgatcatcggaatcacgattgataagagcatacttaaaaacggactcatctgtcgatccgcaactcttccgaacttacatcctgctttttccaaacggtttacaagatccgggtcatcaaacctcgtagtttcatactgtctggaatcttcacttttatctgtaaaataaatgctttcgccttcgagctgtactttcgatacttctttgttttctaccatcgtaaggaacgtgccgtaatcaacttcctcaacatttccccctacaatggcagggaatacaaaggagttaaaaaggatcagcaccgcaatcgctatcagataatatacgatcaatggctttcttggtttttgtacttgtttcataaaagtcctcctttctgtatccctctgcttctcttctgttaaaccaatcttttaaagagagctttatttttcttttttcttcagcgccagacggattgctttcaaaatctggatgatcggaatattcactgccgcaaggccgtatacgatcaaaagctgcgtcaaattcaacgtctgtactttaaaaatactgtgaagtcccggaatcataacaaccattgtcactaatgccagacctacaacaaatgcacctatcaaataaatattatttaaaagcttgcttgtaaatacaacaggtctgtctgatttgcagttaaatccatggaacaatcttgcagagcacagtgtcgcaaatgccattgtacttccaagcaatgcattaccgcctttatatccgatcaaaaatgcgatcattgttgtgattccgattgacagtccttctgttccgattttcagcataaaatcttttgtaaggatcgactcgttcatcggtcttggtttttcttccatcacttctttagagtgaggttcaagtccgagtgctattgccggaaggctgtctgtcaacaagttaataaacaacaaatgcacaggtgcgaacggaaccggaagacctgcgatagaagcgtagagcacagcgagaatcgcgccaaagtttcccgaaagcaaaaactggatggagtttttaatgttccggtaaatatttcttccgttttctaccgcttttacgatcgttgcaaagttatcatctgtcaataccatcgccgctgcatctttcgatacttcacttccggtgattcccattgcaacaccaatatccgcctgtttcagcgccggcgcatcgtttactccgtcacctgtcatagatacaatatttcccttttcctgccatgcacgtacaatacggattttatgttccggagaaacacgggcatatacggaaattccctctacaaaatctttcaattcttcatcggaaagtttatcaatctccgcaccttcacatgcttcagactcatcttccaaaataccgattcttttcgcaatcgccgcagccgtcactttatgatctcccgtgatcataatcggacgaatacccgccttcttacattccgctacagcagctttggattcttcacgcggaggatccatcattgcgatcaagccgataaacgtaagattatattcgtcttccaaagtcaattccaactcgtctgacactgttttatatgcaaaagcaagaacacggagtccctgtcttgaaaatgcctgattttgttcttcgatattttttctgtcctgctccgtcatcggacgcacttcagaaccgatctgtatctgatccatacgagtcagcaacacatcgaccgcaccttttacgatcatcgtaggaacattttcaatcgtatgctttgttgacattaacttacgatcgctgtcaaaaggattttcactctcacgaggatatttcgttcttatttcttccggatcaagtccaagcttacttccaagattgatcaaagctgtttctgtcggatctccgatttctacgccgtctgtatttttagaatcgttgcataacatacttccgatcaacagcctgctctgggaagggtcattcaaatctatatcttctgctttaatgcaaagctcatcaacataataatcttctactgtcattttgttctgtgtcagcgttcctgttttatcagaacaaatgatcgatacgcttccgagtccttccactgcctgaagtttacgcatgatcgcatgttctttcgccatcttctgcgtaccaaaagaaagtacgattgtaacaatagaactaagcgcttccggaattgccgccactgcaagggctactgcaaaaagaaaggcatcaccgatcttatcgcctcgcaaaatattgattccgaataaaataccacagaatacaaggatcaagatcgacaacttttgaccaaactgatccagattgatctgaagcggcgtctttttctcggaagttgtctttaacagacttgcgatttttccgacttctgtctccatcccgattccggttacaacaaaagatccccttccatatgtgacaaagcttcctgaataaaccatattcaatctatcgccaagcggaacctcttcttcatttataatatctacagacttttctactccaagactttctcctgtcaaagcgctctcatcaactttcaggctggcgctttccaaaagacgtccgtcggcaggaatgtaatctcctgcatccaacattacaatatcaccgactgttacttccgaagacggaatcgggataactgttccgtttctcagcacttttgcttccggaccggaaagttttttcaggctggcaagagattgttctgctttcacagtctgaactgttcccagtattgcattcattgtgattacgattaaaataaccgccgtactttccacatctcccataaatcccgatgcaatagccgcaatgatcaggatgataacaagaaagtccttgtactgttcaagaaagatctgaagcaccgtctttttcttgccctccacaagctcattccgaccgtatttttcctgatgctctttcacctgcgattcagtaagcggttcggcagagccgtttaactgcttcatcgtatcctctccggacatttgataaaatgttttcatctgttttcctccttaagattatatgagtgtgcattatgcacggagctttttcatcctataagaagtaatatttctcatacaataaaaaagagactcctattgcacactaattatgtaatgcaataaaagtctcactgtttaatcacgatacggatgcatatgcatcgtactgacgacatcgcaaacgcttttaacaagcgccagttactcccttttactaaacagtaatatatctgaaataaaagtatgtgtcaacgccttttcttaaattaacagttttttcacaaactatcgatcaaagcttttactttcctggcagcatgttctaaacgaataaaaaatgaaaatatcttatttcctatattaacatactccctgcgctgtcattgcatctgcaactttctcaaatccggcaatgttggctcctactacatagttacctttaaatccgtatttttcagctgcatcagccatgttatggcagatatttaccatgatcgactgcagtttcgcatctacttcttcaaatgtccagcttaagcgctcgctgttctgggacatttccagagcagatgttgcgacaccgcctgcatttgctgcttttcccggtgcgaagaggactccgttctcctgaaggtattctgttgcttccatcgtagtcggcatattagcgccttctgcaactgccatacatccgtttgcaacaagcatttctgcatcttcaagatgaagttcattctgtgttgcgcatggaagagcgatatcaactttcacagaccatactccttttccttcgtgatattcggaattcggacgatattttttatactctgtcagtcttgcacgatttacttctttaatttctttcaatgctgcaagatcaattccttccggatcatatacccatcctgtagaatcacttactgtcactacttttgctccaagttcctgtgctttttccgtcgcataaattgcaacattacctgaacctgaaactgcaactgtctttcctgccagttcttttccgttgatcttaagcatctcctgtgtcaggtataacagaccatatcctgtcgcttcttttcttgcaagagaaccgccgtaacttaagccttttcctgtaagaacgccttcgtaaacgccgcggattctcttatattgaccgaacatatatccgatctctcttgcgcctgttccgatatctcctgccggaacgtctgtatctgcgccgatatatttacagagttctgtcataaaactctgacaaaatgccataacttctctgtcggatttgccctttggatcaaaatcacatccgcctttaccgcctccgatcggaagtcctgtaagggaatttttaaatatctgttcaaatccgaggaacttaatgataccaagatttactgaaggatgaaggcgaagtccgcctttatacggtcctattgcactgctgaactgtacgcggtatcctgtattaacctgaacctgtccgttgtcatctacccacggaacacggaacttaatctgtctttcaggttcgacgagtctttcaagaagagcttctttacggaacttttcctcatttgcttcaattacaacacgaagagattcaagaacctcttttactgcctgatggaattccggttctgccgggtttttcttcacaactaaatcaattacctcatcaacgtatgacatctcaaattacctcctgaatgaatttacggatcatatccgacatagaattttttctactcgtacattttaaaaggaaaatgaaagattgtcaacgtaaaatttcaattttttgcctttattacatataatatatcctattttgaaagaaaaacatcttgttttattcattttgggcgctatataatttaatcagattctttcttccataacgaaaaacaggatgccgtcggcatcctgtttaagtgcacttattaattatatttacgttttctagcagcttcagattttttcttacgtcttacgcttggtttttcatagtgctcccttttgcggatctcctgctgaataccagctttagcacagtttcttttgaatctgcgtaaagcgctatctaacgtctcgttttctttaacgattacatttgacatagtctcacacctaacctcccctccagccttgtattgtgcataatacgactgttcgggtatttttattgcactaataaagattataacatatttttttctcccgtcaactatttccgagcaaaaacttcataaaagcttataaaaaatgcatttttctatatttttacaaaataaaactattctttgatctgttctgcaagaacttcttccgcttttttcaatgcatcctggattcctgacggattctttcctcccgcctgcgccatattcggacgaccaccgccgccgcctccgacacatcctgcgatcgctttcacaagatttccggcgtgagcgccttttttcatcgctccgtctgtcgcagtagccatcagactgactttactatcgcttcctgatgcaaggacgacaactccgtctcctaatttttctttcaactgatcgccaagttctctaagtccgttcatgtcaacgccctcgatctgcgctgccaaaagttttattccttttacttctttcacctgatccagtacgtctcctgccgcactttgagcgatcttacttttcagactttccacttcgctgtgtaatgttttgttttcagcaatcatatgatgaatcttatctgataaattgtcaggcgttgcttttaaaagcgctgccgcatttttcaatttttcttctgtctgcgcataatatttcatcagcccttctgaagtcaaagcctcaattctgcgaactcctgccgccacacctgtctctgaaacaattttcagagccataatctccgatgtgttattcacatgagttccgccgcaaaattcaatagaataatctcccatattcacgacacggactatatcaccgtatttttctccgaacagagcctgcgctcctgtcttttttgcctcttcgatcggcatatttttaatatctacatcgtatgcttttgcaatactttcattgacaagtttctcaacctgtgtgatctcatcttctgtcatcgccgaaaaatgtgtaaaatcaaagcgaagtctgtcttcatttacgcttgatcctgcctgttctacatgacttcccaacactgtacgaagtgctttttgaagaagatgagttgcgctatgattccttgctgaaagagcacgctttttcgcatccacttccagcactactttatctccggatctgatcattccctttgtcataactccgacatgaccgacttttccgccgagcaatttcactgtatcttctactttaaattcaccttctgcagtacggatatatcctgtatccgcctcctgacctccgcttgtcgcataaaacggggtctcctgaacaaagaccgtaccgtgctctccttcagataatgcgtccgcaatctccgtttccgttgtaagaacagtcacgtctgattcccatgtaagatgttcatatccgacaaattcacttgtcacattcggatcgatagactcatatactgttacatcagctcccatataattcgtcacttcacgggcgtcacgggctttttttctctgaacttccatggaggctttaaatccatcttcatccacacagagtcctttttcttccaaaatttcttttgtcagatcgagagggaatccatatgtgtcatacaggcggaaagcatcttcgccgtttaatatcttttcttcttttttctccatatcagagatcatctctgccaaaattccaagtccctgatctattgttttattgaactgctcttcctctttggaaatcacgttcaaaataaattctttcttctcctccagctccggatacccgtcttttgatcccgcaatgacagtttctgcaagctccggcaggaatcctttgtgaatgccgagaagtcttccatgacggcaggctcttctaagcagacggcgaagaacataaccgcggccttcattagacggcataattccatctgagatcataaaagtcacagaacggacatgatctgtaatgacgcggatcgagacatcattgttgtactcttccccgtattctttttccgcaaggcggcatacgtgatcacgaagcgctttaatcgtatcaacatcaaaaatagaatctacatcctgcacaacagacgccagacgttccaatcccattcccgtatcaatattcttctgctccagctcactgtaattgccgtttccgtcattgtcaaactgtgtaaatacattattccaaatttccatgtaacggtcgcactcgcagcctactgtacaatcaggacttccacagccgtatttttctcccctgtcataatacacttctgaacagggtccgcacggaccggaaccatgctcccagaaattatcttcttttccgaatttaaagatacgttctgccggaatccccatcttcttattccatatttcaaatgcttccgcatcgtcctcatatacggacgggtacagtctattcgggtcaaggccgactacttctgtcagaaattcccatgtccactgaatcgcttcttctttaaagtaatctccaaacgaaaaatttccgagcatttcaaaaaatgtaccgtgacgcgctgtctttccgacattttcaatatctcccgtacggatacatttctggcaggtagtcactcgctttctcggcggaatctcctgtcctgtaaaatatggttttaacggcgccatacccgaattgataagcagaaggctcttatcattgtgcggcaccaatgaaaaactcttcatcgcaagatgtcctttactctcaaagaactctaaaaacatttttctaagttcatttactccatatgccttcattgcattttcctcctctttcgctccaaaagcctgttttataatatatcatagagggttatatttgtaaagcggacgccaaaaaaaggcgcccgcttacttgtaggattacaatacatgtgttacaactgaataattaaaaagcggaaataccttttctgtgttatgctttaagctaccaaacctaaacatttaagaaag

SEQ ID NO: 7669 - DNA, 23809 bp, Unknown
  gut microbiota DNA sequence
ttactaaccgtgcaaagtcagtaatcttattctacactgaggtatttttttctcaaccttctttcttggaattccttatatttgaattatacaggaagctcctttatcaataatatcagaccgaagcggcagatctgttttcgatgtcattgcagatttctgcataaaatgctgcgcgaatacaggcagaaaaaaagatccgatattctccggcataatgcatagaaaatatctgatcttatctgttcaaagccgccatctatgtctttgctctttatcagaatagcaaattttctcaaaaatgtcaatttatacatttgtattgcttgttgtacatttgcaccgcttatatcatgctcttttctatctattaataccaaacagacctttcaaaatataccattttttctcaaatagtcacctgttatgcatcttttcatcagttatatttgttcacaatttttctatatgaaacagttcctccgaaaagatcgagggcgcttcctatcgtaaagtcaagttgtccgccgcccaaactccgaaaccgttccaaatcgtcttccgaactgattcctccggcgtatgtaatcggaatttttccccattgcccaagcatatgtacaagttgttcttccattcccgatcgttttccctctacatcaacgccgtggatcaaaaactcatcacaataagaagataattcctcaagaacagcggcgttcaaacgtagattcgtatatttttgccaacgatctgtaactacataataatcttcaccttgttttcggcagctcaaatcgagcacgatatgctcttttcctacggcatgaacaagcttctttagattttctctgcaaaattctcctccgcgaaacacatacgatgtgacgatcacatggctcgctccgcattctatatattcatatgcattctcgtctgtaatccctcctcctatctgcagtcctttcggataaacacgaagagcctctttcgcctgttgttttgtctgttcataatattctgactgccggctgtttaaaagaataatatgacctcctctcagacaatcttccttatacatattcgcataaaatgcggcgtttaaatcagatgcgaaattcgtctttgccatgttcccctcatcttttaaacttccaccgacaatctgttttacttttccgttatgaatatcaatgcacggtctgaatttcatctgcccttctccttatgtattgtttacactattacaagatcgaccgcagacataaagttccttctctctgcggtcgaatcaatcccgattattttataactgttcttatcatgcgacaaaaaactatctcatagagtcatcggcatttcctgttgcatctccctgatctgtatttttcatacggtcgccttcttttttcgctccgttttcatcagtcagatcatccgccgcattgtcaacaccgtctgtgacatcgtctgtcacatcgtcaattccgtctgtgacatcatctgttacgtcatcaactccctgagtcacatcatttaccgcatcatcaagaataccgtctccttttttatctgacttgtccgacgcatcgttgcgatcgttgtctctgtctttatccgttgtcgtctgatccgccgcattatctgttttatctttgcccgcacatgctgtcatgccaaacaaagtgaacacacagagcgtcagcaaaatgagttgtttcatttttttcataagaatatctccctttccataaatattgttgtagttctaatatctgcaatattttcaatatttatacattcgggattttttctttttgctacagagcctttttcctcagtttttccatcgcttttgattcaatctgacgcacacgctctcttgttataccaagactttcaccgatttcttctaatgtatatgtgcggtctttccccaatccaaaccgaaggctgatcacttctttctctctgtcgttcaaagtttcaagaagttcttgtacttcttctttcctgacaagaacgtccatcgcatcttccggcgtcgtctcagatctgtcttctacaaaatctccaagactgtcctcgccatcttcccctaccggagtttccaaagataccggatttcgaatataagaaagaatatttttcacttcctcttctgtccggtcgccaagcttctttgcaatctcccccggttctgcttctcttccgaattcctgctgcagttcttttgctgctttttgcacccgttttatattttccgcaacgtgaaccggaactcgaatttctcttgactgctgatcgatggctcttgtaattgcctctttgatccaccatgacgcgtaagttgaaaaacggttatctttcgtatagtcatacttttcggcagcatgcatcaatccgatatttccttcctgaatcagatccattaacggcaaacctcttcccgtataatgttttgcgatagaaacgacgagacgaagattcccttcttccagtctcgctcttgcggattcgtctccgtctgagattcttctgcccaattctttttcttccgtctcgtccaacagaggaatctcccctatctcattcaaatagatccgaagcggttctgactcctgaatttcttcttttcccatacaaacctcacttttatttatctgttttatattctctttatgttctgttatatatccgatacctgctatcgtttttctctgagctcaccgtttctgtatgcgacaagcagtcgttcaagatcttttacctgacgtttgagttcctcaccgatatccgtatctccgactaaaagcctctccctgactcttttcactatcatcgtttcggaatggatatctttttcctttgcgatcgccgactctgtagattcaaacggctcgtgcgcaacaagcagaagtccatatgaattaaagatcaaagtataacctgcaattccggtttctttctgatacgctttggaaaatccgccgtcgatcacaagcactttcccgccgcatttcacgggattttccccgtcttttcgtttcaccggaacatgtccgttgacaatatgagacaccgccgggtctaacccaaactcttccaatatctgattgataactttttcattttcaagcagggagtaatacggattctttttctctatgtgagtttccgcatcttgcagaaaataccgttcaaaagttgccatcttatcttttccgaaaagcggagaatcaggatgcagccatatataccacatgatgtcctttccatcctgcctttcattctcatcaagagcaaaaaagccttttctcacataagaatccagaacatcataaagttcttttccaccgtaagacttgccgaaaagccgaatttctttcaattttccgtcttctgtgagcggaacacatccgtgatagagaagattatcattgtaaactttatacaaacttcccttgttcagcaaaaacctcatatgcctttgaagcttctcacagtgcagaaacgccttttcaagccgcttcatgatctcctcttcctcttgagtaaaagcgtacggatctttcggatcgactgtaggaaacgccgtatccaaaagcggatatttctttccgtccagttcaatcgtacctttttcaaaatcaattctgtgcaaaagcgccctgttttctaaatgaaatgctttctgccgacggatgatctgcccttccactttaaattgaatgatggagattgctttatgaatcctcatattcatttgcatctcatcaggatctatcccttcaaccgcttttaaccgaaaacaaatacacggatcatccccgtaaatccgaagggcaaatgctgccagaggaagaagattgatcccatatccatcctccaaaatatcgagatttccgtaacgtgcacagatgcggatcacattcgcaatacagccccattgtcccgcagccgctcccatccaaagtatatcatgatttccccactgaatatcgacagagtgataagacatcagtttatccataataatatgaggaccgggacctctgtcataaatatcgccgacaatatgcagatgatctacaacgagcctttggatcaactctgaaattgcctcgataaaatcttctgctcttccgatccgtataatcgttgaaataatctcattataatatgattccttatcatgtacctccgctttctccgtgatcagttcctcgatcacataagcaaaatttgggggaagcgcctttcttactttcgaccgcgtatacttgctcgccgctcttttggcaacttcgatcaaacgatatagatgtactttataccagtcttccatattcgtctctgtctgccggatcaggtccatctttgctctcggataatagatcagcgttgccaaagatttcttatctgcggcactcatcgtatttccgaacacatcctcgatctttcttcggacagatccggatccgttttttaaaacatgagaaaaagcctcatactcaccgtgtacatctgtcagaaaatgttctgttcctttcggcagattcaaaatcgcctgaagattgatgatctccgtcgatgccgccgcgattgtcggatataagtctgacaatcgggtcaaataccgtttctggagttctttcagttctttatattcttctttcatgcttgtctgcccccttgttccacaatacaccgcacaatttatatctctcatgtacgtcggatgtcacaatccgaccacatcgctcatatcatacataccgctttcttttccggcaaggaattttgccgcctcgacagcgccttttccgaatacgcttctcgagtatgccgtatgtttaaattcgatcacttcgtctgttcccgcaaagatcacctcatgttcccctacgatcgtacctccgcgaagagctgaaattccgatttcttttgcatcacgtttctggcggacagtgcttctgtcatatacataatgatattcgtttccaagcgcttcattcaccgaatccgcaagtgcaagcgctgttccgctcggggcatccagtttctgattgtgatgtttttccacaagttcaatatcatatcccgccggagcaagcacttttgccgcatcttttaaaagttttaaaaggagattaattccaagagacatattcgccgactttaacaccgccgtcttctctgccgccttctctgcttttgcaagctgctcttccgaaagtcctgtcgtgcaaagcacaaccggaagtttcttatccacgcaataatccaaaagcgaatccactgctcccgcatttgaaaaatcgatcacaacatctgcgtcttccgtacatttttccaccgaatcaaataccggataatcattcggcgtttctgtatatgtgtcaacacctgccgtaataacggcattttcatcattttttacgatctccgtgatcatccttcccatttttccgttgcatccatgcatcattattttaatcattttattttcctcctgcctgtatcatttcacgtttcaaaaacaatcgttcactacaagtttttttcctgcggctcattattgaatcaaaaacggatttttctctactcaaaaaaggatatcacatttgagttcgcatctcaacatatgatatccttttcacaaagtttctcgtaacaattcagccacgataagcgcacagtgcggttttacgaatggcgtgggctgaactgttacagtttctcgataaccggttcgtcagatcatacccgtctttattcctcatgcaaagataaaatctctgtaatatttgacaggtcgatttccggatcgatcaccttgaaacctatcgtaacttttgtcacgttacagccggctacattgaatttattataccatgatataactccatgatatgacgatgcaggtgcattccccttttcaatacacttcgtatggatcagattgttttttaacacctcatattcaaaagagtctatcattaaataattgctgtcataataaaccgaaaacttagactccatatcaaatatatatttatcggcaaattcaaaataaatcttctctgtccggttatccttcgcctcatattgtatggaacaaactctgctctcattatgatcaataaataaatcttttttagaactttccttttttaagatactttgtaaatcagtctgcttaaaactaagtatcgaatatcccgcgcatatcaataaaacaaatactgcggctattgacaataatttgattttatctttcatgtgaagttcctcataaacctttcaagacaacttatcggggggcagctacacaacagtcaaagcgcccgcaaaacagtgcgaacagttttgcgggcgttctgtacgttaattctgtttactgatgaaaaatgacaattcggtcagtttatgaaaattccggctcgatcagtccgaaagatccgtcctttcttttgtatacaacatttacttcatctgtttctgcgtttgagaaaacgaaaaagctatgtccgagcagttccatctggatgcaggcatcttcagggaacatcggtttaataccaaactttttcgtgcggacgatgcggatttcatcgtcatcagatgactcgtcgtcggattcgataaactcttttttaatgcttcctgacggaacagcagcagtaggatgtccctggcttttcgcaacaagtttgtttttatatttacgaagctgccgttcaataacctcttctacaaggtcgatcgacacatacatgtcgctgctcgtctgctcggagcggatgatagatccttttacaggaatcgtcacttcgattttctgacgtcctttttccacgctaagcgttacgatgatttctgtttcaggagtgaaatacctctcaagttttcctaacttttgttcgatagcctctttaagccccggtgttacttcaatgttttttccgctgatgataaaattcatgctgttcaactcctttttgtatatacttaacataaacatgtgtaaaaaggatgtttatattatgaaaatattataacacagaacagctctaatgtatataataaatcgttttgaattctgtaaattcttcaaatttcattaaattttcataatttatttcatcatacttctcttccgcatccttgaatccaggatttttttgcggatacgcagcgtcttcggcgtcacctccaaaagctcgtcggtgtcgataaaatcaagagcctgctcaagacttaaaattttaggcggagtcagtctcaaagcttcatctgcgctggaggaacgtgtatttgtcagatgctttgtcttacatacgttcaactcaatatcatctgtttttccattctggccgatcaccatacctgaataaaccttttctcccggtccgataaacaaagttccgcgttcctgcgcgctgtataaaccataagttacagattcacctgtctcaaatgcgataagcgatccctgcttacgatactggatatcgcctttgtacggctcatatccgtcgaagcttgtattaatgataccgtttccttttgtatctgtcataaattctccgcgatatccgatcaatcctctggacggaatggaaaactcaagacgtgtgtaaccgccgttggaaacccccatattgcgaagttctccttttctttggccgagtttttcgattacaactcctgtaaattcatccggcacatcaatataagctgtctcgatcggctcaagtttctttccgttttcatccgtatgatagagaacttccgctttgcttactgcaaactcatatccttcgcggcgcatattttcaatcaaaacggacaaatgaagttctccgcgtcccgacactttaaaactgtctgtattttccatttcttccactcgaagacttacgtctgtgttcagctctttaaacaggcggtcacgcagatggcgggaagttacatattttccttcctgtccggcaaaaggactgtcgtttacaataaactgcatcgcaatcgtcggttctgaaattttctggaaaggaattgcctctgctttttcaggagaacaaagcgtatctccgatcgatatatcagaaataccggaaatagcgacgatcgatccgatcgttgcacttttaacttctgttttgctcaatccgtcaaattcatataatttactgatctttactttctgctgtttgtccggatcatggtgattgacaagtatcatatcctgattcacactgatcgttccgttatccacttttccgataccgatacgtccgacatattcgttgtaatcgatcgtgctgatcagcacctgcgtcggagcttcaggatctccttccggagcgggaatatattcgaggatcgtttcaaataacggtttcatgtcctgctgcggatcagacagatcaaggcatgcaactcctgctttggcggatgcatatacaaacgggcactcaagctgatcgtcagatgcgccaagatcgatgaaaagttcaagaacttcgtcgattacatcgtcaggtcttgcttcgggacggtcgatcttgttgatgcagacaatgacaggaaggcttaattcaagcgcttttcttaatacaaattttgtctgcggcattgcgccttcaaatgcgtcgacaacgaggatcacgccgttgaccattttcagcacacgttctacttctccgccaaaatccgcatgtcccggcgtatcgataatgttgatctttgttcctttataatgaactgccgtatttttggacaggatcgtgatcccacgttcccgctcaatatcgttcgagtccataacacgttccgccacttcctgattttcacggaaaacaccgctttgttttaaaagctcgtcaaccaatgtcgtctttccgtggtcaacatgggcgatgatggcaatgtttcttacatcttcacgttttgtcttcataaatatacactctttctttattttcccctgctaagggagtgatttatagttatagttttactgcaactgttatattttatcataaaattttcattttacaagaacgcatgtcgaaattttgtgtcgaacgattctgtatgaaatcagttctaaacaagatgaaaaaaacataaatttagtagtgactcaaaaatacaagcagtgccggacagataccccggcgataagaggagaggagaattacagagcatgtcagataagattattgagaacaatcaggtaacggttataggatcggtggcttcggaatttacatacagccatgaagtattcggagaaggattttatatggtagatattctcgtgaaacggctgagcaattccagtgacaggatcccggtcatggtctcggaacgactcatcgatgtaacgcaagattacaaaggcagaagcattatggtgtcaggacaattccggtcatataaccgtcatgaagaacagaaaaacagacttgttctttcagtgtttgcacgggaaatggagttcatcgaagaagaaccggacggcgcaaagacaaatcatattttactggaaggatatatgtgcaagacaccggtatatcgaaaaacccctttaggacgtgagattgcggatctgcttcttgccgtaaaccgcccttacgggaaatcagattatatcccttgtatctgctggggaagaaacgcacggtacgcatcgaacttcgatgtaggagaacatgtgcgtatactgggaaggatccaaagcagagaatatgtaaagaaattatccgaaacagaaacagagacaagaacggcatatgaagtgtcagtgagcaaactggaatgtattgatgagtaatctcatcatttagcaaatccgggcttttgctcgttgcctatacaaataaggaacgctgcttacaggcagactgtcgcctgtaagcagcgttctttttattgttcaaaaatttttattccttcttctgtctccgcaaaccagcactgctccgttttttccgtcatcgcctgtccgttcgtgccttccatcagctctttcatcagaaatccctcttcgtcatccggcacaagaactgtaagttctactttatctgtatacactgtatcaagaacggataatcccctttgtcctaaaatatactgaatttttccaagtcccgtatagtctgtaataattttcagtttaaacccatgtatcttggttataataaccgtatgagcaagcgcctctgccgccgccgacgtatacgctcttacaagaccgcctgttccgagaagcgtgccgccaaagtatctggtgacaacaacaaatacatctgtcagttttttccctcttaacacttccagtatcggcttccccgccgttcctgccggttctccgtcatcgctcattctctctgccgccggatttcttccgattacatatgcccagcagtgatgtctggcatcccagtgtttttttcggatttcttccaaatgcgcaaacgcctcttcttcatttgaaaccggaaatacctctgctataaaacgggattttttttccacaatttctcctgttccttctgtatataccgtatgataacactccatttttatcttctcctttttcataaaacagttccataccttttctactatagcaaagacatggaacatgtacaaccattatgcggatctctcgcctgtacgaacgtgaagatactgatattatgattaaaattctttataaaatatgaagatttcatttttttctttatttaaaagaccttatttgatataatcatagaagttgaaaaggaggatgttattcgtgaactacggaaaaaataatctttcaaagagaaaatcatcaatctcttcgaaaaagaaaatgaaaaagaaacgcgtaggagttcgtttttttaaagcagttatcacctgtatgcttctgcttgtcgttatagggcttgtcggcggtataatttttgcaaaaaaaatcattgacaacaccccggacgtatctgccgaagacattcagccgaaaggatttacaacaacgattgtcgatcaaaacggcacagtcatcgacactctgaaagattctgattcaaaccgtgtctaccgtacttatgacgagatcacggcaaaaacagattttcttccgcatgcatttgtggcgatcgaggacgaacgtttctatgaacataacggaatcgatattcagggaattttaagagccggcgtcgtcggagtcatgaacggttttgattttaccgaaggagccagtaccctgacacagcagcttatcaaaaacaacgtatttgattttgtcaacgaaaaaacattttttgacagagtggaacgtaaattacaagagcagtatctcgctctcgcatttgaaaaagagatgaacaaaaacgagatattagaagcctatcttaacacgatcaacctcggtcagggatgtctcggagtacagacggcatctacaagatatttcaacaaagatgtggcggatctgaccctttcggaatgtgcggtcattgccgcgatcacacagaacccgacagagtacgatcctgtaacgaatccggaatctaacgccaaacgccgtgaaaaagttctcggcaacatgcttgaacaaaaatacatcgatcaggcgcagtacgacgaagcgcttgccgaccctgtgtatgaccgcattttacagacagccgcgatcaccgaagatacaacgccttactcttattttacagatgccttgatcgaagatgtcattcaagatcttatggacgagaaaggttactcggaaacacaggcttataaccttctctacagcgaaggattgactatcaagtctactcaggatctggcgatccaacagatctgtgacgaagaagcctccaatgatgcttattatccgatcgtagaatacggtatcacagactacgcactgacaatccaccgtgcggacggatctgccgaaaactacagtaaggaaaacttaaagcagtatctgatctctgtacgaggctctgccgctccgtttgttttcagttcggaagatgaagcgaaagcttctatcgaacaatataaaggcactctcggtattaatacagatgcaggcgatattgtagacgaacgtttaaacattacgcttcagcctcaggtttccgtcgtattaatggatcaatatacaggacatgtaaaagccattgtcggcggacgcggagcaaagacgaccagcttatctttaaaccgcgccacagcttccccaaaacagccgggatcttgttttaaagttttatccacttatgccccaggattaaacgagtgcggcatgactcttgcaacaacgatcaaagacgagccgtaccggtacgccagcggacagccggtaaacaactgggataacaaatacatcggaagcgcccgcgtacgctatgctatcgaacactccatgaatgtttgcgccgtacgcactctgaccgagacagtcggacttgaaaagggatacaaatatctcgaaaacttcggttttacgacgcttgtaaataatgatccgaactatccgggtatgtcggatatcgcacaggctaccgccctcggaggtattacaagaggtgtttacaatattgaaatgaccgccgcttatgccgcgatcgcaaatagcggaatttataccgaaccgctcctttatacagaaattcttgatcacgacggcaacgtcctgatcgataattcaaaacctataacacgtcgtgttttaaaagaatcgacagcatttcttctgacaagcgctatgcaggacgtaatcaaccgtggaaccggaacgcctgcaagacttaacaacatgcctgcagcaggtaaaacaggtacaacggaaaacagtactgatctctggttatccgcatatacgccttactacacctgttctgtatggaccggatatgacgaggataaaacactggaacaattttggaatcagtcatggcacgaagtaatatggaagcacattatggatcgcatccacgcagaattagaatataaaaacttcactcctcctgcttctgttgtacaaagaacaatctgtacccagacaggaaaacttgcagtgaacggatgtccttccatcacagagtattttgataaagacactttgacaaaagaaacttgtccgggacacggaaagacagatgacgaaagtaaagatgacgagaacaacgaggataattcgacaaacaacaattcaggcagctccgaaaacttaggaaatacaaacggagatgatggcgatgatgtggatccgattccgcctacgccggatcccgaaccgaatcccgaaccggaagggcctgaagtcattcctcaatctcgaaactgattgccgtaacatctcttaactgtctgcgaatctcatagtgggatgtttacacgcaaaagcgggaatcgccgcactgaactaagttcaatgcggcgattcctgttttttgtttcatcatgatattacaagatttcattatcttctttttttctaaactacttctttattctgtacttttacaattttatttatcttctatttataataaacatctttattcagcactttctctttaaagcttacgatcacatttgtagctgcgtcaccgattacattcaaggtaattaccgccattcccggaagataattcatcgccagtacaagcgaatatccgatcatacataattcagagctcattcccaaccctgtcatgacaacatacaccatcgtcgttcccgcaaccggaattgccggagttcccatcgccgtgcagatagaaagaaaagctgctatggcaagtgttgaaggcttaatatcaattcctgccgctgtcgcaataaatgtaatcgcaatcatatgcatcgctgtcgtaccgttcatgttgatcgtcatacctgtaggaagaacaaaactgctgatttcttttgaacatcccagttcttccgtacatgtctttgtattcagcggaagtgttgccgcagaagagtttgtcgctgccgcaaacaagccgatcttcaacgttttcttcacaaacggaatcggattcagccgggttgtaaggaatatccctaccggataaattgtaaatacaagcaccagacttacaacaatcgtagtaacgatccatacaagcgtcggtttaatatattcgattccatacaccgcaagcgttcttgtgatcatgcaaaaaattgcaaccggtccgatcttatcgatcaggaaattcaagaaaagttgtacgacatcatttaaattttcaatgactttacgaagaggttctgtctttttgccaagcactgtcatgcacaatccgagaatgatcgcaacaactacgacagatatgatctcgttattagatgaaaatgccgaaaaaatattagacggaactgcattgacgactgtcaccagcgggttatatccttccatcgtcaccgcttctgtcaccatctcgttaggaagctgtacgtcgaaccatcccattgttttcacaaaatatgccgctgctcccgcaagagccgctgccactacataaaagcaaatgtatgtgataaatgtcttccctgcaatctttccgagtctctccggatttgccagactgcacatcgccagactcagcgaagtaagtacaagaggaacaatagccaactgaagtcctctcataaacaactgaccgacaatatataaaataccgataccttcaattccgtttgtctttgttacatcttgaaaaaagattgcatccactgttttccatattcctgatttcccgctttccagaagaaattccctcaaaaagagcatgagaaaaccaaccacgaatccggctgccaccgcgaatatcatacgtttcacgatcgtattctttttttctttttctttcatctctccatctccttaactttctgtgtttttcgtttttatccctttatgtctatatcgtcgaatacaatgggatttcttgatatttattgtacattttcggcaaattattgtcaatattatttctttgattcaaagattttctatgttttaaacagatttcatccgttatttttgttatatatttttttgttttcttctattttctttgattcatacattttgtttatgattgttttctacacataatttaatacctatataaaaaaggaatgaccgctacaaaaaaacgcatcggtcattcctttttttattcaaatgataattcttaatcgaaatccgaaaatttcctaaacaatttaataaatcaattcaatcccttgttcggagcaatactctatccacttttctgaaggactcctgtctgtaataatgtaattcaccttctgaagatcgatcaggttcacaaatgccgactgatcaaattttgaaaaatcaactaagagcgcaacttcctcagcctgcgagagcattgccttctttacctcagcttcgctttcgtttgaatcaagcacacctttttcaatgctcagtcctttacagctgatcaatgcaaggcttacgttatatttcagaatgtttgtcttggcaagctgcccttgtaaagaaagtgattttttattatactctcccccagtcgagataatattaagaggagactgctgaaattcacggaatacctcagttgaatttgtcacaactgttatatcaggagactgaggcagcagcttcaacgcctccatcaccgttgtgctagaatccgcgatcatcgttgtctttccctcgaaaagtttcgccgttttgcgggcaatctcctgcttttctttcagatgtttgctcatcctccgataaaaatgaactccttctttttgaatgccttcattccagatcgcaccgccgtgaacccgggtcacgacgccatccgcctccaacttatccaaatctctgcgtattgtctcttccgtcactctgcatattttactcaattctcctacagacgctttcttctgcatctgtatcgtttgacggattgccatcaatctttccttgcccgccatgctttcttccctttctgtaccttttccaccgctattcacaccacttttatttaataataactcctttgagttggtttttgcaagacctttattctttgaaaacatgatttctccttttgaaatattcagactcggaaatatatacaggcaaacaatctttaaaatacagttgcctcttatttatcgatttcttccgcaagctcgcgcatataagcgacatcttccggatcaagttccaattcagctgatttcacattttctttaatctgatctactgttgtcgagccactgagaagattcaggaaatctccttgtgccagtatccatccaagagccagatttgcgattgtacaattatatttttcgcaaagcggtttccatttatccatcatatccattgccgcctgcatattatccggctggaaccattttttcggaatctgtgctccgaccggctgataatctctcggcatcgttcccgaaagaagtcccatctcaagcggagagtatgcctggatcgtcacaccgttttcacgacagcacggaataatctcatcttcaataccacgatcaagtatcgaatatttcgcctgaacaatatcaagatctccccatttcaaatattctttgatctggtcgatatctacgtttgccgctccgatcgcacgtatctttccctgagcttttaactcatttaaaacatccattgtcttttggatcggcacataatattctgatccttccacagactgccaatgtgtcatatacacatccacataatctgttccgagacgctcaagagagccgacaatttcctttttcacagactcgctgttcaggtttttataaagctgaatcccgtttactttattaaacaggtctcctttcatctcctgatcccatgtaactccgcatttcgtaatgatcacaacttcttcgcgattcattttctcaagagcttttccgagaattttttcactgtttccgaaattgtatcccggcgctgtatcgatcagattgactcctgccttaggagcttcccttatcgtatctacaactgtctgaagctcatgatctccgccccacgcagaaccgcctccgatcgaccatgttccaagtccgattcttgaaatatctattcctgtctttcctaatttcatcgttttcataatagctgtctatccctttcttaacctatttcatccaaccaaacacttttaagtatgcagatattatttataatcttcacggtatttcgcaagcatcttatctacgatcgctttatctgtcacaccgcctgtcgcgccgacatactgaacagaaacagctgcagtacagtttgcatagatcgcacattcacggatatcttttccttccaaaaggcctgtaataaatccggatgcgaaattatctcctgctccgatcgtatcgattgccgtcactcctttgcatgccggaacgatcatcgcaccgtctgcattacggatgtagcatcctcttttaccgatcttcatgattacgtttttcacaccgcaggcatataacttatcagccactttcgcttcgtctgtctctcccgtcatttcacttgcctcttcaaaattcgggaagaaatagtctacataactcaacgcttccgtaatatcttccagtttctcattcaatcttggcgacaccatatcggcacaaatgatcataccttcttcttttgctttggaaaatacagatacaagcgctttattatcaaaaagcggattgttgaaaatacttgcaaacgaaagaatctttgctccttttaaagctgacatatccaaatcttcgtacttaaatttccaaagacttccctgacggttcgtgataaaagttctctctccgtcagccgctaccagaccgacattgatcgaagtatcgattgccggatcttgtttgatatattttgtatcgattcctgttctttcacaatgacttaacacaaacgctccggctacatcgacaccgatacagctcatcaaagcaactttatgtcccagtcttgtaataatggtcgattcattaagcgcatctcctccgatcgtcattgcaattccgtctaccggataagatacaacgtcaaacacttctttacttaccgggcgcagcggcagatctacgatcgccgccccgataatcattacgtccaaatctttactcaccttattcatcagcccttccgtcatcaccaaataatttgatcttgtacattgcacgttcttttacagcctgtcttaccgcacgttccacagccaagaacggctcgtctttatgttcgttgatcgcttccatagcagcctggcataattctgtatgtatattgatcttagcgattccaagagagatcgctttcttaatatcttcatctccgatacctgatgctccgtgaagtacaagcggaacgtcaactgcatttgcaacctcttccaaaatatcaaatgccagcttcggctcagaagaataaacgccgtgtacgtttccgatcgcaacagccagagaatcgcatcctgttctgtccacgaaatcttttgcctgtttcggatctgtatagtgatactcggacaacgcttcttcgtagatcgtctcgtttcctacatgtccaagttctgcctcaaccggaatgttataagcgtggaaataatctacgcatcttttgatctctgcaacgttctgttcgtacggaagagcagaagcgtcacgcattacagaattcatgcaatggtctacggcattttgaaggatcgtcatattgcggccgtgatcccagtgaagaattaccggaacacttgcttttttcgccatagattccatcatataacagtaatcttcaaaagaagtatttcccgtaaatcctgttccgaatgaaataatgatcggcgcgcgcagttcttccgccgcatcaataactcccatcagcatctctgcattccatacattaaaatgagggattgcataatgtccttcacttgctttcttttcccaatatctgatatctgaaatcataacttttctccttttcttttcaacgacccaagcttggatttatgcactttcatatcgcccgagtcggatagattcacaattttactattctgctactttgatcacgcctttaaccatctccgtctttttcacaggatcgatcgcttcttcaaatgccttctgcacgtcttcataatcataaatgttcgttaccatatcttttacattaaatcttcctgatgagatcgcttcgatcgtctgcgggaagttattgcaataacggaatgatgtctgaatcgtcacttctcggttaatctttaagaaatcgatcggaaccggcttcgactgtgttcctaccatcatgattttaccgccccggcttacgatctgtactgcctgctgtgccgtaaatacagctcccgccgcctcaaatacgagatccacgccatgatctccgtacatttcttccgatctaagaaccgcaaccgtatcttcttcttttccgttgattactcttgcagcacctaatttttttgcaagttccagacgtttttcaataacatctacaactgtaatatctgttgccccgaggctgatacaagcctgaagaaccatcagaccgattgttcctcctccgaggatgacgatacttttacccggctgtgctcctccgagaacagcagcatgcattccaactgccgccggctctacaagagccccttccatcgttgtcatcccttccggaatatgatatgtccattcttccggatgagtcatatactgtgtcagcgcccctttatagttcggctgtgttgccataaagtcaactcccggacaaatattataacggcctgtacggcaatactcacatgtatcatccggaacacccggctcaataagcactttgtctccgactttaaattttgttactttcgctcctattttaacaacttctcccgccacctcatgtccgagaccgatcttttgattcggatctttcggaggaataaacggtccaaattcaaatccatgaatatcagatccgcacattccgacatactctactttcataagaatttcatgatctttcggctccggaaccggacattcctgtatttcaaaatgttttggagtcactaagattgcttctgaatttttcattttatatccttcctttcacctttcatcttttacaatttttcctgttccccaatactaggagaacaggaaactcatttacctattacttctgtttaatcaacatttccgatatcttctacagattctcctctagtctctacgccgaagatcaaaatacatactccgattattacggcaacaacagagatcaggacgaatactcccgtgcttcccatagaacctgctgcaacgcttgttacgaggaacgggaagaagatattgctgacacgtccgatcgcattacagaagccggaaccggacagttttgccgacgtaggccacatttccggaacatacaccgcggaagcatagcatacgtacatataaattgccgtgttcagcaagaatgttgttacgatcaatgctgtcattgttgtctgctgtcctgtaataactccaagtacagccattgctgccagaagaatcacgcccataactcttctcggaatcttatccatgatcagtgatgcgataaagattccaaacggagcgccgaacagtccgaacattgtcataaactgtgactgtgatgtatcatatcccattgatttcaacaaggacggcatccatgtcatcaatgtatactggatcgtgttcataccgatcaatacgagagaacctacgatcgttcttctcaaaagtttgcctttaaacagagccgagtacggaagctgttttacttctttcggctcttctgttacaggcggaagcggttttcctgttgacgcttcaatttctttttcaatctttgtaaggattgcgtctgcttcgtcaactcttccctgtgcctctaaccaacgcggagactccggaagcttctttgcaataatgatggatgcaataatagaaagaacagacgggatcatatactggattctccagttcatattatagctgattcctgttgtcacgatcaaaaatgcaattccgttacagatcgggtgagcccagtttccgataaaggagttacggcttgaccatacaccacggtttcttcccggcacatactctgtaaatcctgcaaacagaactacgagaagcgctccgagtccgaatccctgtacaagtctgaatacatacaatacataaatgttcggtgcgatcgcgccgccgatcatggcgataatatggataatttcatataaaagaatactttttttacgtcctattttatctccgataggacctccgacaagcgctccgaaaagctgtcctgccgtataagttgttccccacattgcaaggagttttgtacccggttctaaccaatgaagctcgttaagcaaaatattctgaaccgatcctcctattccgtttgaccagcacaccaacaaggcaaatgctgtaacaagccacattttaatatgccatcccgaattcggaaggcgatcgagtcttgcgccgatatttgcgctttttcttgtttccataattaattccctttcttttctcattctttgtgacagcctctttttctatgtacatgaaactgtctgtattgtattttacattccggcgagttcactttttacttcctgttccatgattgcccacgccttttcgatatcctcatctttattccaaagagccggaggtccgagtacaaccatatctgcacctgcttcataaagaggagcataaacgcctgcattcatcgatccgtctgcctcgatcagaaagtcaagcttcatctcttctctccattttgcaagggtacgtattttatcatacatctgtgtgatcaccttctgtccggcatatcctgcatctacgatcataatcgttactttcgacagaaggggaaggtaatatcgaatcgcctctaaaggagctgccgggttcatggcaatcccggctttgcatcccagagagataatcttgttgatcgtcacaaaagcatcaccttcaatgcaatctgtgtgcggagtgatataagctgctccggctgcagcacatgcctcaatataatcttgcggatgttttaccattaagtgtgcatccatcggtttttttacaacttttttcaatactgtcataaaatcaggaccaacgccaaatgtttttacataatttccatcctttatatcaatatgaaggaaatctgcatgttcatcgataaattttacttgatgaccgaaatcatataagtcacaacaacccatagacggtgcaagcattaatttcttttccattgcttctcccccggtcatcaatcctcgtcatcaaaatcatatgtaaagattactttgattgcttcttttttcgccatcagttcaaatcctttttcccactcggaaagtccaagtctgtgagtgatcatcggctgtactttgatctgaccggaagcaagaaggcggatcgcgtttctccatgatgtggagtcatatgccatatgtccgataatgctcttgttccatgaagtaatgtcgttgattgaaaattcaagcggtttgaatcccattcctacacgaacaacttctccgttcggacgaagcatctcgattgcctgtttcaaagcaatgtttgctcccgaacactcaacgacaagacccaagttatctcttccgcagatttctgtacatctttttactacatcttctttggaaccgtttacgcagtgtgtagctccaagctcttttgcaaccggaaaacgaaccggaacatcctcgtcaagtcctaccataacgatgttgaccgcgcccataattcttgctacctgtactgcaaataatccaagcggtcctgttccgaatactacgacatcctgtcccggaaggagatgactttgctgcgcgatcgctttgtatgaattacagatcggatcaagtaccgccgcctcttcatattttacattttccgggatctcccagatcgcatgtttatggattctcaggatctctcccggaactttacagtatttagaaaatccgccgccccatgtattattatcaagacctaagtttactttgctttcacagcagagaaaatctccctgttcgcaagccgggcaaacgccgcatacatgagcgctgttgtcagacacaactctttgtcccactttccagtccgttactttctcgccaacttctacgatctcacctgcaaattcatgtccgcggatcgagttgaattcatcggagccattatccactttatagtgtttcatatctgctccgcagattgcagccgccttgatctcaataataatatcttccggaccgcatgtcggtttcggaacgtcgatcatacgatatccgccaaattcttttccatatcttgctaatgctttcatcttttcattctcctctttttccattctgtattccggggtttcttttcaaattttacttttttcagtcacccgcattttcatgctctttagcttccggccggaaactttatttctttatttgtctatattttatcatatatttcttttaagtcaacactttttctttgtttcaaagattttagtctgtttacacaacatttttttaattttaatccgtttttatcgtattaagtattctttttttgtctattttttacattttgattgttaaaaacaaaa

SEQ ID NO: 7670 - DNA, 9351 bp, Unknown
  gut microbiota DNA sequence
aaaatccggaatgaatccaaaagcattgcaatatttgatgggccactcagagatcagcgtaacgctgaatacatatacgcatgtaaatcttgaggatgccagggaagaggttgcccggattcaggttgtgtaattacgatttttaattgaaaatagcaaggtgtaaaatagaaaaacatacaccttattttacaccttttgctgacgatattatgcgaaaataaaccagattatgccagaaagcaaaaaattacaaaggcttacaaagcccgaaataccaagaaaaactaagaaatgcgaggttatgcaacaatgataaaagtgctttttatctgccacggcaatatctgtcgttctactatggcagaatatgtaatgaaggcattagttaataaatctggtttatcggatacttttttcattgactctgcggctacaagtcgcgaggagatcggtaatccggttcactacggaacgcgtcataagttagaagaagtcggaatttattgcggaaatcataaagcgcgtcaaatgcagaaacatgaatatgatgaatatgattatattattggtatggattcatggaatattagaaatataaacagaattataggtaattcagatcctgaagggaaagtatcgaagctgcttgattttacagaggaaaaaggaaaagacattgcagatccgtggtatacaggtgactttgatacgacttacagagatgtaaaaaagggttgcgaggctcttttgaatgactgcctcttacgcttttaaagcgtaggagagcagtttttttaaattgtgatgaaaacgtttgttttgattttttaatcgaattttttcggaatttgacaatgtttcttctacataatcatcatagcgtgaaaagagagtatgataatcgacagattgtttttgcccccaacgtacaagtatccaattcattgcatcggaactccagtaatccatcggaattccagccattttaagagcggtaatatattggacggcctgtgtggataattttgcgatctgctgattgcggatcgtttcttctttttgatatttgccccatttctgaaaaacgcgttgggtcagtgttttcttttgtgtttcctgcttcatcaaccgaatgcttttattgagtatagttctaagctgattagacatattccaatatgtgacaaaagaacctgtattttcttcttcgttttccggagttaatgtaaatgttttgaaaacgcgttcggtttcgccgaatgtttcttggttatatttgcggcgcttttccggattcgataaaacccggtatgcctcaagtatctcctgcataaaagcggttgtgtcaatatttttatgtgcatttgcatctggatgatatactttcgccagtgcatttttagcagttgtgatctcgtctaaagtcgcatctcttgaaacacctaaaatatcataataagtatgagacttcattagtgacctccttattaattttcccgttgattctcccttgcttaatatactctacggattgataaaagtcaatgaaacaggtaaaaatgagcaagatttgagaggcttttataggatagttatttttagtcagcgcagttatatgctgaaatctatcttgaggaaaaagagagattaagtaatactttttgcaggatttgcttatatttataatagatgaaattttggagagtggatcaaaaatgagaaatgcaagaacggtaatcgcaggtgttttatgtgcattgatgatctgttgcatgttgggaaacgcatatacggtaaaaggcaaggaaatgttattagcgccggaaaataaagaaacaaaagatcaaaatacagaaaacagcaagatagaagataacaatacagagaatgaagaagaactaaataaaggcgcaaaaaaggaggatacaagtatgcaaatcggtgctccttcagctcttttgatggaagcatctaccggaacggtattgtttgaacaggatgcggatacgaaacgtccacctgcaagtgttacgaaaattatgacaatgcttcttatttttgatgctgttgaaagtaaaaaaatttctttggaagataaagttcccgtatcggaatttgcagcgtctatgggcggctctcaggtgtttttagagacaggggaaactcagacggtcgatacaatgctaaagtgcatttcaatcgcaagtgcaaacgatgcttgtgtggcaatggcagagtatataagcggcagtgaagaggcttttgtacaagaaatgaacaagcgggcaaaagcattggggatgcataatacaaattttgtaaattgcaacggtttagatgcacaggggcatgtgacgactgcaagagatattgcgctgatgtcgcgggaattaattacgaaatatcctcagattcatgagtatgcgatgacatggatggaaaatattactcatgaaacgaagaaaggtacttcggaatttggacttacaaatacaaataaacttgtaaggcagtatgaatatgctaccggtttgaaaacagggtcgacaggagaagcaaaattttgcgtttcggcaacgggaaagaaggatgatgtggagttgatcgcggttgttatggctgccgatacatcgaaggagagatttgcggatgcggttaaaatgatgaattacggttttggaaaatgtcaggtgtattcggacgagaaaccgatgaaaacaaaatatgcagttgtaaaaaatggagtcgaagaaaatatagaagtagagcgcggagaaaagtttacttatctagatgtaaaaggaaaggatatgaagaaaattaaaaaaattgagaaaataaataaaaagatattagcgccggttcgaaaaggagatgttgtaggctcgatcgtttatactctggatggaaatgaaatcgggcgcagcgatatcatagcaaaaagaggtgtacaaaaagcaggattttcggattatttaataaaggtatcggcaaaatttttgattggagaaaagaattaataaaagctgctttagatctgcggaataatttcacacaaaaagttgtttacgtgctgatgtgaagaaatacttgagtttcagaataccgctgttttataatgagagaaaatgaggaaagttttttataggaatatcgttaaaggagttttataaatgaataatacagcatggtggataattatttttatccttattttgctcattttagcggcaggagaaatttatcgggaaactcatacattccgggtgagaaaatataaagtaaaaacgaaaaaaaacatcggcattcaaaactgtgtaaaagtgatttttttaagtgaccttcataactgtgtatacggaaataaaaacgataaattgtataaggcgattcaggcagaaatgccggatatgattttaatcggaggggatatgctggtcgcaaaagaaggcagttccgtacaggaagctcttgagtttgtgaagaaattaccgcatatttgtcaggtgtattacacaaatggcaaccatgaacagagaatgaaagaaaatacagatatatacggggatacatacgaacgatacaaagcaaagctggaaaattgtggagtatgctttttggagaataaagccgaaaatatagaaaaaaacggtatgaagtttagtatctatggcctggaactggattcgtctgtgaatagaaaatttaaaaaagcagatgttacggagaaaacggttgaagaaaaaatcggaaaaaagggaaaagattattcgatattgatggcgcataacccggcatatatggatgcttataaaaaatggggagccgatttgatcctatccggacacttgcatggaggattagtgcggtgtccggggattggggcagttgtgacgccgcaggggtttctctttccgaaatattcaggggaaatgcgcagagaaggagaacagacgatagttgtaagtagaggactgggaagtcatacgatcaatattcgtttgtttaatatgccggaggttatcgcaatcgaggtctgtgtccggtaataaggcggcaagctgacgaagtaaaaaatatatgatccggcagggaaaacaatgacgggaaaacgaggcggaaaaacgataaagacgataaaagaaaaacattgtcaaaagtaaaaagctcctttataatgtagagttggcgttagaaatttctgcgattttcttttgttgcggaaatggtgaactggcgaaatgttaagcagctgtttaaatgatggagataatttatgggaattccggtaaaacttgaagtttttgaaggtccgttggatcttctgcttcatttgatcgataaaaataaaatagatatttatgatattccaatcgtagaaattacgaatcaatatatggaatatataaggaatatgcaaaaagaagatctgaatattatgagtgaattccttgttatggcagctacgcttttggatataaaatgtcgaatgctgcttccgaaagaggaaacggaagagggggaggaagaagatccgcggcgtgagcttgtagaacagcttttacagtataaaatgtataagtatatggcgtatgagctgaaggacaggcagacggatgcagacatgatactttataaagatccgacaataccggaagaagtgaaagaatatgcagaaccggttgatctggatgaacttcttggagatcttacattgaaaaaattaaatgagatatttaaagaagtgatgaaaaggcaggttgataagatcgatccggttcggagcaagttcggaaaaatagaaaaagaagaagtcaccgtatcagacaagtttatatatatacacgaatacatgcatacacatcataagttctccttccgacagctactcgagaagcaaaagagcaagatgcatattgtagtgacatttctggcggttttagaaatgatgaagctgggagaaattcgtgtggaacaggaagaaacatgcggcgagatcatgattgaaagggtggaagaggcgtatggaaattgaaaaacttcaaagtgcgattgaagcaatcttgtttacgatgggagattctgttgaaataagtaaacttgcatttgcaatcggacatgatgaagaaacgaccaaaaaacttgttcggaatatgatggagcgttatgaaaaagaggatagaggaatccgtattattgagttggaagattcttttcagttatgtacaaaaaaggaaatgtacgaatatttaattcgtgtagcgaaacagccaaagcgctatgctcttacggatgtactcttagaaacactttcaatcgttgcctataagcagcctgtaacaaaattagaaatagaaaaaatcagaggtgttaaatcggatcatgcagtaaataaactcgttgaatatggattaattgaagagacgggaagattggatgcccccggaagacctcttttgtttggaacaacagaagagtttcttcgtcggttcagcgtgcagtcgttagatgatcttccgatgctgaatccggagcagatcgagcattttaaagaagaagccgaagatgaagcacagttgaaattagatatttaaaaacaggttgaaaaaacagggatggcataagcggtgcacatcctgttttttttgcaacagtgaccgtctacaatctcgaaatgtgttttttgtactgtggatgatgataatatttgtaggaataagcttgtatgggagggcatatagatagaaagactatcggcatagaaggtgtttcggaatggaaagaaagaaatttaaaaagagatttaagatgaatacaagaagtatactgtcattcataatgttgtttgcgttatgtctgtcggcagtctggaatatttcatgggctgattgcagggcacaagagaaaattatggatgaaagtcacaagagtattaaggtcaagccttctgatctatacgcccgttcggccgttttaatggacgccgagacagggcgtattttgtttggaaaaaataaagacgaacagatgccgatggcgagtacgacgaaaattatggcatgtattctggcgcttgaaaacggaaatttatctgataaagcagaagttagcagcgtcgcgtctgcacaaccgaaagtaaagcttggaatgacacaagggcagactttttatttaaaagatcttctctattcgcttatgcttgaatcgcataatgattcagccgtcgcaatagcagaatgtattgcgggaaatgttgataaatttgcggatatgatgaataaaaaagcttctcagttaggctgcaattctacatattttattactccgaacgggcttgacggacaggatgaaaacggaattcatcatacgacggcagaagagttggcgaggataatgagatattgcattatggaatctccgcaaaaggaaaaatttttagaaatcacacgggcagatgcgtatacatttaccgattgcaaaggagaaaaaagttattcctgtgtaaatcataatacatttttaaaaatgatggatggagctctcagcggaaaaacagggtttacgcaagatgcaggatattgttatgtcggagcgctgcgaaaagacggaaaaacattgattgtggcgcttcttgcatgtggatggccgaataataaagggtataaatggtcggatacaaagaaattaatgacatacggaatggaaaattattgttataaagagatttctccggataagatagacagaacagaaaaaatctatataaaaaacggatatacaggagggtttcctaaaaaaggaaaagatcttttagaagtagagatctcaggggaatctaaaaaaattttagtaggagcagatgataaagatgagatagaaataaaaattaagaaggaaatttgtgctccgataaaaaagggaactgtaataggagagattgtttatcgtgtaaatggagagcggatcatatcatatgaggttgttgcgggaaaaacagtaaaagaaagaacactttggatatgtgcagaatatctacgaagaaaatttcttctgtaaagtatgaaaatacgaaacattaaaaaaaatcaatataaatgattaaatttgtcactagaatgagtaaatataatgtgatagtatgtgaatgataaaaaaaagcaatatcattgatataatataaggagaactgtaatgatgacaacgagagaaaattggaaaaaatatgaaaaaacttattttatgcctccgacaccttgttacgactgggtaaaaaaagattgtgttgataaggcgccgatctggtgcagcgtagatcttagagacggaaatcaggcgttgatcgaaccgatgagtcttgatgagaaattggagttttttcagcttctcgttgacgttggttttaaggtgatcgaagttggttttccggcggcgtctgagacagaatatcagtttatcagagcattgatcgagcaaaatatgattccggatgacgttacgatccaggttcttactcaagcgagagaacatattatcaaaagaacatttgaagctgtgcagggcgcgcctcatgcgatcatacatgtatacaattctacttctgttgcacagagagaacaagtatttaaaaagagtaaagaagagattaagcaaattgcggtcgatggtgcgaaattgttgaaaaaactggcaaaagagacgaccggtaattttacatttgaatatagtccggaaagttttcagggaacagaagttgactacgcacttgaagtgtgtaatgctgttttggatatatgggagccgacttcagataataaggcaatcatcaacctgccgaccacagtagaaaatgcaatgcctcatgttttcgcaagtcaggtagagtactttaataaatatctccttcacagagaaaatgtattactgtccttgcatcctcataacgacagaggatcaggtatcagtgatgcggagctcggtattttggcaggagcagataggattgaaggaacattgttcggcaatggagaaagaaccggaaatgttgatattattacattggcaatgaatatgttttctcaaggtgtagatcctgaattagatttttcaaatatgagtgatatatgtgaagtgtatgaacgagtgacgcgtatgcatgtctctccaagacagccttatgcaggagaacttgtatttacggctttttccggatctcatcaagacgcgatcgcaaaaggtatggcatggagagaagatcggcagtgtgataagtggaacgtgccgtatttaccgatcgatccgcaggatgtcggaagacggtatgattctgacgttataagaatcaatagtcagtcaggcaagggcggcgtgaactatatcttgaaacagagctttggaatcagcctgccggagaagatgaaagaagaagtcggttatcttgtcaaagacgtttccgacaaagcgcataaagaacttacgccggactgggtatatcatatttttgaagataactatattacggcaaagacgatttttacagttgatgaatgtcatttcaaacaggaaaacggaatggtggctgatgcggtgatccatcataacggtaatgaccgaagaattgtgggtgtaggaaacggtcggttagatgcggtgagcaatgcgataaaacattattttgatgtggattatcagttggcattttatgaagagcattccttgacaaaaggctcttcttcgagagctgtcgcttatgtcggcataatatacaataaaaagaaatactggggagtcggaatagatgcggatattataaaagcgtcgatagaagcgcttgtagttgctgtaaataaattgagtgaaattgtggatggcggaaaagatgaaagactgctggagattacaaattatatttatgcaaattataaaaatgtgacattagaagatctttcggaaaaattctttctgtcaaaaccatatttgtcaaaatatattaaagaaaagtcaggcatgacattcggcgatattctcaaacagatccgaatgaaaaaagcgcgtgcaatgcttagaagcgggaatgccactgtagaaagcattgcagagatggtcgggtatcagaatgtagaacatttcaatcgagtgttcaaaaaaatgtatcatacaacaccggtacaatatcggaataaaaagtaaaatgataaaaacagcatgatagcaggggataggaggaactatcgctttggtgactaataaatctcaaagcgatagttccttttgtgtaattataaatatttttgaaaataaaggattgtttatgatgcacaaaaaaaataagaaataaagattattatatat

SEQ ID NO: 7671 - DNA, 17664 bp, Unknown
  gut microbiota DNA sequence
agataattatttacattgtagtagtgatgacaggcggtatgccggaaatggtatttgaatatattttaaaagagaacggaattgaccctgaaaaagatcttacaattatccaaaatattgatttcggatctacagctccggcttttgcggatggccgcggagattttacgattgaatttgagcccggagcgacttctcttgaatccgaaggaaaaggtcatgttattgcatcgcttggcaaagacagcggctatgttccttacaccgcattcagcgccaaaaaaagttatctgaaagaaaaccctgatgtgatccagcgttttacaaacgcgcttcaaaagggaatggattatgtccgctctcacagtccttccgaaaccgcatctgtaatcaagcctcagtttccggaaacaacacttgagatgatcacgaccatcgtaacacgttactatgaacaagacacgtggaaaagcaatctgatttttgaagaaagcagctttgatctgcttcaggatatcctagaaagcgccggggagcttgaaaaaagagctccgtataaagatcttataacgactgaatttgcagaaaatgccgccaaatgatataatagcttatatttgatgtgacaaacactaaaacaacgggagatttttatgattgacaaaagacttgttccttacagcggtttaaaaaaagaacctttttcaggcagccataacggaatgcggtacatgatgcgttcagacaatggcagagacagcacaacattcaccgtttttgtctatcctgaaccatggtgttttgaacaaacgccggaagatcaaattgaaagtcatacttttgacctttccgaagaagggcttgatctggcgatcacatggttgtgggagcggtttgaagccgaacgtgaccgttggacgcaggcatcacaggaaataatgcatactgtcaaaaagcatacactttagtttctttttagaaattttaatttttcttccatatattgtcacatcacattcacaattacgtgttatcttaaatatatgaaaacgataggaaacacaaaacagtgtattccccatcgtccataacaacagaaagcatgatcaaaattcagtttctgttgtttccataaaaggagacgacgactgtatatgcagtcggtatgtacagtcgtcggacttcgcctaaatatgaaaaatattaaaacagcggtatcttattatctgttaaggatcgactgttattcattcaaaaacaatattttcccctcatcgatccacaaatagtcaggaaatccttttttctctatttcttccattttttccctttgaacaaaccaacaaatcatagttttgtctttttcaccgtttttttctgtactgtttcctattctattctctgccgcaatataatagttctgctcaaacggaaggcgggcgctgctctcaagttgaaatttaagcatattttctccccttgttccccacacaggaataaaatcatgtgcccgatacccaatccatttcgcatcttttggtacttttctctttgtctttaagcaaattccccactcctttgcttctactgtatgatcatctatatagataatacttgagaaatttttacatcctgtaagtatggcggcagtcttatttttcggattttgaaacagctcctcggttttgccggatgcgacaatcctccccttatccataacgaaaagctcttcactaaaacggtaaatttcatctcgattatgtgataccataatcacagttcccatatatgactctaacatctgaagcacttcttgctccaatcggtcttttaaatacagatcaagagcggaaaagggctcgtctaataaaataacttccggttcataagccataatccgagcaagcgccgttctttgctgctgtcctccggaaagctgctttggataatgtttttccagacctgccagaccaaacttttgaatcatctctttgacccgcttatgtatatcctgcttatttccttttagcccggccgctatattttgctctactgtcatcgtcggaaatagcgcgtaattttgaaacaagtatccaactttacgtttctgtgtttttagatttgttttcgtttctttatcaaataatatatttccgtctatcttaatgtgaccactatcaggagtctctattcccgcaatactttttaatgtcatacttttaccgcagcctgatgcccctaaaataccgattcgttttgactgacttttaaaattgatatccaaactgaatttatcccattttttccgaatcagcatatcaatcgccatcttttaccacctcccgatatttttcatctttcgtccggaaatgaaattcataagaaaaataatgacaaaagcgatcagaactacaaccgaaacccaaattcctgccgtaacataatctccgtcctgaatgaccatcgcaatcttctgagcgatcgtccccgtctttccttgtatatttcctgccagcatagacgtcgccccatattctcccatcgctcttgcaaatgtcaggattgttcctgacgcaattcccggaccggcagtcggtataacgattttccaaaaaattttcgtctctgacatgccgagtgtacggcctgcatacacgagattcacatcaatttgctccattgccgctcttgcgtttcgatacatcagcggaaacgaaattacaatcgcggcgatcacacatccaatccatgtctgcacgactttaaaaccaaactcttcaaataaaaatgctccgaccggtcttctcctgctaaacaacaacagtaaaaaaaagcctgctaccgtaggaggcatcaccataggaagcgtcaaaatcccatctagcaccgcttttttccccggggaagcttttactgcttttccagccgcaaatatcccgagaaaaaacgaaatcaccgtagctgccacacctgttttcaaagaaatatacagagggctccaatccagatttttcaatatttctgttacttcatccattatttatactccacatctatttgcgtacgaatgcattatctcctgccttaacctgatctgaatgcacactattttatatccgtatcaaaataatatgactcaaacacttttgccgcttcatcagataaaagaaaatccataaaatcttccgccgcttcggtctgctttttatcagcttctttattcacaatctgagcgatcggatagatcacatctccggtcagatcagaacttactttttctaaaatcttaatatcgtcttcgtatccgtatatatcagaataataagtcgttcccacttcgcatgaaccttccgcgactgccatcagcactttgcttacgttatcctgctcgctgatctcaactcctccaaacgcttcggaaatttcctgtgccgtaatagaatccggatcgtttgaagtatggataattcccatattcacaagagcctgtcttgtatattttccgacaggaacgcttcctcctgccagcgcaatgctctctgcatcctgaaggtttgccagccctttgacttttgttttgctgtctttaagcgttataacgacaacctgattattcaccacatcacttctcgttccgtctacaagaaatccgtctgcttcaagcacatccatctgtttctgagctgccgaaaagaaaagatcgcattcatatccttcttcaatctgcgtcagaagagttccggaactatccgcgttgtatatgatcttcacattcggatgatccttttgatactcctttgcaagttccgtcataactgtattcagactcgccgcaataaaaacctgtatttctgtttcctcctctgccgtagcctttccttctgtacccatatccccggcagattcttctctttgctttttgccgtttccggtatcgcttcccgctttgcagccaaacatggcaactgaaagggcgagaacagcaatcactgcaatgactctttttttcatattatttccttttcttttatttacgcttttttattttcttccgtttctttccccagattctccagatccctcttgctgtcgatatctttgagttcttcccggcttgtctctatgatacgtaccttttcttcgtattttgtaagcatttgtctgccgccttcatcccctgttaattctaataattccgcaaaacagtgagccggccacaaaaccggatttcctttttgtccccgatatcccgcacaaataacgtttttcttatgcagcgccgcatcgtttaatattctttggattgtggatattttcagtttcggctgatcgcacactgaaaacaggattccgtccggtgcacccgattttctgtctgtcccgctcttaaaactatgagatactgcctttaagccaagtacgacagaatgtgcgatgcctttttccggctctttatttctcacaacaaagattcctcttttttcggcttcctctataatcttctcatcccctgtaacaataaacagttcaacggatgaaaaagcctgcattttatccatcatatgcatatacatcggcttttgatctatctttgcgtgaagtttgctttccccacgttcccctgagaatcttgttccctttcccgccgccaatataacgactgcataatgcccttttattttttcaaagcgctctgccgcttcaagcgctccgcctcctattgctcttgccttgtccgaaatcgtctcgcagtgggaacgctccgcgcgggcatctatatctccgattttcagattcttcttcacatacgcccccggctgcagcattcctctcacgatcccgcccatttgggcgaaaaccggttttcctccggttactgcaacaatctgccctttttcgactatatcgccgattcggactttcggttctattatcccgtcttccgaagcacgaatgagacgctcggtcgtatatcctcctatgtttcccggaactcctgtatccgcaatagcgcttccttcccatattaccgaaccgagagtatgacctctttttgtctcgatcacacaatgacagtcttttcccgctgtaaatcccggacctattccgatcacaaaaggagcgtccgtaatcttagttccggtatttttctttgcaataatagcatcaacgatcacatccggtttataccattttcgacaatccgcctttggatcaactataacagggattttgccttcctccattatcgcttccgcatcttcctgtgtctttgcagataccgcttccatctcttctacaatcgcccgcctgtcatataccgcccttgacaaagcaaccgttctccttaccgtaaggggctgtgcgatctctgtcatcaaaatctgatgacctgctccgtacagtctcgatgcgattcccgtcgccaggtcccctgcgcctttaattaatattttcacacttttttcctcttatttttattctaaagtttctttgaatgcaaagatgtcactacaatattttccactccccgaacattcaattctctgcagacttcaagcgctgcttctcttttagatgcactgtctgctttatttaaaacaaccgtatactgcgcataaggcggacagccttttctgcccgccttatgcgatgacgcaagtatcgcgatatcttttgccgtaacgaactcttctccgcctttttctaagatctgtgctgctctttcccaccgaaaacaggttgattctaacgtcctgcctattgcatctaacccatatacggaaacaacatgtcctgtttgactcggaatgaccggttcatgttctgcgggaacttttaacggaagtcgttttgctccgtctgcttcgaccagtatcggcagctcccaccaaaagatctcgtctaaaatttcttttgcaggcggcgccgttttcccggaaatcaaatccctgcttccgatccacactctcccgaactttcccaacgtatcctttattttaccgatagatgtatcttctaaaaaatatggtttattttcatgcatgatcttcgttgtagtcgtaatgatcacatgttgtttttttcttacacactcgtcttccaaacgatgcaaaagagttgtttttcctcccgctcccacgaccgagatgactgatgtgttcacagaaagcgcctctgacaaagacatacgttcacacaattcattatttttatagataaacaccatattattctacgccatgacggatatacattcctgtcttttcttctatgatttttccgttctctgccacaagttttcctctcaaataaacctgttctgcccttccttcgatctctgctccttccaacaggcaatagtcgcatgcagactgatgatccgccgcagtcatcgtccattccgtgttaggattccatatgacgatgtccgcgtcactgcccggaataagtgcccctttccacggatataatttaaataattttgcgggattctccgaaagatatgcacacatctgctctgccgttatctttccttcattcactccgaactgccacataagcgccggacgttcttctgctcccggcataccggaaggcgtcagcataaaatcctcttctcctgcatttttctgttcttttgtaaatccaaaatgatcggacgctatcgtctgaatccttccttctttcaatgcatcccacaatatatcgctgtttttctgtttcctaagaggcggaacagttacatattttcgcgcttcttctgccgcaagagcatatttttcctcattcagaagaagatattccggacacgtctcgacatagacggtctgaccgatttctctcgcttttaaaatctcccggtatccggcagccgtacttaaattcacaatgatcaccggaacatccgcacatttggcaatcttcaggatgcgccccaccgcttctgcttccgcttcttttgggtgtatccatgaataatccgcaatatccgttcttccttttgttttctcaagttcttttaaacgagactgtacaatcccgtgattttcgcaatgaactccgacaatgccgcctagttctttcacccttgaaaaaatctcgtaaatctgtccgtcatccagcatcatgtcatacgccgtatataatttgaaagaacaagtctccttttttacaatctcccccagttcctctgcaacgtcatcgttccactcattcagtgtaagatgcagcgcataatcacatgatgcctcgccttctgcttcctgacgtttatcgtcaatcgcttctttcagactttttcctttcttctgctctgcaaaatctatgatgcacgtcgttccgcctgccagcgctgcctttgttccggtttcaaacttgtctgccgccgtaatatcattaaactttgccgccatatgcgtatgagcatctataaaacccggaaaaagaagctttcctctcacatcgatcgtttccgcatcctgaaattcaagatttttccctgccgcaagaatcttttccccttttaccaaaagatcgatctttttcagaccttccccgctgactaccgttcctcctttgaataaccgtttcatcattaatccccttctttctacttgattttataccttttataaaaataattcgttctttacttaacgtaatttcgtttccttttccgtcgttttctccttcggaaggatcaagttcagtattacggcgaaaattgtcgccaaaacaaccggagaggatgcaaatgtattgtttatgatcgcctgaaagttttcaagattcatactcaggttcaaagcgctgtggatactctgcgtcatttgatccagacatccgccgcttaatgaaacacccattccgatcgcaatagaaagtccggctaccgttgcattacgggcagtcagtttttccgttacaagcagtcggattcccgtcattgcgatagaagcaaacaccgaaacgaccgcgcctccaagcacgcattgcggaatcgtccttaataaagccgaaaacttcggaatcagaccggctacaagaaggattcccgccgatgtcgcaaacacccttcttgaaatcactttcgtcgtacctacaatgccgacattctgactgaatgttgccgtcggaggacagccgaaaaaagcgctgataatatttcctattccatatccgatgataccgccgtttaattccctgtctgtcgggagacgatccattccgccgcttgtagttgcggaaaaatctcccatcgcctgaatggaattgactaaaaataaaattgccaaaggtatgatcgccgatatttcaaatttcataccaaactccatcggtttcgggatctgaaaccatcccgcgcttgaaagaactgaaaaatctaccattccaaagcaaagcgcgagcacatatccacacaaaagcccgatcaatattgacgccagtttaaaaagacctttcccataatgatttaacgcaacgacgattgcaagcgtcacaaaagcaacgacccaattctgccaggaaccaaacacaagcgccggcgtctttccctgttgttctactacgagctcatatgtattggccggatttcctgccatataattgatcgctgttttatacaaagacagcccgatcgcaaaaataaccgtgccgatcacaagcggcggaaatacttttctgatctgtttgatcgtcaatcctacaataatcgctatcacgccgcctatgagcatcgctccgagaatcgtatcaatgctttttgcctgtgcggcgattgccgtcatcgtcggaacgtaagcaaaactcacgccgatgatcaccggaagccccgatccgatcctgattttatttccatataactgaagcagcgtagacagcgccgcaaagacaagagacatctgtattaaaagtcccatatctacattgcctcccgcattattcgccgcatttgcaaccaaaattgccggcgtcacacatccgactaccgccgcaagcacatgctgcgccgcaaggggaaatacctgtcccgccgacggctttccgtcccacttaaacaactctgaattatctttttttgtctctcgtatacccatcttacttttcctctttctgactgatctttatccttccttgatacaggaaaatctccgaagattttttctctttttcctctcccgtttttcctgttcataccgccttttatcttctattagaatatcattaaatataatgaaatgcaataatcgcccattatgctttccccctcttcttttcatctgagcacacctcaaaaacaagcacggtacactttcggattcgcctaaaaatatatacaaggcgaattttttgatgtatgataagagaatgcaaaatattttttcaggaggtagatataatgttaaaatatgttgaaacaaacaaagcaccggcagcgatcggaccatattcacaaggtattgtagtaaatggaactgcgtttttctccggtcagattcctctttctccggaaaccggtgaagtcatcggaacaacgatccgggaacagacagagcaagttatgaaaaatatacaaggacttctcgaaagccaaaacgcttcttttacagatgttgtaaaaacgacatgctttcttgccgatatgtctgattttgccgcatttaacgaagtatatgcaaaatattttacaggaaaacccgcccgttcctgcgtcgccgtaaaagatctcccgaaaggagttttgtgcgaggtggaaacaatcgcggtcattgaagaaaattaaacatcgaaaggataagccgaattcttttcaagaaacagcccgcgaaggtttcattctccgcgggctgtttcttcatttatttatcttttatttgtcttttatttttctcttttccttaagaaagatcgatttcttttccttttacatattttccgactacttcccgttcatccgccagatagatcatccgttccagtcggcttcttatatcaagttcctggggatgcgcaagcctgctgtcatccagaacgactgcatcaaattcgtatcccggttcaaagcttccaactttcccgaaaaattctcctcctccttttgtcgccataaagaaaacttcttctgacgtcagcgcttctaaactatcgtcgcaaatacgccaacgcagttttgacgcctgaacggcatgagccattgcccgaaacatattttccgtacttcctcctgccacatcgcttcccaatccgacatgaagtccttcttcaagaaactttcttatcggcgcgatcccggaagacacattcatattagactcgggacagtgtgcgataaatacgccgttttctttcatcctgctgatctctctttcatcgctgtgtacacaatgcgccataatcgtacgtgtatctttaccgaacaatccgaatgtatcataaacgtctccgtaaaactcagaccacggacaaagttcttttacccatgcgatctccccgaagttttccgacaaatgtgactgaagcggaagctcataacgtttctgaagtttttttagttctttcataacctcatcggtacacgtcggaataaatctcggcgtaaggatcggatatgtacgactgtagtttttctgaattgtctcctcaatccactttaaagtttcttctgtcgactttttcgtttcttcaactaaataatccggcgcattccgatccatattcactttcccgacaaaagtactcagcccgctttgttcaagcatatccataagcaaaacagtcgccggcctgtgaagagtcgcaaatacacacgcccttgtagttgcactcttttgcatatttttcacgaaaatccggtatgacttttctgcatagtctaaatcacaaaacttcgattcctccggaaacgtattcgtttcgagccattctaacaattccatatccattcccagaccgcggtacgaatactgaggcgcatgaacatgaagatctgtaaatcccggaataatcagcgcgtctttgtaatcccgtatcggatttcctccgaatttaaacggaagcgtcttatagacgccctccacgattccgtctttgcagactacatatccattttcacaaatcgaaaattctttctgatttttgctgtatacaatatttccttttaaaataaaaaccgattttcttttcatttcactgcctcctttccttttcggttatatcatctcaagcatcacttctacgacgcctccgcataccattccttcctcttctgcgtcgtctgccgtcatatcgactttacaaagttgaaatacaggttcgccttttcgcatcataagcagggctttttgcatgacttcactttctacacatcctccgcctatcgtacccgttatgcttccgtcttccattatcagcatcttcgttcctacgcttctaggcgcagatccttttcgggaaacgatagtcgcaagcacttttttcaatgatggttccttaaaactttcttttgtatcatttttcttttcaaaaagcttctccgacaactcttttgaatatccgcccgctttttctctgctgttttttacttcgattatttccgccatgatcgaaacggcgatctcctccggagtctctgccttgatcttcaatcctatcggcgtgtgtacccgctctaaatcttctctgtcgataccttttttctcaagctgatcttttacgattgcaacccgccgtttactgcccatcatcccgatatatgcattttgcttttccacgattatttccagacattccgcatcgtatctgtgaccgcgcgtcactatgacaaaccatgtatccgagtcaccgccgatctttgcaagtccttccttaaaaggagcgcaaatgacattatctgctccggcttttcttacatgatctgcgaatttcggacgatcctcaagaacagtcacctcaaacccaagcatcttcccgagtttcgtagccgcagccgaaacgtgtcctccgccgcaaattacaagacggggaattcttccgattcgttcacggaagattctgctcttgccttcacatccgcttttttctctgttttcctttttcttttcgtccggtctttcattttgttcttcgtcttgagcaaaaatcccggaaagaatccgcttctttccggcatctttgccgcacaaaacagtctccgtccaaacatccccgtcagaaagatccagtaccttttttaattcttcataaaactcattcatatctactctccagcgctgatctgaaacaaactcccggtcgcaaagaaaaagcggcatcttcaagatcccgcccattcttttacagaacacttatttttaatcaaatctccctgttcttcttatgctctggccaatcttgaaagaacatctttaagaagctcatagaaacgctcaagcgaatcaagcggagcattctcatccggagtgtgtacattattcagtgtcggacctactgcgatcgcatccagtcccggaattgcttctgaaaaaagtccgcattcaagtcctgcatgaatcgcctccaaacgaagttcacttccgaacagatcgcggtagctttctacaaacagatcgcggatcttagattcttccgcataactccagcccggatattctccgctgtactcaatctcaaatccaaacgtctctgcaagaagtgcgaaacgcgattttgtatcttcctgaaggcttgcaacagacgatctgggagaaaccgcaaccataatataatcttcttctgttctgactactcccatattagacgatacaacgacaaacccgttcatcttgatgtttcgtctgtaaattccgtttggagcaagacgcatcagacttacgaatgcctttgcatcttcttcctgaaccgccattgcgctctggccttccgtcactgcgatctcgcaggagaaatccggctcaaaagatgtgatttcatctgcaaatacttctgcgagatcacatgcaagtttctctgctttttgtgcttctgccgaatctgcatagataagagacatctcacactctcttgtaattgcattatcttttgttccgcctgcaaagttcacaagaagtccttttgtatttttcagaagatgatctgccatacgagccatcagaagattcgcattctgacgctctttatcaatatccgttcccgaatgtccgccgagaaggccttctgcttttatttgaactaatgttccttctgcctgcactctttctatctttcttgtaagctgaacacgaagtccgccggcacagctaactgttgcgactccttcttcttctgaatccatgttgatcatcgtacgcgctgtgatctgagacttatcaagcgcctgagcgccgtttagtccgatttcctccgacgtcgtaaacacacactctacaggagggtgctctaattctttatcgtcaagaactgtcatcataagggcaaccgctactccgttgtctgctccgagagtcgttccgtttgcgtaaagaacgccgtcttttacaatgagatcaagcccgtctttttcaaaatcatgctcgactccggcaagtttatcgcataccatatcgatatgtccctgaagcataacaggagctttgtcttttgccccctcgcttccttctttttttatgatcacattattactttcatcctggtaaacccagaggtttctgtcttttgcgaatttcacaagatagtcgctaagacccttctcatttcccgatcctctcgggattgcgctgatatcttcaaaaaaatgaaataatttctccggcttgcagcctgtgatcttgtactccataataaatcctcttttctattagttattgccatatgctttattgattataacagatttttcttaatttttcatccatttttacatatgtttttcttgacactttttcccctgtaaactaaaataaagcagtaaaaatattgttatgattccgtcactttaaaaatgacggtttttattttgcggaagcgccctgtgcgttccatattgaaaggtggtgaggttatggactccggtgtcagttgtcatatacacagtctgatcgaaaaaaattacataaagagaggtatttatcatgaacaaagacatttttgtacagcttctcggccagcgtcagttcaaagctgtgagaagcattttagatgtaatgaacgaagtggacatagcctcattactgtcagaacttgacgataaagagcttgctcttgcatttcggctgattccgaaagataaggcagcggaagtatttgccaatatggaaacttccatgcagacctaccttgtagacatgttttccgaaaaagaactaaaggaactccttgatgacctttacatggatgatactgtcgatcttctcgaagagcttccggcaaacctcgtaaatcgtattcttgatacggtttcgccgtctgacagaacgctgatcaaccaacttcttaattatccggaagacagcgcaggaagcatcatgacaaccgaatatgtcgatatccgtcagtctatgactgtcgcacagtctatggctcacatcaaggaaaccggtattcacaaagaaacgatctatacctgctacgtcacagataaaaggaagctgatcggcatcgtcagcgcaaaagatctcatgacgaccgacgatggcattctgatcagtgaactgatggaaacagagatcatttccgtaagaacttataccgataaagaagaagtggctcaattattcagaaaatacgacctgcttgcgcttccggtacttgataaagacggacttatggtcggaatcgtcacatttgacgacgctatggacgttatggttgaagaagcaacagaagatatcactaagatggccgccattaatccaagcgaaaaaacttattttaatacatccactttcgcccacgcaaaaaacaggatcccatggcttctcatccttatgcttacttccattatcacaggtacgatcatcacaaaatatgaagacgcatttgctgcgatcccgcttcttgtatcctttatccctatgttgatggatacaggcggaaactgtggttcgcaaagctcaacactggtcattcggggacttgctctttcggaaatacattttaaagatatttttaaagttatttttaaagaattccgtatctccataattgtaggagctgtactcgctcttacaaacggcgttcgtatcctgatccagtatcataatccgaatcttgctttagtcattgcgctttcgctgatcgcaactgttatcatctcgaaactgatcggatgtattcttcctcttgttgcaagcaaggtgcaccttgatccggctattatggcttctccgctgatcacaacgcttgtcgatacattttctatattgatttattttaatattgcatcattaatgttccggttgtaagcagttctgttttcacaactttttctgcttaaaaaggcgctgatccgtaaaaaacgaatcaacgcctttttcttgttataactcaggaatcttatggcaaatatatcttaacactttcctcagatcaccgatctcgactttcccgtcttccgtcacatccgcagcaagtttctgctgttctgtcaactctacttttttacatacgctgcgcaggatcaggcgcagatcactgatctcaactttcccgtcttcatttacgtcgccctttatatatgactggctttgctcaaacggattgaccgcataaatcgtcggagccttgccgtctgtcacataccatcttacaaccccgtccggtcctacgacgggctgacaatcggaaagcggcatcgattttgaccttatattagaagttttatttccttcggaatcgatcgttacgatcttcgtcgtcagattcccctcggatttactgccttcctgccacattacaaggaattgatcctctccgatcttcacaagctgaggtgtctgtacgtttataccctgctgcttatcgtaatttgtcagccataccgttttcgcttgagttaattgtttatcggtaatgctgataaaaatatttctctggtctgaagtattggcactttcgctctcgaaatctactgcatttcctgcgataatacagttttcagacgatatttcaaacccgccgacagaggctcccgtagaattgtaatgccctccggtcaccttgcctaaaccaaccggaatcgcataatcgactttagtgatcgatccgccaacctgtgacttaataagagcgattcctctcggtgcataatcaccgtgatctactctgtaaatattctctccgtccgtctgaataaactgattaaaagaatgacttacatatcctgcctgtgcaagattcagcacatcatagtaagactgttctacactcatgtcattttcattgatcacaaacgtcatattcgcctgatgattcaatccgtcgctgtcagtatacatctcatgacatgtatgaatataaagctttccggctgtctctgtcatccgcagcgaacctgcctcaaacggaatattcgtattcgctccgtatacggaaaccgcccctattctctgaaaatctttggaatattttacgattcgcattacttcttcttcatcgctgtcatttggattagcctgtccgaacacgaaataattatgatcgcttccactgtaaaatccgccaaacagactcagctccattgcaaccgttttacttccggtcttcttgcctgccgcagaatagttttcaacgatcatttttccgccgcaatgctccactctcgtaaatgttccgtctgcattcggaatcaaataagaattaactgtcttactccatattgcataatcattcaaagaatgattattagaagcataaccatctgtaaccgtcgctgttttatccgggtcttgaacagaaggttctcccgtcaccgtcaccgtacactgcgccgacagaccgcttgttgtactgactgtgatcactgcctctcctttgctccagccgaatacctgtcccgcccggttgatgctcgcgattttcggatcgctgctcttccaactgtagacttcttccattgttccgtttgtcacaggtgtaagctgcaatgtatcgcctatatttaccgtatggctgcttccttccacttccaggctggtcgctttcttccatgggaaaaattcataataataattatcgccggatttttcaaccgctgcaaccccgccttcgtattccatcagacagaataccggataatctgtttttgcagaataaatctcttctccgctttggatgtcatattccgctatgtatgaattgtctttaaatgtaacaatagaatccgtctcctcgcggtagatcgttcgtgttccgacgctcgcattcggatcaaacgctcctccttcttcattattgcgcggtaagaagaaaacttccgtatcttccggttcttctgatttatacacatcagaatcccaaacctttagtcttgaattaaatgtactgtctacgcatatatatttatccccgagcataccggcctgttcttcacgttcatagaaatatgactgacaaatatacatcatcaattttttataggtaattgcgaaacaagtccgcaatcctgac

SEQ ID NO: 7672 - DNA, 8408 bp, Unknown
  gut microbiota DNA sequence
caagaaatgaacgattttcacttcctatcccaagaatcctgcatgacaggagccttcgcctgttttcagtcaggattgcggacttgtttcgcaattacctaaaaaatatgccgtcttagccgcttcttcttccatagtacactccattttgtaaaccggaacagactgtaaaaaacgatctaaaaaagagagcagcaaattcgtctcttcttcatctccgtaaaataatgtctgcggcaatatcagaggaagagcttcccccgaagtaatcttctgtattttatttgtttttcctctatgcagcatacaaagtccttgtatcggcgctttgcgattctcatttttatcggttttcccgctgaacggagtcccgcatgcataaaatacgccgttttgcagacaaactgcgggcttgtcatcgttaatgatccgaatcggttctcctttgaacgtctgccgccaaagctgcgcatgcgtagatttccctgttccgctcggagccgaaaaaagataggcttttccctctttttctactgccgaagcatggatcataaacccttgatgttttaacagtttcatataaaattcagctccggcacaactatattcacactcttctatagacaggtgcggatattgctttctcagtttttcataatcttctttcgtaccgtcaagcgttatatcaggctgcccctctgtatccgaccgatacgtctccatacgccgccgaagcagaccgtaaagcggttcataagatacaacacatcctgcaaattcataaatccccactgtacttcctcccgaatcacaaatctaatctgtcctttttccgagaaaactccctctattttttcacttcttgtttttcaagcgcttcatcacgctgttttgttaactgttcgatttcttccagacacttctgttcgtattccgaatatttctgacgacgctgttctattctgttcgctctgtcttctaaagttccttcataacatgtaacgcttccgactacaagatcactttcactttgtttttgtaagagcagatcaagtatttcctcaaaatgctccagcgaagcctcgcctgcaatctccatctgccgttccaaactaaaatccgataaaacaactacgcttctcgcttctatgacctgatccaaaatattttcgatcgtttccatatcttcacgcatggaaatattctggcattcttctatctccatattgtaatctgtattttttccatgcttcaaagaagatgcatctttcgcaaaagccaccccgatcttaaaatccatttctgtaaaatgcggatataaaatcttgcttcctcttccatattccttaccgttaaaaaaataggcgcccgcaatctttcccgtactttcttcgtattgtttgacagtacttttcagcatttctatataagcgtctttctcctccccgatctcacctccaaaagcgaaatcccagccttgctgtcctaaatacgtcactgtttcctgatgatgctccgctgtgtttttcaaaacaagagtggcctgtatccctctgccttcaagagccggaacgatccgatccatcagttcctgatcttcctctgaaaatgcaagaattacgttcgccggtttctcaatatcattcacttctgcttttttattttccatgtcattgcgtatctctcggatctttttatcatactccttgtacgtttcctgcaacccgtttaagctctccatctgctttttttccccgtatctccaatagaaaagcagaccgaaaagtccgattgccaaaacaaatacgagcaaaatctgtattttcttatttctcataacgctccttaagtaatcctgttatcactgtgtctaaaatctcattttgtattttatcaaaaattctccgaaacgtcttctaaaccgcatctttcaaaaaactgacaccgttctttttgctcctgatcttcaacacggtcaaaagtttttgctctttcaatatgatatcctatatttcccctgcttgctgtcaatgctcttttatatctaaccaaccacgcagccggaagcaaaatcggtgttttcagccacggacaagatgtcttcatcacctcataagacggaaagaccaactgttttacaaacttgttctttgattcatacagcacagttccgttcctgcgcgctgtttccctgctgccgaaaataccgcctgacaaagcatagttttccagttcatccgatacttccgttctcacagttttctcatcatccgaaaaccaaagctgtgccaaagacctgatattctcctcaaacttctgaagtttcaaagctttgagctgccgctgcacatatgctttatccattcgtggcgtttccgacaaaatataaatatcaagaaccattcggattccgatgccgcctctcacaaaatgctcggcaagatggcacaccgaatgcaagtaatgatcttccaaactcatttcatatatatactgtttcccttttgcatgaattgcccgctcccaaatatcagcaaaatagtcgtatgcattggtcagtctgaacagaacatctctgtgcatttcaatcgtcacgccgtctttttcatattcgtcatgcttgatgttatatcccccgaacttgtatccggcatcctgcataacctgttttaatttctttgtctgatcttctttatataaaatatccagatctcccatcgtacgaaattccgggtacggataaaactgctttgtccgtattcctttcaacggcatacaataaatcccgtttttttcaaacaactcaaacaacgtctctgccgcatacgcctgctgcgcgtcttcgtatgcataatctttcaaataaaaaaacagtttttcccgatacggttcctccataaatacaggacattcctgcaaaaacggtaagactccgtgtactcttgcacactttatcacacgttcgatttcctcttttgaaatctgcatcgaccactcggacttgtttttccccgccagtacatctctgatgatttcaattaatcttttttcttctttcttcaaaacaatctcctttgcggcagtcaaaaatatattcacctgaaatatttatggacaaaagtatccttttcaatttcaaacttttcctttttaccgatacattcaaacttcgatttctcaacggactgcacaaaatcagcaaactcgtcctgcagttgtcttttcggaacaggtactacgattttcttcatagcgtcattcatcagcttattatttcccacacgacttacaaacttataagcgatccgattcaacaaatatgccagatatctcatatttaccttatcgttttttgctttcagtgttccacatacatttgtacagttgaattttccgtttctgtaaaaaacagttcctgctttcgcgccgtcagtcgtccacgtaatatactctccgtcaaaatcaaacgtatcaatagatccgaatataccgtcgtttgttgtctgagaagaatataccggatatggacctttatgattttctatatactgctgattgatcactctgcctcttccgtcaatacataaatcctctacggaatacccttcatactttgaaaatactccatcggaaataaactcctccaaatgaaatatttgatcaaattttgtcctgatactattctcgtatttttcaatttcagcattttgtccgtttatcttatcatctaacgctttaagctcatcgattatattcttctggatctttgtttccggcgcctgaacaaccaacgatctgatcctttgtgcggaagctctgttgtttctggaaaacctttcatattcaccttcagcctgaagcgcatacatcatatattcgggaaggattttttcggttttgatccttaacacgccgcaatgatccgtaggataaaaaggcacaccggccggaatgatattcaccatccaatcaccgtcgattccccatatcaccgaaggacggctgtaatctttcatattttctttgtcgatcctgccaaactcttcatacacattcgcgctgtaaacaggcactcttcctccggaaacgatctcttccgacaaaacccggtctccgatcgttatatcaaacgtcttttcatcagaaagggaatatgccgtcaggcccggatcatctttcagaagccgcgtcttcgtagtttttatagctttgttaaaatacacctcgctaaaactgatcatatctttcgtatgaagataataataatactcttccagatcatctaaagacacttcctctccgttaaacatttttcggatcagacttgcaatcgtacgatcagacatcctgttttccgcatcatacagcatcccgccttcatctatgatctgtattccttcctgcccctttcgattgctccatttataacctaaaaacttctcctgacctttgttatcatccggagctgccacgatcaatgtcctttgatcataaacaaaagagaaatatttcattttttcccgttctatcttttttacatattgataatactgctttgtcagcagttttttctgctctttttctgataatttaccgaacgtcttttgtttctgcttttctttcgtttttgataatgccaaaaaagcttctttatactttaaaaaatatttatcttctatatcgccgatatcaaccgcttctgataagaaccgttcatagacttcagaacttacgtcgatctttttcaaatactgttccaatatcgctttgtcttcccatccgtccaaattacatccgttaaaaacagcgtcgatgctgtcttcgatcaaatcggcttttttcggcggttcattatatttttccagaaacaacacaaccgtattcgttcctgtcgcgccaaacgtcttatttcccataagaacgatcgcccttatcttgaaattctttaatatagattcccttgcgcagataaaactttcattttccttattcaatatactgctcggcaaaataaccgccgccactgcgttcggtttcaaaagctgggaaatcctctcgacaaataatgtttctatttcagatccgttatttgaaatagtatctaatatagaaaacgaattatttttaagctttaaatggggcttaaacgcagatacagaatacggaggattcgctactaaaatgtcaaatgtattcggttttatatttttgtcaggatagttttccagaccgtctccgaatataatatttccctcacctgcaccatgcataaacagcgagatcttagatacgcgggctaatctgtaatctttctcaatcccgaaaatattgttctcggcaaaagaccggtcaagctctcttaaaccatcatttgccttaacacatgctgagacagcttcaaacccttccgtcaaaaaatgtccggctccgcaggcataatcgatgatcttcggcaagcccgcaccttcttcggttttaagtattttctcgacgggcagactgttccatataaatcttgtgatcggaacaggagtaaaaaactgaccttcattctgcttaaagcctttgctgagcagttgttcaaacaaatctcctaacatctgaagattttcagatcctattattctgaatttttcaaacaactgaacaacttctactaatattttaccgttttgtaaaaataattgttcgttgtgaacgtctttgaacgcaaaatcattgttggtataaaatttcaatatacgcagcgtatgtttcagatgagcgatcatattttttctctcttgtccggtatattgacgaactaaattttcggcatagtcatcaggcacataaaaaatttcttctttcataaatttttccatgccttctttatgtagacgctgaagcctgtcctgcaaactttcgtaagtatccgtgccgactttgtactgaaaatctacgatctcctccatatctttttgaatctcatcgactaatttacaaataaacagagccactaaacggttaaatgcattttccttatccgaaacattattatgacgtaaaatctcttcaaacttatttacaattttattattgtccgcaaaatctttcagatccgcttttctaagcggttttaccccgatttgatatgcgcttgaatcatctctgaaaattacatctcccgaaaatcgcttttcatacgtttcatcccacaccgaatataattccgaaactgtatgtgcatttttaaataatttaatagagtcatctttttgggataaagcaacaatattcgcatcgtcagaacaatcaatactttccgtatcccattttatctgcttgccttcatatttcgacgcataaagaacgagaaacttacagcttctttcctgctgccaatatgagaataactggccaccatcatttactatatttttatattccttttcatattctctgccgtaagttttacactcaacaataaacagcgtattcccttcctgatcagatacgcaaatatcagcccgtccgcctttcgactcatgccccagcgtccactctttttctaaatttaaatgcttcgggcgataccccttgtcaaacagccttgtcacacattccaatacgacaaaattttcaggagcggaaaaattgcacgtcgttctattagaaatcgtcattccccgatcttcaggatagattattgttctgtttttcaaatctaccttaatataacaatcgacagatgggaaaaatttttcataaatatgatttttctttatgtaacccattgataagagaaggtctttaatataactttctgatatcattttcgtttctcctccggtataatattccgatttattatttttcttcatcgacaattatatcacggataaataatacagtcatgtattttctaagatagcgaaaaatggctaatcgataatatataaaatatgtgacatatataaaaactgtactacctttcataatttttgatttttgatgtatgaatcagatttttaataggaacactcaaataagaggcatagaacctattgcaatcatgtcacgaataatatataatattcgtgacatgaagggaggcggtattgtggacaacggatatacaaaacgaatacgagagcgtgttctttctcttgaagatggaactgtttttgtgacgtccgattttgcggatattgcagatacatccactattcgtcaaagtttaagccgtttagtgcagtcaggaacattgcgccgtattttgaaaggagtttatgaaaagccaaaatacagtaaacttctggatgaatatgtggcggtcgatccggaagcagtggcaaccgcattggcacgaagttatcactggacgattgccccatgtgggaatacagcattgaacctgttaggactttcaacacaggtaacagcagtatggtcctatatcagcgatggtccatataagacctacgagtggaactctacaaagctggaatttaagcaccggaccaataaagagattaccggattgtcttatatgacaagtttggttatacaggcattaaaaacccttggcagatcaaatgttacaccagcagtcatacagatgctttccgaaaaactgacagacaaggataaacaggcttgtttgaaggaagcaaccgagtctacggattgggtttacgatacgatacggcagatttgtggaggtaaaaaggtacaatgagaaatatagcaagactttcagataacgaccgcagggagctgttcagaaatacagctgataaaatggggctgaatgatgccattgtggaaaaagacttttgggtatgttttacgctggattatttatttcaccgctcaccatggaaagagtccattacctttaagggcggtaccagcctttccaaagcctttcacctgatcagccggttttcagaagatattgatttgattctggactggcgtgtattgggatatggcaaagacgaaccctgggagaaacgttccaatacaaaacaggatgcttttaacaaagaagccaatgcgcgtgcggaggtatttctggctgaaacattctgtccggcagtcagatccggcttatcccagaaaatcggttgtgaagcaaatgtctacatagatgaaaaggataaacagacggtcattttcgcctatccgcacctttttacaaatacggcgaccttacaggtgatccgtttagagattggtgcgctggcagcgtggactcctgcaaaaacggcgcagattgaaccatacgcggcagaatattatccgaagatttacagtttatctttatagacttttctaacgcttacacttttccgcgtataaatatcttctaagatcagattattcgagaatgtgaaactttttctgtaaataatgttttagaa

SEQ ID NO: 7673 - DNA, 449 bp, Unknown
  gut microbiota DNA sequence
atagttctaatgaatcttctgcatctacccatatctgcattgttccatcaagatataattttgcatattcaagcggtttatcaatggcaagtgcgttcaatgcacagtctgatccgggtgtggtttttaaatccttttcggtttcccaacagtcaatgcggagcatataaccagcagaagtataaatatcaatgctgtttctgtgtggattgtattctgcaaatattgttctcatcgtatagaatctccttatcattcaatcagtcatttgttacaaaaatcagaagcatttcaatcagttcaccatgtcacttttattttgtgttatactgttttatagatttttcttgcccttgtatttgcccttatcagagttcgtaaacactgacgggacgatataacacaagggaaacaataatggaaagctcaatcgaaatttgtaggattag

SEQ ID NO: 7674 - DNA, 916 bp, Unknown
  gut microbiota DNA sequence
actgcagcggggaaagttaaatagatgtatagaaaattcgagggttcaattataccaatcagctaaagtcacattaatatagttcaatgtttcatcccacacatctgctccctggtaattattattgaaaagataatctgcatccagacgaagcagcgtccactcggatgaaccatccggcttccagtacagatgaattacaggaaccgcatatgcattaccatagctgtctgtcggctttgcatagtatttagttaccttacactccatgattcctttccagtagcggatacctggctgaatgtccacactcaccctgccgatttcatccgcccactgcacatcatttgtggtattctgtttctgggtgccgggccgataagaatttgacttcagcttaaattcacgttcccagaccgccttgatttcacctttcaaggccttctttcccttattggaaagggtatacaccacattaaatgattcattgtatggaatattatagcctaaaaaattcgtattgtcaccttctttctccagcaaaatatcccttaacgccggcagattatccggagcaggagctttcacctcatacatccattcctcgggtgaaccattctgctcataatcaattgccttgaaccaggtagattcacctttccgctggaacagcggtacaagctggtatgtacccggtgcggccgttacatagcactgaatctttttcccgtcccaatctccctgaactttgatgtcaatgggctggaacttctccacaatctggttgccttgcataaacacaaaacgcacttttccctcaaacagttcacttccccaatgagtatagaaaaggccgaagggtttcccttcattctgataacaatcgtatccgaactccgtatgattggtacttata

SEQ ID NO: 7675 - DNA, 378 bp, Unknown
  gut microbiota DNA sequence
tattctcccttttcccatgtcacttctacgtctgccgtctctgctttctcgccttctccgaaatgtacggtcactatcttcggaaggtctttcttaagatcttcaaatgttgttccttcttctaccgtcactttttccggtttttcaacggatataacatcttttgtctcaaccggcggcgttacctctttctttgtcacttcaacttcgatctcagctttcagattcttcgtattcgtaacattttcaggaagttttccaagtgttccgcttaacgtatatgtcttttctgcttctcctttatattctcccttttcccatgtcacttctacgtctgccgtctctgctttctcgccttctccgaaatgtacggtcact

SEQ ID NO: 7676 - DNA, 24486 bp, Unknown
  gut microbiota DNA sequence
atatcataaccatacctgtagaaaaggtaaagaatggttatgatggaaatagcatacagaccttggagagggtctataaatactactactttataatacgagttgaggaaattgtgtggattacagagtcttctattgagggagtacaaagtgagatggaagaggcgttgaatgcgttgttgaaaaaacgtggatgtgaatataaagtacgattcgtatgctttccaatggaaacatatgaggaagatgttgcagaatatttagagaacaattctgctgatattatttacagcaatttgcgcgtcgtaggagatgacagtaatcagtattattcattctataaaaacggatatttgcaaaatttagaaaaaatcagagaagatgaaaaattttatgatgcgtattcggaaaaaacatgggagcatatggaaattaacggcgaaatctatgggattccatcatatagttatgagggaaacggtttgtattatgtgtttaatcaacaatatttggataaatataatgtagacatatcgcaggttacaggagatttgcagacattgtatccgattttgacggaactgtcggaaaaagaaaaagataacaaagcgttcgtgccgctacattcttatgaatatatgatttatgctcctgaatatacagagattttagatacaatcagggtaaaagaaggtatggaaaaaccgattgcagagaatttactgaataatgaacaggtgaaagaatccgtgttgcttcttaacgaatttcataaaaatggattgctgaaggagggatcggcaaatacgttggcaaatggtaatttcttcgtgatgcttatgtatgcagatgatccagagttacttcaagaatattttgatacaatctgcgaggaaaataataaaaaaccactctccttaaagtatgtaaagataggagagcattatcccccgcatagaacaggcggaatgaacagtgtgttaaaaggtggaaacacagagaaagcaatcgaccttttgaaaaggacagttacagatgaagaaatcagtaatcttttgaaatatggaacagaagagatggaagaaacaccggcgatgcttcaatggatgtttgggaacgatcagtggagcaaggagaaaaatgcagtgaaagaatctttaatcgcaggatttcaattcgatggaagagtttacaaagaacagatagatcagctttcacaaatatattacagctattcagaattgttccgaggtctgtcagaaaatccgcaggaagattatgaaaaaatgatgcaggaaatggaagcggcaggaattaacgcgataacagaagaagtaaataatcagttggatcagtggtataacacggttcgataagaggatttgaaattattttcggggcgtacgaccgaaaatgatcataaatgaacaaaaagaaaaagattaaaaaggaggacaagaacatgactaagagaatgaaacgaattgcggcattgttgacatgcgggttggtgttggcaagtggaacaagtgtgtatgcgggaaatgcagaaggaacgcttttagggtatccgatttcactagaagtatcagttagaaaagcgtctgcgatgacggctggaagttatccgaaaacaactatttatccttatcgttatgctacaggtggaagtgcaaaccaactgattccaatgacagcggtttctgggggcggtacggcgagcgtttatgctcctgatggatgggatattggaaaggcagaaagtttgcatgaaaatggtggtgtcaaagcatatttagtagcatatccataaattaaatttaaaaatttttaggcacaggtatttaggcgcagctcttaatatatagttgggtataaaaaatgattaaaaattaaatattcaggctgttttatagtaaaatgcatagctttgatttataattaacagagagatctggttaaaagacttaaggtgaaaaagactataaaacagccttactgtatatgattgatttttagtaatcaagggggaataccgttatgaaaagaagacgttttatatcatttgtatttgtattaatcttgtgctttggaatgagcggatgtggaaaggaaaagaaaactaccgcacctaataaatttcaatcagattatatggaagtgtggggtggtacgacagtagaggaaggggattttagagttataaacggacttttatattatattgattttgaaacgatggagggaataccgatttgtaataagccgaattgtcgtcatatatcatggaaagaagatcgtaatacaaaatgtgatgcggcaaatatagatattagtacagtatttccgtatgaaggaaaactatacggatttcgttctctttctgatggcggcagtgaattggtcgtatctgatttagatgggggagactggaaatcaaagggcatgtttattacagccgaagaaatttttcaaggcggggttgtcgtgggaaatcagatgttttttttaaaggatgtagtggtaagacccgaagatcatatcacagaaatgagaacggatacagtaatgtgcgtattgaattttgatacgatggaactaaaagaacttcgcagagaaaagggtgttttttctattcaatttttaggaggaacgaaagattatcagatctattcagtacaagaagataatggaatcaaatgctatcagtttgactatgatgaagaggagtcaaaagaaatctctttgaaaaacagaacacagtctgttgtaaaagcagatgagacaggattttattataatagtggaattgattatccgaaagaagtatataaacacgatcttgaaaccagtgaaaatgaaatttgtataagtgaagaggaagcgaaagcagcatttggaaaagagtatctacaattaataatatgggatgttcgcgaagatggaattctatttcatttagtggatgaaaaagagggggacgtgttttggaaagaatcaaaaagtggagaaataaaaagactttacttggaagaaaatttgccgaaaaagaattctagattgaatagttttatgtttggaacggaagacggaattggtttttcttatttgcaatctttagattcggataatatcgaatggtatggatatattagctgggaagatttactagccggaaagaataatataaagacactcgttgaaacaaaatttacgggtgggggaaaaccgcttgatgaggagggaaatgtgatcggagaataatataaaagtatttattgaacccaagttgccagatttaggttatctattggatgaaaaggaaggagagaacaaagtcatgaagaagaagcatttattaggagtaattctatttttctgtgttgttttagctacgataatttttgctttagatcgcatggatgttatatccgaaggagtggcgctttttattaatgtatcactcatggcattgtattggtgtattgcaagcatcctaaacaaggacccaaaatagtaatcaggggggaaataccattatgaaaagaagacattttatatcatttgtattcgtactaattttatgtattggtatgatcggatgtgggaaagaaaagaaaactaccgcatctgataagtttcaatctgattatatggaaataggagttggcacgacagtagagaaaggatattttggcgttataaacggattattgtattatgtggattttgaaacaatgaatgcagtaccgatctgcaacaagccggattgtcgtcatatatcgtggatggaggatcgtaatacgaagtgcaatgcggcaaatactgatatttggaacttatttccttataaaggaaaactatacggttttcggtctcttgctgatggcggaagtgaattggttgtatctgatttggacggaagcaactggaaatcaaaaggaatgtttattaaggcagaagaaagttttcacgaaggtgttgtagtgaaagatcagatgttttatctgaaagatgtggcgttaagagaggaagaggcggcagaaccggagttggaaacggtaatgtgtatgttggatttagatacaatgaagtcaagagagatttgcagagaacgaggcactttttctattcaatttctaggaggaacgaaagattatcagatttattcagtaaaaggggaggatggggttacctgttatcagtttgattacaagaaagaggtatcgaaagaaatttctctgtacgatatccccggaaggattataggggcagatgaaacgggattttattataatagtgggatcgattatccgtcagccgtgtataggtatcattttgaaacaggagaaaatgaggttttcgtaagcaaagaggaagcgaaagctgcatatggaaaagatgtattttctcttagtctgtgggatgtccgtgaagaaggaattttgtttaagatatggtacggagaagatcaaagattgtttttgaaggaagcagacagtggaaagttgagacaactttcgctgtcagaagaattattaaaagaagactttgttttaaacggaatgttgtttaaaaacgaggaaggactgggatttgagtatacgcagtatttagatatggatcagattaactggtatggatacatcagttgggaagatttgctaagcgatgagaacaatgtaaaagtacttatcgaaccgaggatgacaagccgaggttatccgctggatgaggatggaaatgtgatcggggcacaagaatgagaatgtgagaattaactgttaagcgttaagcgtgtgagcaggggagaacggatatgaaaaagaaactattagcaggaacagtcttgagtatttgtcttttatcgtcagggttgtcggcttgttcatcagaggataagacggaaaaaccatcttccgagaatcagcttcaatctgattacatggaagtagacggtattctgacgaaaacggagaaggggagtttttcggtacatgacggattgatgtattttacggattatgagacacagacaagtataccggtatgcggaaagccgaactgccgccatttatcagtatatgaagatgaaaagacgacatgcaatgcagtttgttcttcttcgtatatgtttccgtataaagagaaactatatcggatcgagagtgtagataatcgagaaggtaagttgatcgcttcacatatggatgggagtaacccgaaaacagtcggtacgttttcttcgggagatatgttagaatcggcagtgattttaaatgagaatatgtactatacctactgtgaattacaaaataaaatcctggcggaacaggaagacggacaggcgcaaagcggacaggcaatgggatctaattgttcgttgaatcgtctgaatcttgacacgttggagcagacggaaattgtaaagctggaagatgtaagccatattcttatgcttggaggaacgaaagagtatcaagtgtgtgctgtagtgaaagatgacggagtacaatataacttatttgattatgagagcggaacattgactgaaatctcgttgaataccgttgattatcagcgtgttgaagtgacgcaggatgggaagggtttctattatatcggtgatgaaggaaagtctctctattgctatcatattgattcaaaggaaaatgaaaaaattgttcaggcggaagaagttggcgctgaaaaagtcactgtagaaggtgtaagtgaagaaggaattttgtttcgggcatttccggaaaatgaattatatgtaaaaatgaggaaggaatcagtaatctgaagctgtcagaccgacttccgacagatcaggcgtggcttagtggaattaacgatataacgaaagacggagtttattttacatatcaggaaaaatatatcggcgaaaaagaaattgaaggagatcttctcatgtacgacgcctatattgagaaagaagatctgtttgggaaaacaggtgaaatgaaagtgatttatacgccgagagtttcttcggcggggaatattgtaactgaagagtaagagaaacaaaaaaaccttgccggaggggagggatcggatgaaatctgtaatgtatgaatggaaaaagtttcgtgcattccgctctttttggtttttgtgctcggtgttttttctttttaatatttggacgctgtctgaaaaaatgaagatggagatgtacgatgcaggagcggtgaaacagatttacgcagatttgaaggcacagccggaagaaaagcgtaaagagtggatcgagaagcttccggaaaagaaagttcctgtttatacggggaatgaatatgcagaagagatgttgtacaacaaaatctttcaggagtacagacaggtcaaccgatacgacaaatatcttgaggagatcaaggaaaaaagcgcgagtatgtccagcgctattttctcgaatgaaggaacgtttgcttatcgaaatgcacagattaccccggatgcgtatgagaaactgaaaggactgaaactaaagagtgatgtatcggacggagtgatctttgccacagaagcagaatttacagatctttgcatcgtttttatgcttgcggtgacagtgtattttcttgtgttggatgaaaagaaaaataaactatatcctttgctgagatcctgttatcgagggagaggctctgtgatcggggcaaagctgacagtggcggcatgtgtgacggcgctgctcgttcttctgttttacggagtcgattatctttatgcgtggcagaaatatggctttggtgacctctctcgtccgatccagtcggtaactacgatgtacgaaagtccgtatatgatgtccgtaggaatgtttttatttttatatctgatcgtcaagatggcagtctgctatgtgatcatattaggaatgatatggattgctcaaaaatcagagacaccgtccggcgcaatgatcggaatcggagcggtcggaattgcagagtatatgctgtctgcatttcttccgtcggtgtcttatgcggacgtgttcaaatacgttaatctggcggaatatatgaaagtgtatccgctgttttctaaataccataatttagacttttttgacaatccggtcaatgcgatgactgtatttcggattgttcttccggtagtacttgttctttttgttttgggaaatgtgcggaggtttttccgatgtgccaaaacaaagagaagatggagaagggagagaaaaaacagcagccggatcggttttatttcggataaattatatttttacgaaagtgtgaaatgtcttttctcaaaccgtgcgatatgggtatgtatcgcggtcatgtacggcgccgttcttgtcgggaattctattccgacatacagggatatcaaggaagaatactataagttttatatgaccgatcagcagggaaagatgacagaagaaaaagtggaatacttcaatgaggagcgcaaacgatttgaagagatctattctatgactccggaaaattcagatctgactgccgttgagattgttcagaagcaggaagaaaacaagtatgctcatgaaggattttccgaggcgtacagtcaggtgatgtacattatgtcaaataatcagggaaagggagtcaatgaacaggagttggtttatgaaaaaggctatcagcttttgttcggagataaggcggtgaaggaacgtctgatcgggattcttttatgtgtgatcgctgcggtgtacagcgcatccggcgttctcggaacggaatatgatctgaaagtaatgaacctgcttcgcagtacgaagcggggcggaaagaattatttttaaaaaagcttggcgtgtcattcggaattacagcggtgatctttgttttagtcaagattccggcgatattaaaagttgtcggggagtatccgctggaatgttggggcgcaaaggtgcgttcgatgatgtttgcgggacagtcggttataaattgttcgatcttcggatacgttttgatgctgatgattatgcagcttgtgacattgtttgtcattgtatttagtacgatggcattgtccgtcgttttgaaagactctacgatgacgatgatactttcgcttcttttgttcggcggtccgctgctcattgaatggggcggagttccgatcgtacattatcttagtctgaacagtcttttggacgggcatcagattttacaaggaaactggcttgtacttatttcggaaatcgtgatcttttggggagcgctttcatttgcggcaggatatgttttatatcgtgcttatgagaacaggaggtagcagggatggaaattaagattcgggaattatgtaaaagctatgggaagaaaaaagccctgcaaaattttgacgcgacgtttgaaaacggaatttatggcatactcggaccaaacggggcagggaagagcacgctgatgaatatattgacagataacctccttcgggattcggggagaatattgtgcggcggaaaagatattttgaaatggggcgcggcttacagaaaatcgctcggatatatgccacagcagcaacagttgtacgaaacgtttacagtgactgaatttctcgcttatatgggaacgctgaaaggaatgaagaaaaaggaaatccgcgctcggatggagcttttatttcctttgttaaatcttgacaaggtgaaacgtaaaaagatcaaggaactgtcaggaggaatgaaacagagagtgcttcttttgcaggcgcttttaaacgatccgaagatattgatcctcgatgagccgacggcgggattagacccgaaagaacgtatccgcatccgtaatcttatttcggatttgagtcaggatcggatcgttttgatcgcaactcatgttgtatcagatatcgaattcatttccaaagaaattcttctgatgaaaaacggacggctgatcgataaggcaagtcccgaacaattacaggcaaagattcagggaaaagtgtttgaaatgagtgtagggcagcaggagctggaagaagtgaaagaaaagtttgaaataagtaatctgttccgaaaagacggacagattatcgttcgcgtagtgacacagaagcgtccggaagggtatgatgagatcagggaagccgctccgacattggaggacgtttacttgtatgaatttgaggtgaagggagctatgcacaataatgctgttagaaaaattgcaggaacataaaaattttacggctcatgaaaaagatgtagcggagtatattttaagtcatttagatcagatttcggaactgtcggtaggagaactggcgaaagcgtcttacacgagtaaggcaacagttgtgaggctgagtcaaaagcttgggttaaatggttttcaagatttgaaaattactcttactgccgagatcaatcaaaaaaagcggatcgatcaactgcttgcaaacgagccggtgactgccgaaagtacatatgacgatatcgtaaaaacacttccggcgctctatgataaagcggtgacgaatacaagactttctttagataaaaacagtatgaaacggatcagtcaagtattgcaaaaagcagagtgcatcgatatttacggaacagggatcagttatatacttgcacagtcggcggcgtttaaaatcagtacgctcgggttggaatgctcggcatacgaaagtattaattctcactatctggcggcgcgtaagcacaagaaaaacattgcttttttgatcagtctgacaggatcaaatcatacggtgatctgtatggcaaaatatttaagggaggcgacagaaacttatgtggtcggaattgcaggtccttatcatacagaacttaagaaatggtgtcatgagattgtggagattccgaacagggacgcgctgctaagcctggatgtgattacttctttttcgggagcgacttatattcttgatatttttttcgcgcttctgttgtcaaagcgatatgaagaacatgcaagatcctctatggaaatgttgaatcatttaagtctgctttgggatgaaacgtatcatacaaaagagaaaaatgagtaaatttggaccgctgtttcaaaaagcagcggttctttttcatgatttttgaaacgctgaaacaatccggcttgtgcgaattgtatgaaagaaagacatatgttattttctaactatcaaaaaacagttataggaggaaaagaaatgggaaagtatgagacgctggcaaaagatatcgtaaaaaatgtcggcggaaaagaaaacgtaacaggacttgttcactgtatcacaagacttcgatttacgttaaaggatgaaagtatcgcaaaagacgatgttctgaaaaagatggacggggttgtgactgtaatgaaaagcggcggtcagtatcaggttgtgatcggaaatcatgtgccggaagtatttgaagatgtgatggcgctgctcgatttgaacgagaataaagcgtctgcggaaacaaagaaatcagggaagctcctggatcgtgccatcgatgtagtgtccggtatttttcagcctattttagggatcatggctgcctgcggaatgctgaaaggtctgaacacattattcgttacacttggattgtattctgccgattgcggaggatatatgattatcaatgcggcaggcgatgcgttgtttacctttttgccgctgttccttggatatacagcagctaagaaatttcagttaaaaccgatgctcggtcttgcaatcggagcggcaatgtgctatccgggtatccagttatctgcattgtcggcaggagcagaggctgtaacgaccgttttggaaggaacgctgttccaatctccggtatatatagactttttcggaattccggtcatttcggtagattatacgggaacggtgatcccggtcatactgactgtatggtttgcgtcgaagtgtgaaaaattatttaatcggtttgtgccggatcttgtaaagtttttctttgtgccgatgctgactttacttgtaactcttccggttgcaatgatcttcctcggaccggtcgcaacctttggatctacgctgatctctgaatttacgcttatgatcagggaatttagtccgcttcttgcaggcgcggtcgtaggatttacatggcagattttggtaatcttcggaatgcactggggatttattccggtttatattaataatgtgcagacgttgggatacgacaatgttatgatgccgtttttcgcctgtacattcgctacatcggcagtagtgcttgcgatgtttttcaaaacaaaagataaaaagataaaagagatggcgattccgaattttatttccggtattttcggtgtaacagaaccggcgatctacggtatgcttcttccgctaaaaaaaccgtttatcataagctgtattgcaggaggaatcggcggagcattttacggacattttaatttccgtaaattcattctcggtggcatgggaatttttgaacttccgaatatgatcaatcctgacggaacaaacggaaatattatcgtagcatttatcggaattgcaatatccatggttgtcggttttgttctcacgatgatcttttaccacgatgagaagaccggaaaaacgggcgaaattgatatgaaaaagaatagagagaaagaagataagatcggtaagattgagaagtttgataagaatgaatcggataagattgacaggaaagaaaggaaaacagagaaaataagcagtccgttgaagggagaagttatagcgctttcagatgttcaggacgaagctttttcatcgggagcgcttggacttggagcggcagttgacccgaaagaaggagttttgtatgcaccggcagacggaacaatctctgtgttttttccgacaggtcatgcaatcgggatgacaacggacgacggagtggaattgctgatccatgtcggaatggatacggtacagttggaaggaaagggattccgtccattcgccaaagaaggagatcgcgtaacgaaaggacagaagcttttagaatttgatatggaactgatttgtaaggaagggtactctcttgtcactccggttcttattacaaatacagatgaattttcagatatttcaattacaagtgaatgtcatatagatccgcaatcgatcttgatgacagttactcgataggaaaggattgttgcgtatgaaagaacagtttttgtggggcggagcaacagcggcaaatcagtttgaaggaagctgggataaagatggaagagggactgcactcgttgatgtgatccctcacggagagaatcgtcaggctgtcatggatggaacgttcgattataggaaacttccgaaggaatcttattttccgggaagaaaagcggtcaacggttttgaaaattataaagaagacattgtgcttttaaaagaactgggatgtaaatgttaccgtttctcaatttcatggtcgaggatttttccgaccggagaggaatcacagccgaatgagaatggattgaatcattatgagaatgtgatcgatgagctgaataagtatggaattgaaccgattataacaatctgtcattttgatattccgctggctcttatagagaagtatggttcatggaaaagccgcgaagtgatcgattgttatcttcgttactgtgaagctttgtttcaccgtttcgggaaaaaagtccggtattggattacatttaatgaaattaatatgctgatgcatctgccgtttatgggagcaggtattcgtctggaagaagatgagaatccaatggaagtaaaatatcaggcagctcatcatgaacttgttgcttctgcactggctgtgaaaatggcgcatgagatatgcccgggctcacaggtcggatgtatgcttgcggcgggagacgtctatccgtatagctgtgatccgaaagacgtatgggcaagcgtggaaaagaacagagaaaattacttttttacagacatacaagtcaggggaaattatccttcttatgctgaaaaattatttgaacgggaaaatattcggctgaagatgaaggagaatgatcttgaaatcttaaaagagaatacggttgattttgtttcgctttcgtattataacagccgctgtgtgagagcggacggaaaaggcgaagccgcagggggaaacgtgtttgcttctgcgaaaaacccgcatcttaccaacagtcagtggggatggccgatcgatcctctcggactgaggattacgttaaacacgctgtacgacagatatcaaaaaccattgtttattgtggaaaacggacttggagcgaaagatacgccggatgagaacgggtttgttgatgatgattatagaatagaatatctttcttcccatgtgaaagcaatgatggatgcagtggaaaaggacggtgtagatctgatcgggtatactgcatgggggtggatcgatctggtcagtgcaacgaccggagagatgtcgaaaagatatgggatggtttatgtggacctggacgacttcggaaaaggaacgggaaaacggattccgaaaaaatcgttttattggtataaaaatgtgatagagagcaatggagattgtctgcgcgatgatgcttgaaaaataaggccgcacaagttataatgaataccatcgagaataaaaagtaatagttcagcctgcgccattcgtaaaaccgcactgcgtgcttactgtagctgccgctactgttttactcataaaaaggcgctaagcacatacagatgtccgcttgcaaaaacatgcaggcatgttttctgcttcccgtacatctgtatggctgaactgttacaataaaaaatgtgaggagcataaaaatggttgaaaagacaatggataaaatcgtggcgcttgcaaaatcaagaggattcgtatatccgggatcagagatttacggcggtctggcgaatacatgggattacggcaatctcggtgtagaactgaaaaacaatgtaaaaaaagcatggtggaagaagtttgtacaggagaacccatacaatgtcggtgtcgactgcgcgatccttatgaacccgcagacttgggtggcttccggtcatctcggaggtttcagcgatccgcttatggattgtaaagaatgtcatgagcgtttccgcgcggataaattgatcgaagatttctgcgaagaaaaaggaattgaactggaaggttctgtggacggatggtctcaggaagagatgacggcatttatcgaagagcatcagattccgtgtccgacatgcggaaaacataattttacagatatccgtcagttcaacctgatgttcaaaacattccagggagttacagaagatgcgaagaatacggtttatctcagaccggagacggcgcagggaattttcgtaaactttaaaaacgtacagcgtacatcaagaaagaaacttccgtttggtatcgctcagatcggaaaatctttcagaaacgagatcacaccgggtaactttacattccgtacgagagagtttgagcagatggagcttgagttcttctgcaaaccggatacagatttggaatggtttgattattggaaaaacttctgtctgaactggctgtctgaactcggactgaaagaagacgaagtacgttaccgtgaccatgatgcggaagagttgtctttctacagtaaagcgacgacagacgtagagttcttgttcccgtttggatggggagaactttggggaatcgcagaccgtacagactatgacctgacacagcatcagaatgtatcgggacaggatcttacttattttgacgatgaagcgaaagaaaagtacattccgtatgtaattgagccgtcacttggcgcagaccgtatggtattggcgttcctttgcagtgcatatgacgaagagaatatcggaacagaagagaaaccggatatgcgtaccgttcttcatttccatccggcgcttgctccggttaagatcggcgttcttccgctgtctaagaaattgaatgaaggcgcggagaaagtatttgcacagttgagcaaatattataactgcgagtttgacgatcgtggaaatatcggaaagagatatcgccgtcaggatgagatcggtactccgttctgtgtaacatatgactttgattcggaagaagacggagctgttacagtgcgtgatcgtgatacgatggagcaggagagagtgaagatcgaagatttgaaagcatacttcgagaaaaaatttgagtggtaagaaggaagcaaaggaacaatgaaaccatcagaagaaatcgtccgtttttttgagaaagatcggtttgcggcagagaccggggcggtgatagacgagatagacgaccgctatgcgagatgcagtctgacattagaggcaaaacataagaatgcgcttggggcagtaatgggaggcgtttattttacacttgccgattttgcgtttgcagttgcttcaaactggcagggcgatacaatggtatcattgaactcacagattgcttatcttggagcggcaaaagggaatatgttgattgcagaagcagtctgtttaaaagacggcaggacaacggcgtattatgagattcgtatcaaggatgaactcgggaatacggcggcagtcgtgagcacgacaggttacaagcttacgaaattgtgaagaacagccgtcgggtaaaactttttaaagaataaagagaaaaaataaaaatttccgcgtggagaagatccatgcggaaatttttgcattcagataagttttgtgctttcgagcttctccgtaaatgcatcattcagacgtatgacaggtttccgaaggagcagaccgagcaatagtgcggggatgagaaaaagagctaatgttccgagttctttccaataaactgtgctgtaaaagccggcaatacattctctcatggcattcatgctgtgcgtaaacggcagaaggggatagactttttggaaaaagtcaggcgctacctcaatagggaatgttccgccgcttccggctacctgcataacaagtaagacgacgcagacggcttttccgatatcgccgaatgaaacggtgagcgcataaatgatacttacatacacgatgcttgtaaaccatccggcgaaaaggaagtaaaccggatgttgacactggatgtttaaataaaacaaatcgcccagacagatgaggctgctttgcaaaaggccgatcgctataaaaagtagacttcttccgatatatgtttcatgaggtttcggattaaaaactcctgtcaaagcttttcctgaaacattgactttcagcatggcggcaagcacaacgccgccaacccacatggcgagtgtagaataaaaaggagccattgccgatccgtaattttcgatcgggtagaccggatgctcggaaagactgaccggagacgcaagaaaggcggcgattgcttccggtttttgcgccaacaagtcggtcaacacggaaagtccgtcacggtttgggtttaagagcgcttcagacgcggatgaaagttgttcagatacattacttagcaaagttgaggaatctgaaagcgaagtatggataagggcaaggtcatcggaagcgctgtttgtaatatctgtcaagtcagaggcgccttcatttaattgtgttaaaagagcggatacagaagatccggtgctgcctagactgcctgccaaattttccagttgatttttaacagttgcttcatagctgtctttcacttccgaagtggaagtcaggctctctttaataagtccgtcgatttctgtttttaaagaatccgcattttgaacggcgccggtaatttttattccggcattatcaagctcggcttttaaatttgtctgatgctcgacggcagtcgaaatctgcttcagaatcggatcgatcacaagactaaggtttgggtttgcgttttttatagcagttaaagagtccgcaagagatgtatatccgtcgatgacagtttgtatcctgtttgagactgcattaagggaagtgaaagcggcatccgcatctgtactgtaggcgtcaagtgcggtttggatcgtggaagagacggatgaataataagtttctccgtcagataatgcctgactgactgcgtcagttgtgccggataaagcggaagaaagagaagcaatcccgtttcctgcatctgtcaaggcgccaaggcttgtctttgttccgtctccggtatgggaaaagataacagaagtcgtatctagcatcaaagaagcggcgtctgtcatatcagaaaatgcctgtacagttccggaagcagaatcaagatcggcagagatttctgcaagcgaagcagataaattttctgcaagagatgcatcccctttttctgcggaaacgtcagcaacaaaacgaaatgcgtccagagctgttttggaaattgtctctgtgaaggtttcgttaatttcctgacggattgcatctgcgcctttttctgttacttttggggcgatggcgttctccttttcgttgatgcagtaagtaattgtcggatgtgtcgtttcagaagaaaacagactcatcatatctttgctgaatgtttcagaaatgacaacagaagcataatattttccggaacgtacaccgttagaagcgtccttggcatctgtaaatatccagtgaagctgtgtgttttcacgcagtgaagaaataatgtcatttccgagattgagccggaccggaagcagttcgccgtcatatcctttatcaagacttgcgacggctacttttaaatttccggtatttttgtacggatcccaacttgcggcaatattaaaccatgcatagagagagggaacgatagtaatgccgaaaataacgatcagcgcgattacgttttttcggatattgtggatgtcgtttcgcgcaatgcgtatgatatttttcatagtcagttttcctccatttttctgaataatttcaacatttcttcaaatgacataccggacagttcctgttgagctgcaagttcgttatgtatgtattccactgtgatcagccatgtggcgattaaaataatagataagatccaaagaatgaggaatacaattttagattcaaggctgaacataaggatcaggaaaatgagcggaatagttaaaatcgcaaaaaatccaaaacggatcattttgtgataatttttttcaaaacgctgtgctttctcggcagtttggatctgaagttcttcttgtgataaagaagcttttagtaaaagagaaagctgtgcgctgtgtctgatatttctgtcgggtgtttcaccaagcattaaatcggtttctgcaagtttaatgtcaaaaagccggttcagacctgaaagcagaggtctgatcccaagtccgatcagtaaggaaacgggaacgaaaaggagcaggatgagcagattgtgtatataagtgcttccgtacattccggcaatacattctctcattgcggaaataccgtaagtaaagggtaggaacggatggacgttttggaaaaacgcgggtgtcatttctacaggatatgtgccggatgatccgggaatctgaaggatgacgaggagaacacataatgctttcccgatgtgtttaaatgagattgacagtgcataaataatattgacatacacaaacgaacagatcactccggtaaagataagagcggctggatgcgcgcattcaatcccttttagaaaaacatctccgatacagacaatgaatccttgcaccattccgaccgtgatatacaaaagccagcgtccgaaatagagagaggcagaagaatatcgaagcatagagctgtctttatctacttctaatttaaaaatcgcgatgaggacgatgccgccgacccaaattgcaaggtttgtgtaaaaaggcgtcattgccgagccgtaattagctattttataaaaactctttgtttctattttcacaggtgaggacataaatgccgataccgattgcttgtcgattccttctaatgagagaagagtttcgtagatgtcagaaccggaaagggcatttaagtctgtttgaatcgtaccgagatgttcctgaacatttgacagggcggtttttgtgccttcaagagccgttacagtatttgaaagtccggcgctcatttggtctaacaggttgtcgatctgatcggcggaggaaggaactgttgttagaagaccgttcatttctcctgtcaaagaagagaaagcatctaatgtcttgtttagctgcggcagaacgtttttgtccaaaacagcgcggaggtcgtgcagactgccgatgtttgcggatgtaattgtgtaaagctgttcccgggtagaagcggttgtgttgatggcattttgtattcctgcatttccggcgcttaaagagaggatcagttcctgattatttgtgttttgagcctgcagtccggcgatggcagaatccaaatcagatccgggaatgagtgaggcgagctctcctaactcttttaaaatatttccgtttaagacggcagtggaattggcaaaatccagtgcgtttccgatcgatccgtttaccgagcgggcggcagtttcaagatcggtaagtcctgctgatgcgatattgtgcgcctgaccgagcaaaatttctccttgtgtcaaagatgaagatagggatgaagaaaagtttcctgcggcagtacgggtttcagagaggatgcgggaagattcgcttagagccgaagaacccgacgaggcggcggattttaaagatgaagcagttgattttgcgcgtgtgatcaggggggcagatttttctgcggctgcattgaagttttcgagaagttgtttgtaggcggcaatgtttgcatcagctttttcaagtgttttagtaatatcggaattgacagatccaagtgttgacgacaagtctgacgcagactgctttaatatgccggaaacggattcagaagcaaccgaagagaaggtgctgttgatctgttcctgaattgcggctgcgcctgtgcctgtgattttgggagcaatggcattggctttttcatttatgtaatagtcaagtttcggcgtctgtaagtcgccggataaaatactgatcaaagagcggctgaaatcttcgggaataacaatagaagcataatattttcctgattttactccgttgagagcctctttttccgaagtgaacgtccatccgagctgtttgttttcttttagatttttgacaatttcttttccagcattgatagaaagattttcggaagatgcttctttatctaaacaggcaatagcgactttaatcttagacgtatttccgtatgggtctaaattggctgcgatattaaaccatgcgtatagagaaggcagcaggcatacgccgatcagaacaagaatcgccgctttattgtgtaaaaggcgggagaggtcacgctgaaaaatgtgaaatgattttttcataatatcagaactccttatatattaatagatacaatgttgattttcttgataaagagtattatattaaggtagaaatagatttacaaccattaatagaagtgtgaaatgtcggataaacgacaatataacgaaatgtgttgacacatgtgaagagatattatgacgaggagaaagcgatatggaaaaaaagacagaccgcagggtgagaaaaactaaaaaccagcttcgtacgggactagcccgtcttatgaagaaaaaaaatatcggacagattaccgtaaaagaacttgtagatgatgtggatattaaccgttcgacattttatctgcattattcggatattccgtctcttctaaaagagatagaagatgatatgattgaggaaatagaaagagcgattctggagcatccgattaaaatcgagaaagacactacatacttgtttatagaagatttgtttcgggtgttaagcgataacagagagatcggatgcgcgcttcttggtccatacggtgatattacgtttatcaggagaattgaaaaatttttggaagaaaacagtcgtgatcttttggcggaacgctttcccgaaaagtttgcggaaatgaaatatttctattcgttttgttttaacggatgtcttggatttattagaacatggcttgaaaacggggaaaatatgccgcctgaatatgcggctcgtcttacatttcaaatggttgtaagttcgcttgatgctttttatgaagatgcgaaagaaaataaataaatattttgtaaataatggtggaaaaaaagtgtgtatatatggtacattaatatctgtacagttgtaacactgtacagtattaaaatggtatataaggaagagaggaaattttatgaagagagaaaaattcggctcccgccttggattcattctgatttcggcagggtgtgcgatcggtcttggaaatgtatggaggtttccttacattaccgggcagtacggaggagcggcattcgtattgatctatttgctgtttcttctgatacttggattgccgatcatggtaatggagttttcggttggaagggcatcaagaagcagcgttgcgttatcatttgacagattagagccgcttggtacaaaatggcactggtataaatggttcggcatggcaggaaattatctgcttatgatgttttacacaacgatcggcggatggctgcttttgtattttgtaaaaatggcagcgggaaattttaaaggcttggatgcgtcgggaatcaaaaacgagtttggcgagctgatgcagcagccgggaattatgatcgtatgtatgatcattgttgtggcagcctgctttgcgatttgcagcatcgggctgcagaaaggcgtagaaaaaatcacaaaagtgatgatgcttatgcttcttgcgcttatgatcattctggcggtacgttccgttactctttcaggggcaggcgaaggactggcgttttatcttgttcctgactttgccaaagtaaaagaagcgggactgatggaagttgtatttgcggcaatggggcaatcgttctttacattgagccttggaatcggcgcgatcgcgattttcggaagctacatagaccgctccagaagtctgacaggagaagcagtatgcgtaaccgttcttgatacatgtgtagcgctgctctcgggatttattattttcccggcatgttttgctttcggagtgaacccggacagcggtccgaatcttatttttattacgttgccgaatatatttaattctatggcaggaggcagaatttggggaagtatctttttcctctgtatgctttttgcggcggcgtcaacgattattgcggtatttgaaaatatcatttcatttgcgatggatctgaccggatgctcgagaggcaaggcagtggcagtgaatctggttgtgattatcctgctttcacttccatgtgtgtttggatttaacctgctgagcggattccagccgctcggagcgggaagcacgatccttgatctggaagattttatcgtcagcaataaccttcttccgcttggaagtcttgtatatcttctgttttgtacaagccgttatggctggggatggaagaacttccgcaaggaagctaatgcgggaacgggaattaaattcccaaaatggtcacggatctatgtgtcatatatccttccgctgatcgtgttatttatcttcgtacagggatattggtctaagttcttcggatagggaggtatctatgttaccatcggtagtgaaaaataaaatagagcagatatggctggatgtgattgcgggaggagtttctcaaccgacagaagtaatagaacagttgacgtatctgatgtttgcaaagcagattgatgaaagagaagcagatattgaaatggcggaattgctttcgggagaaaaacagagtcatattttcggagaatcaagagaagaacaggctcttcgctggagaaactttaaaggaatggaagctcgtgcgcttcacaagcatttcgttgatagagtatttatttttttgatcaatctgaattcaaatgaaaattcagctttttcaagatatttaaaacatgcaacatttaagataaatgaaccgttagcgttacagaaagttgttgccggtttagaagatttgtttgaaaatgatattaaagatttagatatgcagggcgatctgtatgaatatatgcttggaaaattgaattcagccggacgcttgggagcatttagaacgccgaagcatatccgggatatgatggtaaaacttatgatgccgacaccggatatgaagatttgtgatccggcttgcggaactgccggattccttatttctagcgccgaatatataagaagtgaatatggaaacaagatgactgccgaacaatgggaaaaatatggttcagaaacatttacaggttttgatacagatgaaacaatgtgccgtttatcatgtatgaatctgatgctgcattctgttataaatccacagttaaataaacaggatagtgtttctaaagattatcaggtgaaagatgcctatgatttgattttggcaaatccaccgtttaaaggaacgattaataaggagaatatcaatgaatccttattggcaattacaaatacaacaaagacagagttgttgtttgttgcattgtttatcagattgctgcgtgtaggtggaagatgtgcatgtattgtgcctgacggcgttcttttcggttcgtcaaaagcacataaaaacttacggaaagagttgattgagaatcagtacttagaagctgtaatatcgatgccttcgggagtatttaaaccatatgcgggagtatcaacggcaattttgatatttacaaaaacaaatgggacaggaacggataaagtttggttttatgatatgaaagcagatggttattcgttagatgataaacgtcaacctgttcaagaaaacgatattcctgatattattgaaagatttcataagaaagaaaacgaagaggatagagagcggacagaacaaagttttatggttgataagcaggagattatagataatggatatgatctgtcaatcaataaatacaaaaaaatagaatatgttcctgtagaatatccaccgacagaagaaattcttgctgaaattgaaaagttaaacgaggaaattacgaaggaaacggcagaattgagagcattgcttagaaaataaaatagagaagacgaaagttgataagaaagacatttgttattttattgaatcggactttcaaacgttggatttatggtctgacttttgagggggcaaaataataggtgtcttttttgatttcgcatgttcgtgatgcgactggcattttctttcattatagttataattgttgtgattttattactatatttgaaaacttatgtaatgggtatttgattgagtggataaatcttgtataatgaggaggacaataaattaagatttgt

SEQ ID NO: 7677 - DNA, 3841 bp, Unknown
  gut microbiota DNA sequence
ggaattttcagtttttggtgcatcaggatatattggaagtgtagatttttatcagcaaggatatccgtatgtcgcagttgtaaaggatggagctggaattggaagggcaatgttatgcccgggaaaaacttctgtaataggtacgatgcagtatcttttaccgaaagacaatatattgccaaagtatcttttttatgtagtaaaatatatgaatttggaaaaatattttacaggcgcaaccatcccgcatatatattttaaagattataaaaacgaagaatttaattttgatttttgggaacggcaagttgaaattgtaagtgttcttagtaaatgcgaaaaagttattgatttgtgtaaacaggaattacaattattggacaagcttatcaaagcccgatttgtcgaactgtttggtgatccggtttcaaattcttacggtttaccagaagctacattacctgacttgggagaatttggtcgaggagtatctaaacatagaccaagaaatgatattaagttgttaggtggtaaatatccattaattcagacaggagatgttgcaaatgctggactatatattacatcttatagcagcacatattcggaacttggattaaaacagagcaaaatgtgggataaggggactctttgtattacgattgctgctaatattgctaagacggctatattggaatttgatgcttgctttcctgatagtgtggttggatttattgcaaatgaaagaacaaataatatttttgttcattattggttttctttctttcaagcaattctggaatcacaggcacctgagtctgctcagaagaatatcaacttgaaaattcttagtgaattgaaggtaatagtgccagaaaaaaggaaacaagatcagtttgcttcttttgttaaattaaccgacaaatcaaaagttgcagtgcaaaaagcattagatgaagcacaattattatttgatagcttaatgcaggagtattttggatgatgggaaggaaaattatgggagaaacaggaataaagcctatagtaatagaggaaatatgtgatcttgccaaaaagtataatgtaaaaaaagtaattctgtttggctcaagagcaagaggaagctttaaagaaaaaagcgatattgatttggctgtgcaaggcggcaatttcgtgcattttatgttggatgtaaatgaggagacgagtacccttttgtgctttaatattattaatttggacgaagaaatacagagtgaattaagagattctatcaaaaaagaagggaaaacaatatatgaagaaatttgagcattttaaatcaaacttgaaagtgcttgtgacagcagaaaatgaagacttatcaaatgaatttattgtgggtggtattattgataaattttttgtgcagtttgagttgggctggaaagtgttaaaggaattgttaagttatgaaggacaatctatctctgcgacaggttctcctaaaatgattctgaaaactgcatatacgatttttgattttattgatgaggatatttggcttggaatgttaaagagcagaaatgatttaacacatatttatgatgagtcgtcagcaagaagattagttggcgttattttaaaagactatattccggcatttgtaaaaatgcagaaggggattgaagagtattacggtattgagttagaaaacatataaaatgaacagattttttgaagttttcgtatatttttattaagaacgtgaggcagaaagaattatagggaagtttagctattatttgatagtatgacacagaattatttgggatagaaggggaacggataaatggcaaaaatgacagtatatcacggagggtatatatcagttgaaaatccccaagttcgtataggaagaaatacaaaggattttggaacagggttttattgtaccgttatcaaggaacaggctcagagatgggcaaaacgctacgatacaaaagttgtttctatttatgaagtaagattaaatttggatttgaacatcaaagagtttcaagaaatgacggaagagtggctggattttattattgattgccggagtgggaaaagtcataattatgatattgtaattggagcgatggctgatgatcagatttataattatatttcagattatatagagggagttattacaagggatcaattttggagtttggcaaaattcaaatatccgacacatcagattaatttttgtacggaaaaggcattaaaatgtcttgaataccgagggtttgaggaggttgtgtaatgcaggataatattggcagagaatcttcaaaagataacgatttgttttttacatgcagtctgatcgactatattgcaaggaaaacgaaaaatacaagaatggatgttgtaaatacgttagggaaaaaacgtattgaaaaaatttatgatttggcagatgtgtaccatagtgacaatatagatcgtgtgagtgatgatttcatagtggaatcaggaatgaaagaaggaaattttgacaatgtaaaagcatgtggttatgcaataccatcgcattgggatatcggtaaagtttataaaaggctgataaaaggagtcgctgatagggaaaagacaggagtgattgacgcgctgtttcatgtttataattcttttgtaagtgccaagatagatgattataatagtagtatgtattatgaaaatccatcttacttactggagtgttatttggaaaatagagtgattgaataaaagatgcattgcgctggcattaggttgcgtagttttggttgaaggatgttggtacaagtcgaaaggggagtatcaacatggaagaaaaaattgtacttatattgaacgagatgtcagagtatctgtcgattgcacagatgaaaaaattacaggaagttgtgttaaaaacattttcggaaaatgaagctgataaacaagaaatatcaaataatgattttttgcaaatgtttttggatgctaagcggattgaagggtgttcggaaagaacaatacagtattatcgggtcactgtggaacatttattttcaaaaatgaatcagagtgtaaggaggattaccacggaagagattcgtacttatttatcagattatcagaaaataaacaggtgttcaaatgtgacgattgataatatcagacgaaatatatccagtttcttttcatggctagaagaggaagattatattttgaaaagcccaatgaaaagaatacataaaataaagacaaagacagtcgtcaaaagtgtaattacagatgaaggaatagaaaaacttcgcgataattgtgcagaaatacgtgatttagcaataattgatttactgtattcgaccggaatcagagttggagaattagtaaatctgaacattgaagacattgatttagaggggcgagaatgtattgtatacggaaaaggagataaagaacggcgcgtttattttgatgcgaaggcaaaagtccatctgaaggaatatattgaaaaaagaaaagataatagtgaagcattatttgtaacgttggatgcaccgcacgatcgtttgaaaataagtggagtcgaaatacgattgcggcagttaggaagacaactgaaattggatcgtatacatccccataaatttcgacgaacgatggcaacgagagcaatcgataaaggaatgccgatcgagcaggtacaaaagattttagggcattctcagatagatacaacaatgcagtatgcgatggtaaatcagaataatgtaaaaacatcacatcaaaaatatatgtcttaaagtgaaatgtatccctcaagcaaattaagatttgt

SEQ ID NO: 7678 - DNA, 17385 bp, Unknown
  gut microbiota DNA sequence
cagtgtacagcgtgacaaatagtcagggattttgtacagaatactttggcaaagaggttgctagccaagacaaaaccacatataagattgttccgcaaggttattttgcatataatccttcgcggataaatgtcggctctgttgattggcagaggtatgaaaaacgtgttatcgtaagtcctctctataatgtattttcagtatcagaagggattgaccgtcagtatctatactattttcttagaagtgatttgggcagacagatgataaaggctaaggcatctggaagtgttagagataatttaaaactggatatgctgaaagaaatgactattccagatatttctgtagagcaacagaagttttgttcttctgtgttggataagcttcataagttgattcagatgcgccaacaggaattacaaaaacttgacgaatttatcaaagcccgatttgtcgagatgtttggagatgtaatccacaacagcaagaaatggcaagtttgtttatttgcagagatcacttcttcacgattggggaaaatgctagatgcaaaacagcaaactggaagaaatagttatccttacttagccaatttcaatgttcagtggtttcggttcaatcttgaaaatctaaataaaatggattttgatgaaaaagaccgtgcagagtttgagctgcgtgaaggagatcttttggtttgtgagggtggcgaaattggacggtgtgctgtgtggcataatgagttacagccatgttttttccaaaaggcgttgcatcgagtgagatgtaatcaccagataattttaccagattatctggcgtggtggtttagatataattgcgattatggaggtttttctgcattagccggtgcaaaagctactattgcacatttgcctggtgcaaaattaaagcagttacaggtcgccgtacctccaatggaattacaagagcaatttgctgtcttcgtcgctcaaaccgacaaatcaaaagttgcagtgcggaaatattaaaaatttgcttgagaggaggagcttatcatggaaatgaattttgcatttcttgagaagaaacaagaatatgaattgttttcaggagcgtgtattgatgcggaaagaatattagaatcttcgccggtgatgagcgcggtagcttcaagaaaagcattggaattgtgtgtgaaatggatttattcgattgattctgcattagaaccgattggaaatagagaaggattgcagtctttacttcacaataatggctttccttctttgatggatattacattgtggagaaggcttcagcacattgttcggaatggaaatgagtctgtacatacttcaaaacgactgacgcgagacaatgcagttctttctctcaacatattatttgattttgtggaatgggttgattattgttacggaagagattatgttgaacgagtatttgatgagaaaaagattcctgatgcgacaacggatatgaatgtggtacaggaagagtatcggcaggttattaaagacgttcaaaaaaacgctgataaaatagtgaatgaaaaagataaagaaatagaacgtcttttagctttgaataaagaacttcgtaatgagatgaaagttcaaaaagcccgtaatataaaaaatcgggaatatgtttacgaaccggatctgtcagaatggacgacgagaaaaagatatattgatgcagatttagaggcgaatggatatgtgttcgatcaggataaaaagagaaattgtgtggaagttgaatatcctgttgtcggaatgccgaatcaaacaggacggggatatgtggattatgttatatggggagatacaggaaagattattgctgtagtagaagcaaaaaaggcaagcgagagcggagataaagggcggaatcaagggaaattatatgcagactgtatccaaaatatgcagggaaaaagaccgattatattttatacaaatggttttgaaacttatctttgggatgatgcaaacagtgcgcccagacttgtgagcggcatctttccgcaaaaagatatcaatgcaatgattgagcggcgatgtataaagaaatcggttaacagcattcagattgataagcaaattacggatcgctggtatcaattaagagcagttacaaaatgctgtgaaaattatgaaaagggaatccgaaaatgtttgcttgtaatggcgacgggtacagggaaaacacgaacagcggcatcgatagtagatgtgatgacgcgcagtgagttaatgggaaaagtgttgtttttggcagatcgcaaagaattggtgaagcaggcaaaggatgcgttttataaatatatagagaatacaacaatgtgtaatcttttactaaataaagatgagcgaaatgcaaaaattatattttcaacataccagacaatgttacatgcgattgatactataaaaaatgcggatggatcgcgatttttttcgccggggcatttttcgttaattgtaatagatgaagcacatagaagcatttttaataaatataaagcaatttttcaatattttgacgcttgcctgctgggattgactgcgacgccgaagaatacgattcatcagtctacctatacattttttgatatgaaaaataatataccgacggatgtatatgagtatgaggaagcggtggaaaaagatcatgtgttagttccgttttatttaattgagacttcgacacagatttcagatgatggaattacatatgcggatttggacgaggaagagagggaggcatatgaagcagagtttgtcgaagatggaggagtgcctgaacatattccgccggagagaataaataaatatatttttaatgtcgatacggttgatagaatgatttcagatttgatgaataacggcattagacataaaaatggaaatcatgtcgggaagacaattattttcgcacaaaataaattgcatgcaaaatttattgttgatcgatttaatgaattatatccgcaatataaaggtaatttttgcaagttggtggtttgtgatgagccatatgcaggacaaaatcttaaggattttaaaaaagcggatgactatccgtttattacggtgactgtagatatgctggaaaccgggatagatgtgccggaaattacaaatcttgtttttgccaagaaagtttatagccggattaaatttgagcagatgttaggtcgaggaacaagactttgtgaaaacctttttggggaaggcgaggataaaaaagaatttgttgtatttgattatatgaggaattttcaattttttgacgaacatccaaaaggaagagaagcaggggaagtagttgctccggttgcggcaagatttatccgaatggtccagatgatcaaatgtttgcaggatgcaaattatgtagatgtgaagtatcagaatattcgggagaatttgatagatcatgtcgtagatgatgtgaaagctatgggaacagaaagggttgaagtgcgcttagaactaaggtatgtagaaagatataaagaacgaaaacagtatgaatgccttgaggaaattcataaagaagaaattatagatcaccttgcaaaacttgtcgtatcagatgagaaggacgaagcggcaattagttttgatgtgcttatgtatggactgatgttgtcagttatgacaggaggaaaaaatttaggaagattaaaaaggtatgttgttggtaatgcaaatattcttttgaaagaatgcgctacgattccggatataaaagttagaatttcggaattgaaagaacttgtatcagatcattattgggatgttcaggatgttttgaaatttgaagaaacaagaaaatctttacgtgaaattatgaaatacattcccgcgaagaaagaaaagcttcattattcaaattttaaagatatagttgtgtttagagaagaaggaagattgacgagtctgtctgcatctgattttgaagattaccgggcaaaagtaaacgaatacgttgaagcacataaaacgacgccggcgattaataaactcctgcataatgaaccgatttctgtggaagattataacgagttagagcgaatatttactgtagaattagggacggcagaagattatgagatgaattatcaagatacaccgttcggtttgttgattcgtaaaattgcaaagatggatcggactgctgcatatgctgcgttttccacatttattttagaagaaagaccaaatacagagcaacttcattttattgaacaagttgtagattatgtcgtagaaaatgggtatattaataatgttcttgatttgatgaaaacgccgtttgacagaccatataaatttagtttgatttttacatatgaagaacaggtaaaatttgttaagattattaacaatatcaaaaataatgctcttgttacttaaatataaaagatcaattaagtcggcaaagagactgctgcttgagtttgaagtttcaagcgacagtcttctattgccatatttaatactttttcaacactcgtttttccactacattgatcagagcatacaatcccattgccataatacagagcaaaataatcgacatgagaagccaatccatcttaaatacctgactggaatagatgatcagatatccaagtccgcttttggcagcgagaaattctccgataatgactcccacaagacaaagtccgatattgactttcatattgcttatgattgccggaacagaggaaggcagtacaacttttgtaagcgcatgcctgcggtttccgtgcagtgtatatatcagtttgatcttttcctgatcgacattgataaaggcggtatacagattcaagatacttccgaagatggcgacggacattccggcaataataattgtttttgaagttgcgccgagccatacgatcagaagaggggcaagcgcggatttcggaaggctgtttagcacaacgaggtatggttccagtatttccgatagctttttactataccaaagcaagattgccgcaaggatgctgagcaatatgacgagtatgaagctgataaatgtttcgtataaagtaatcccgatatgaaggaaaagagatcggtttttcaacatttccaaaaaacaaagagtgatttttgaaggactgctgaagataaaggaatctataatttcaaaacgagcgcataattcccataaaaaaagaaacacagttaaaataaggacacggctgatcaaaactgtgatcctatgacggcgaaggcgcgttaaaaaaagtttttgtccgttagattgatcattcatcttgatttagctccttccatatttcgttaaaatattgtttgaattccggggcatttcttcggtttagcggggtatcgttttcgatggaaaatgcaatcggaacaattcgggcaatatgtgcggggcgttttgtcaatatgatgatccgatcggcaaggctgattgcctctgaaaggtcatgggttacaagaagcgcggtttttcctgaatgtttgatgatttttccgatatcatcgctgacggtaagacgtgtttgataatcgagagcggaaaaaggttcatctaaaaggagcagttcgggattcggcatgagagtgcggatcagagctgctctttgccgcattccaccggataattcagacgggcgggagttaataaaacgctttaatccgtattgacgcagaagttcttttgcccgttgtttcgtttcctgggatacacttttgttgatttcagcgccgagcaggacgttttttaaaatgctcctccattcaaaaaggtgatcatgctgaagcatatagcctattttggcagattttctgaaagatttttccgatggttcgccgtctaggaagattgttccgttctctgcctctataagtcctgcgattaacgaaagaagtgtggatttcccacatccggaaggtccgacaacggcggcaaattctccgggggcaagctgaaaagaaatatcggataaagcttttgtttctccgtctattgtatgataagaataactgatgttgtttaattccagtaaaggtctcacagagtcacttccgttcttatttaagtatctaagattaatgtatgagagccggcggcagtgtgtgaatatcgacatatcggaacttgatctgatttggaaatgaaacggattgacattgtaatttggaaaaagagatgatatcttattataagtagaataaacaaaaaggtaacgcagcatataggagaacagttaagatgaatgttcagaaaatcaattatcaaaaggaattagataaaatattgaaacgtcttgaagaggaaggccgtgtcccgactcttttgatccatagctgttgtgcgccgtgcagcagttatgtgctggaatatttatcccgctatttcaggatcacggtgctttattataacccgaatatttatcctgagagcgagtatacaaagcggatcatagagcagcagaaactgataaaagatatgcggtttcaatatccggtctcattccttgcgggaaagtatgataaggagaagttctatgaaatggcaaaagggatggagcatttgaaagaaggcggcgcacgatgcatgaaatgctatgaacttcggcttgaagaggcggcgcagcaggcagcggaaggcagatttgattattttacgacgactctgagcatcagccctctgaaaaattcgcagaagttgaacgagatcggagtgcgagtcgggaaaaagtacggcgtagagtatttagtttcggattttaaaaagcggaacggatataaacggtctgtagaattatccgaagaatatgggctctacaggcaggattactgtggatgtgagttttcaatgagagaacgtgagcatagaaaaaaacagtttttataaaaagtatggacatttcgcacgttaatgtgttaaactaggtgaaaaatgcagaacagaaaagaggagatgaaatggcacaactatggggtggtcgttttacgaaagaaacagatcagttagtttataattttaacgcttcgatttcttttgataagcgtttttataaacaggatatcagagggagcattgctcatgtgacgatgcttgaaaaacaggggattctgacaaaagaagagaaagatcagatcatagagggtcttgaaagtatatgcagagacgtagagaacaaaacgcttgagatcacagaagaatatgaagatatccacagctttgtagaagcgaatctgatcgacaggatcggagatgcggggaaaaaattacatacagggcgaagcagaaacgatcaggtcgctttggatatgaagctttatacgcgagatgagatcacacaccttgacagtttgttaagagaacttatggaagttcttttgaaattgatggaagaaaatacagagacatatatgccgggatttacacatctgcaaaaggcgcagccgattactctggcacatcatatgggagcttattttgaaatgtttaagcgcgaccatcagaggatgcgggatatttataaaaggatgaacctttgtcctctcggaagcggagctttggcgggaacgacatatccgttggacagagaatatacagctttgcttctcggatttgacggtccgactttaaacagtatggattcggtgtcggacagagactatctgattgaacttctgtctgccatgtcaacgattatgatgcaccttagcagattttcggaagaagtgatcatctggaatacaaatgaatacaaatttgttgagattgacgacgcttacagtacgggaagcagtattatgccgcaaaagaaaaatcctgatatcgcagagcttgtacgaggaaaaacaggacgcgtttacggagctctcacttcacttttgacgacgatgaaagggattccgcttgcatataataaagatatgcaggaagataaagaacttgtatttgatgcgatcgatacgaccaaaggatgtcttgcattatttacaggaatgttaaagacaatgcgttttaacaatgcccgcatggaagaaagtgcaaagcacggtttcacaaatgcgacggatgctgcggattatctcgtaaatcacaatgttccgttcagggatgcccatggtatcgttggaagacttgtattgtattgcattgagaaaaatattgctttggacgatatgtctttggaagaattcaaggcgatttctcctgtctttgaagaagatatatatgaggcgatcagtatgaaaacatgcgtggatatgcgtaacacaatcggcgcgccggggaaaaacgcaatggaagcggtgatcagagcagaacggcaatatttgaaagaacagcctgctttataaagaatttcgcagagtcaggcttttacagatagaagatactatagaggttatagaggcaagcggaagctgacgtggatatggcgctatagtaagaaagataacaggaaaaataacagtaaaaggagaaagaagatggaacagaaattaaaagtaggtattttaggtgcgacaggaatggtaggtcagagatttatctctctgcttgaggatcatccgtggtttgaagttgtaacagttgcggcaagcccgcgttctgcaggaaagacatatgaggaagcggtaggcgatcgctggaaaatggatacgccgatgccggaggctgtgaaaaagcttgttgttcttaacgtaaatgacgtagagcatgtagcttcgactgtagattttgttttcagcgcggttgatatgagcaaagaagagatcaaagtgatcgaagaggcatatgcaaaaacagagactccggtcgtatcaaacaacagcgcgcatcgctggacgccggacgttccgatggtagtaccggagatcaatgcagaacattttgaagtgatcaaagatcagaagaaacgtctcggtacaacgagaggattcattgcagtaaaaccgaactgttcgatccaaagttacgctccgtgtttggcggcatggaaagaattcggaccgaaagagcttgttgttacaacatatcaggcaatttcaggagcaggaaaaacattcaaagactggccggaaatgctgggaaatattattccgtttatcggaggagaagaagagaaaagcgagcaggagccgcttagagttctcggaaaagtggaaaatggcgagatcgtaaaagccgagcttccgaagatcacatgtcagtgtgtgcgtgttcctgtattaaacggacatactgcggcggtatttatcaattttgaaaagaaaccgacaaaagaacagctaattgaaaaactggtaaactttaaaggattcccgcaggaagcagaactgccgagcgcgccgaagcagtttatccagtatcttgaggaagaaaatcgtccgcaggtaacggcagacgtagattatgagcgcggcatgggagtgtctatcggacgtctcagagaggacagcatgtatgactttaagtttatcggactgtcacataatacagtaagaggtgcggctggcggagcagtgctttgtgcagaagcgcttacggcaaaaggatatatcgcaaagaaataaaaatgatgtggcaaagaccatatttatgaatgataaagggggtctcaaaaatgggaatgacgatgacgcagaagattttggctgctcacgcaggattggatactgtggaagcagggcagctgatcgaagcgaaactcgatatcgtgatggcgaatgatattacaggaccgatggctttgccgatcatcagacagatgtcggataaagtatttgataaagataaggttgtgtttgtaccggatcattttacaccgaataaagatatcaaatcagcggaaaattcaaaagcaattcgtgaatatgcgaaggagcaggggctgaaatggtattttgaacagggaaaatcgggtgtggaacatgcgattcttcccgaagcgggagttgtcaccgcaggtgagtgtatcatcggagcggattcacatacatgtacatacggagctttgggcgcgttttcaacaggaatgggaacgaccgatgtggcaaccggaatggcgacaggagaaatctggtttaaagtgccgtcggcgatcaagtttgttctgacgggaaagccggggaaatatgtaagcggaaaagatattatcattcacattatcggcaagatcggagtggacggcgcgctttataaatcaatggaatttacaggtgacggaattggaaatctgtctatggatgatcgttttacgatggcgaatatggcgattgaggccggtgcgaaaaacgggatttttccggtggatgaaaagacggtcgagtatcttgacgctcattgtgagaaaccgtatacagtttacgaggcggacgaggatgcggtttatgacgacgttgtagagattgatctgtcaaaggtgcgtccgacggtagcgtttccgcatttgccgggaaacgcaaagacgattgatgagatcgaggcagaggaacaggttaagatcgatcaggttgtgattggttcttgtacgaacggacgaatggaagatatgaggaaagctgcggcaatactgaaaggtcatacggtacatcctgatgtgcgtgtgatggttgttccggctacacagaagatttataagcaatgtatcaaagaaggactgctggatatttttgtagatgcaggatgtgctgtaaatactccgagctgcggaccgtgtatgggcgggcatatgggagttatggcagcaggagaaaagtgtgtttccacaacgaaccgtaattttgtcggacgcatgggacatgttgattctctgatttatctggcatcgccggaagttgccgctgcaagtgcgatcaaagggtatattgcaaatcccgaaaaaataagcgctgcagacgaagaggcagattcgcggaatattcaatgtgcagaacagaaagaaggaggaagatcatgagagcgcacggacatgtttttaaatacggagacaatgtagatacagacgttatcattccggcaagatatctgaattcctttgatgcacaagaacttgccagccacgctatggcagatatagatccggattttgtaaaaaaagtacagtcgggagatattattgtggcaaataaaaatttcggatgcggatcatccagagaacatgcgccgctctgcttgaaaacggcaggagtaagctgcattatcgcggaaacgttcgcaagaatcttttacagaaatgcaatcaatatcggtcttccgattattgaatgtccggaagcggcacagggaattgaagcaggtgacgaagttgaggttgattttgacagtggtatgatttacaatcgtacaaaaggaactgaatttaaaggtcagcccttcccggaatttatgcagaaattgattgccgcaggcggattggtcaactatacaaacagtaaaaagaaataatatataaagttttggctcttttagccgaaattcgggcaaaaagaaaagcggcaggcagtactgccgcctttttgcaacggttattatatctaaaacgaaagggagaatttaatgggaaatgaaaaacaaaagggaaaggcttttgcgcttctgcctataggcgtgtttttggtaatctttttaggcgcgggaatcttgtttaaggatttttacgcaatgccggcagtagttgcatttctgattgctttatttgttgcgtttttgcagaaccgtaaagtaagttttcagaaaaagatggaagtgatcgcaaaaggactcggagaggaaaatattattactatgtgtcttattttcctttgcgcgggagctttttcgggagcggtaaccgcagcaggcggagtggacagtacggtgaatttgggactctctcttattccgccgcattttgcagtggcaggtctgtttattataggatgttttatttcagtgtcgatgggaacttccgtaggaacaatcacggcgcttgctccgattgcggtcggaatcagtaaacagacagggttttctatggcaatctgtgtagctgccgtcgtgtgcggggcaatgttcggcgataacctgtcgatgatctctgatacgacgattgcggcagtaaaaacgcagggatgcgagatgaaagataagtttaagatgaattttctgatcgtacttccggcggcgatcattacagtcgtgttcttttggtttgtgacgcgcaatgtagcgtacgatattacagagaatttagactataatttctggcaggttgtaccgtatcttgtcgtgcttataggtgcgttgatcggaatcaatgtatttctcgtgctgatcggcggaactgttatttcacttatagcgggagtggcaacgggaaacattgttttagcggatatgtttactgttgtaggagatggcgttgtatcgatgtatgatattactgtaatatctattcttgtagcatgtattgtatcgcttgtgaagatgaacggcggaatccagtttattctggatcagatcaaaagcaggattcacggagcaaaaggagcacagggaggaattgcgctgctttcgtttttagttgatctttgtacggcaaacaatacggtagcgattgttatgacaggcccgatcgcgaaggaaatcagtgatgagtttgacgttgatccaagaagatcggcatctctgctggatatgtttacatccgttggacaggggctgatcccttacggcgctcagcttcttacggctgcggctcttacaggtctgactccgtttgattttatgccgtatttgatctatccgatgctgatggcagtatgcggtattgtggcgatctgcataaggcgggaacgaaaaagtgcctgagtattcaggaatatatttagttgaaaattgtgttgcagaaagaaaaagaggtaaaataatgaatttattgtataagagtacaagaaactcagaaaaaacagtgacggcatccgaggcgatcttgaaaggtctggcagatgacgggggattgtttgttccggaatctattccaaagcttgacgttacgcttgatgaattgaaagggatgtcttatcaggaaacagcttatgctgtgatgaaacagttttttacggattttacggaggaagagttaaaacactgcatcaacagtgcgtatgattccaagtttgatacagaagtgatcgctccgcttgtaaaagtgggtgacacatatcatttggagttgttccacggagcaacgatcgcatttaaggatatggctttgtcgattttgccgcatcttcttattacgtcggctaagaaaaataatgtgaaaaatgaaattgtaattttaacggcaacatcaggagatacgggaaaggcggctcttgcaggttttgcggacgttccgggaacgaggatcatcgttttttatccaaaagggggcgtcagccgtattcaggagcttcagatggtgactcaaaaaggagagaacacatcagtagtggcgatccacggaaatttcgatcatgcacaaagcggtgtgaaagcgatttttgaagataaaaagctggcggaagagttggcagatgccggataccagttttcatctgcgaactctatcaatatcggacgtcttgttccgcaggtagtatattatgtttacgcttatgcaaaactgcttgagaatgaagaaatcaaagcgggagaaaagatcaatgtgacggttccgacaggaaacttcggaaacattctggctgcttattatgcgaaacagatgggagtgccgattgcaaagctgatctgtgcatccaacgaaaataaagtgctttttgatttctttaaaacaggggtttatgataaaaacagagaatttatcctgacatcttccccgtctatggacattttgatttccagcaatctggagcgtttgatctatacaatcgcagggcaggatgcagggaaaaatgccgagttgatgagacagcttaaagaagaaggcgtttatgaaataacagaagagatgcgcggacagttaggtgattttgtcggaggatttgcgacggaagaagagacgaaagagacgattaaaaatacatatgagaaaacagggtatgtgatggatacgcatacggcggtagcggcacatgtatgcgcacaataccgcaaggaaagtggggatgaaaagaagtgtctcgtagcttcgacggcgagtccgtataaatttatccatagcgttatgactgccattgacgataaatatgcaaagaaagatgaatttgaattgatcgatgagctgagcgccctgtcggcaacggaaattccgaatgcgatcaaagagatccgaaatgctcagatcagacataacagagaatgcgattcggacaaaatgaaagaaatcgtgaaagaaattttgaatgtataatttatgagaggcttgtcgtgtagaaaatgcaggattgataaaaaaatcctgcattttttaaatggcggcgagtcaaaacccagatttttcggaaaccttgacaatcgcttaaaatccacaaatgtgccttttgacacttccggtgattgaaatgtaattttgttttttttagaaataaaatagagcatatgaatttgcagtttataaaactttcatataatcgagagagatagatgaatattattgttgatttttggaaaatgattttgtataatgaaagcataacgctggcattaagcggcgtagatgtgaaatatacattttagaaagagagaggtaagacatattatggcaaacattgatcttagtcagtatggtattacaggaactacggaaatcgtttacaacccttcttatgagctgctttttaaagaagagacagattcaagtcttgaaggctttgaaaaaggacaggaaagcgaactgggagctgttaatgtaatgacaggtatttatacaggacgttctccgaaagataaatttatcgtaatggatgaaaactccaaagatacggtttggtggacatcagatgaatacaaaaacgacaatcatccggcaagccaggaagcatgggatacatgtaaggcgatcgcgctgaaagaactttccaataagagactgtttgttgttgacgcattttgcggagcaaatgcagatacacgtatggcaatccgttttatcgtagaggttgcttggcaggctcattttgtaaagaatatgtttattcagccgacagaggaagagcttgagaactttaagccggattttgttgtatacaatgcatcaaaagcaaaagtggaaaattataaagaactgggattgaactcagagacagcggctatgttcaatattacaagccgtgagcaggttattctgaatacatggtacggcggagagatgaaaaaaggtatgttctctatgatgaactactatctgccgctgaaaggaatcgcttctatgcactgttccgcaaacacagacatgaacggagagaatacagcaattttcttcggactttcaggaacaggtaagacaacgctttccacagatccgaaacgtcttttgatcggtgatgacgagcacggatgggatgataacggtatctttaactttgaaggcggatgttatgcaaaagtaatcaaccttgataaagagtcagagccggatatttataatgcaattaagagaaacgctcttcttgagaacgtaactcttgatgagaacggaaaaattgactttgatgataagagtgtaacagagaatactcgtgtgtcttatccgatcgatcatattgaaaaaatcgtgcgtccgatatcggcagctccggcagcgaaaaatgtaattttcctgtcagcagatgcgtttggagtgcttccgccggtatcgattcttacaccggagcagacagaatattatttcttgtcaggatttacagcaaaacttgcaggtacggagcgtggtatcacagagccgacaccgacattctcagcatgttttggacaggcatttcttgagcttcatccgacaaaatatgctgaagagctcgttaagaaaatgaaagctaacaacgcgaaagcatatcttgtaaatacaggatggaacggaacaggaaaacgtatctctattaaagatactcgtggtatcatcgatgcaattttgaacggagatatcgcaaatgcgccgacaaaaactattccgtacttcaacattgaagttccgacagagcttccgggagttgacacaaacattcttgatcctcgtgacacatatgcagacgcttccgaatgggatgaaaaggcaaaagatcttgcaggaagatttattaaaaactttgcaaaatatgagagcaacgaggcaggaaaagctcttgtttcagctggtccgcagttataagaacagttttttcgttaatcaaagaaaatcatattcagcagagaatatgatgattgtcgatataagaaatgtgaaaaagaaatcgctgaagttttatacttcagcgatttctttgtataggagatgagacaaagtctggattttccaaagacttcttctttcataaattggatttacttgataatatataaaaaagaagatataattatatcaataaaatgatataaaaataaagaaacatgaaagggtgaagaaaatgattattaaagcttcggcaacattacgaaacgattattctacgatttccaatcttgcaagggcaacgagtgaaccgatttatataacaaaaaatggcgagggtgacggagtatttatgaatattgatgcctttgagaaaagggaacaggcattggaacttcgtgcgaaaatcatgcaagcagaagaagaacggttaaacggagcaaagacaagaagtatctccgaagcaagaaaggaattgagagaacgtgcaggaacaatataaggttgagattcttcctactgcgtgggaagatttgaaaagtattgaggactattatttacttcaattcggtgtggaatctgcgatgaaagtaacagatcagatattaaatagtattgaacgtttggagttatacccgaattttggttcacttacacctgacaaatggttgaaccgaaaggggtatcacatgattatatctgaaaggtatgtttctatatatcgactgatagaaaaaacagtttatatatatcatattgccgatacacagacagagtacactaaactgttttcgtaaatgaaattgaataagaattttaagcagaagaactgcctgtcattgaaagattgatgataggcagttcttttactaggagatgagacaaagtctggatttttcagaggcttttggcgtttctggtgattaccgaaaataagtgttagcaattttgttacatgtatataggtatttttgaaatcatgaaaa

SEQ ID NO: 7679 - DNA, 7244 bp, Unknown
  gut microbiota DNA sequence
cgtgagacataagaacgggaaattccaagttgtcttgcaatttcccgctgcgtatattcttctccgttatagagtccgtaacgcatttttaaaataatacgttcccgctgcgataattctttttcgactttttcataaagtgtctgtatattttcttttaggtgaattttttcggcaacttcttcttcatcagtctcgataatatcatataattttatttcgtttccttctctgtcagtgccgattggttcataaagagagatttcttttgcggcttttttcttggaacgaagatacataagaatttcattttctatgcatctggaagcataggcggcgaggcggtttcctttgtcaggattaaaagtgacaacggctttgatcagtccgattgtgccgatagagatcaggtcttcgggatcttcttcggaattttgatattttttgattacatgtgcgacaagtcttagattgcgttcgatcaggatgtgttttgcctcgaggtcaccttctgtgtattttcggatataatatttttcttccgacggcgtgagcggatttggaaatgatttcaagataacacctcttagcacatttgatatagtctatgtaaaagacatgttgtttgtgcttttccatctgtaaactgggaaataaattctgtcatttcgtgaaattttcatttttttcttgacgctcatttttttatgaattatcataaatctacattcccgaagaaattcatcttcggcaatctgacctctgaaagaggtgtctgaccggatcggttggaattcaattattttaagtggtgtttcttctataataaatagtgtataaatcaacagtataaacgatagaagatcttgttattttaacaaaggagaacaggaagctcatagaaaggagtgcaaatgagtttcagtacaattttatctgcggtgattgaaggtcttgaggtggcgtttattcatgtagaggcagatatatcgaacggcctgccggtattccatatggtggggtatttgtcatcggaagtaaaagaagcgggagaaagggtgagaactgcaattaaaaattcgggatttgagtatccggcaaagcggactgttgtgaatttatcaccggctacaatgcgaaagcacggcgcgtcttttgacctgccgatcgccgcggcgatattgactgcattaggacagattgaaaagccggagaaagactgtctgattatcggagaactcagtcttggaggaagtgtgaagaaagtgtctggagttttgccgatcgtaatggaagcgaaagaaaaaggggtgagaaagtgtattgttccgtctgaaaatgtaacggaagcgtcgcttgtcagtgaaatggaaattgtaggagctgcgactttgcaggaagcggttgaggcaatgcaaaacagaagaaagagaaagaagatacaaaataaagagataacggattgtgggaatttgagaaaaacagttcaaaaagaaacgaaatttcctgattttgcagatatgaaaggtcaggaatttgtaaaaagagcagcggaaatcgcagttgcaggagggcacaatcttcttcttatcggtccgccgggcagtggaaagtcaatgacggcaaaatgtattgccgggatattgccgccgcttgatttgcgagaaagtttggagattacaaaaatatacagtgtattagggttagttgatgagaaaaccccgctgattgtagaccgtccgtttcgtgaagtgcatcatacggcaacaaaagctgctttgatcggaggaggaacgattccgcatcccggagaaatcagccttgctcataaaggcgttttatttcttgatgaactccctgaatttcgcagagatacgttggaagtgcttcgacaaccattggaagagcggtatgtgaatctgtcgcgaacatacggaaattatacattcccggcaaattttatgcttgtggcagctatgaatccgtgtccgtgtggatgttttccgaatgcaaattgtacatgtacacctttgcagatccaagcgtatcagaatcgtatcagccgtccttttctggataggatcgatctatgtgtggaagcttctcaagtaaaatatgagcatttatcagatgagcagaaaggcgaaagttcaaaagaaatacgaaaaagaatttgccgggtcagagagatgcaaagaatacgatataaggaaacaggaaatttaacaaatgcaatgttggaaggggatgctttaaataagtattgcaagttgggaacaaaagaaaaaaaggtgatggagcaggccttttcggttatgaatttgacggcccggggatatagcaggattttgaaaacagcgcgaacgattgcagatttagaagaaagtgatgcgatcaaagtaaagcacttgcaagaagcgcttggatatagaatggataacaggaaatatactgtataggaggataaaatgaaaacggaagtgaagagaacggtcgaggcgaagtaatgtgaaatgtgaatagataaataaagtatgaaataaaaggagaatgtatgaagtacgaatattggtttgctaaaatacagggaataaatttgcgaaaaaaaatccgcctgcgtcaatgcatgaaaacagcagaagcgatttattatatagaagaaacacagctgaaaaaaatagaatttttaaacgaatcagagcaagataaaattttgaaggcaaaacggcaggatccggaaaaagagtatgaaagtctgtgtgaaaaaggaattcgttttattccgcattttacggatgaatatccggaaaaattaaaacggatttcggattatccttatgcactttatgtaaaaggcagccttccggataaagctgcgaaaaaggcggctctcgtgggagcgaggagatgtactccttatggtgaaaaatatgcagttgattttggaaaagttttggcagaacatggggtgcagattataagtggaatggctcgcggcgtagatggaatgggtcacagaggggcgcttcttggaaatggtaaaacattcgcggtattggggtgtggcgtagacgtttgttacccgagggagcatatcgggctttatgtagatatattggaacaaggaggtggaattatttccgagatgccgcctggaacgcctccgtttcctcaaaactttccggctcggaacagaattataagcggattgtcagatgttgtgcttgttatggaagcgggagagaagagcggctcgcttattacagtcgatctggcattagaacaagggagagaagtgtatgcgcttccgggtcctgtaaatagccggatgagtatcggatgtaatgaattgatccgtcagggagcgggaattttactttcaccggaaatgtttttggaagaattgggattatcaggtaaaaaaacagagaaagaaggtaaaaataaaaaaatgcttgaaactcaagaggaattgttgtatagttgtctcggtttgtacccaaagagcgtggaagaaattttgaaagaaacaaaactggaagtacgtcaggtgatggaaatattggtttctttggaattgcgcgggtacatacgggaaatatcaaaaaatcattatattattgtttaaaatgaattttcctgcagtttgatttgagtttgaaaatcataaaaacagctttgggttaaaaatgggcacataccgctcagatggaggagtaattttttatggcacattatcttgttatcgtggagtctcctgcgaaagtgaaaacgatcaaaaagtttttgggcagcaattatacagttgcggcttctcagggacatgtacgggatcttccgaaaagttcacttggaatcgatgtagaacacgattacgaaccaaaatacattacaataaggggaaaaggcgatattcttgcggctttgcggaaagaggcgaagaagtcggacaaagtatttctggcaactgaccctgaccgtgaaggagaggcgatttcgtggcatcttgcgactgcgctgaaattagatgaaaagaagatgcgtaggattacctttaatgagattacaaaaaatgcagtgaaggcatccttgaaagctccgcgggatattgatatgaatttagttgatgcgcagcaggcacgccgcgttctggatcgtatggtcggataccggatcagcccgcttctttgggcaaaagtaaaacgcggactgagcgcggggcgtgtgcagtcggtagcgcttcgtcttgtggcagacagagaagaggagattaatgcgtttattccggaagagtattggacacttgacgtgattttgaagataaaaggggaaaagcgccctcttacagcaaagttttacggaacagatcagaaaaaaatgacgatcagatcagagcaggaattaaatgagattgtcaaaaagatcgagaatgcagaattcaaagtttcagatataaaaacgagcgagcggttcagaaaagctcctcttccgtttactacgagtacactgcagcaggaagcggcgaaggctctgaatttcggaactcaaaagacgatgcgcattgcgcagcagctttatgaaggtgttgatattaaaggcggcggaacagtcggtgtcatcacttatcttcgtacggattctactcgaatcgcagacgaagcggacgcatcggcaagagaatatatcgcttctgtttacggagaaaagtatattgcggcggggcagacgaagcaggcggaaggaaagaaaatacaggatgcacatgaggcgatccgtccgacggatatcagcagaactccggcttcgatcaaagaatctctcacaagagatcagttccgtttgtatcaactgatatggaaacgttttgcggcaagccgtatgatgccggcgcaatatgaatctacttcggttaagattgcagccgggcagtatcgtttttcggtttcgacatcaagatgtgtatttgacgggtttagatctgtctatacagaagctgatgaagaaaaagaggaaagtaatgttcttgtaggacacttaagtatggattctgtatttacaagagaagattttgatacaaaacagcattttacacagccgccggcgcattatacagaagccagtcttgtaaaggcgttggaggaacttggaatcgggcgtccgagtacgtatgcccctacgatttcaatcatacttgggcgcagatatgtgacaaaagaggcgaaaaatttatatttgacggaaattggggaagtggtgaacaatattatgaaacaatctttcccaagtattgtggatgcaaatttcacggcaaatatggaaggccttttagatatggttgaggaaggaaaggttgcatggaaagatgtgatccgtaatttttatccggatctggatgaggcggtaaaacgtgcggagatcgagcttgaaagtgtcaagatcgaagatgaagtgacagatgtgatctgcgaagaatgtggaagaaacatggtaatcaagtacgggcctcatggaaaatttttggcatgccccgggtttccggaatgcagaaatacgaaaccataccttgaaaagataggcgtaccttgtccggtatgcggaaaggacgttgtgattcgtaagacaaagaaaggcagaaaatattacggatgtgaaaataatccggagtgtgatttcatgtcgtggcagaagccgtcgaaagaaaagtgtcctgactgcggcggttacatgttggaaaaaggaaataaactcgtatgtgcagatgaaaaatgcggatatgtaaaaacaatcgggaaatagagtggaaaccaaacaaaaacagaggcattcggattataaataaaaaaaataaaaaataagaaataaaactgcggaaatgtattgaaatcagaaaaattgtgtgatagcatattattatctatatatttatctggatttgtgtatacaattattggcttgtaagaagcaaacggaggaaataatgagcgtacaactgttagacaaaacaagaaaaattaataaattgcttcataacaataattcaagtaaggtcgtatttaatgatatttgtgcggtattgaccgaaattcttgattcaaatgttcttgtggtaagcagaaaggggaagattctcggcgtaagtaaaagcccggatgttcaggaaatcagtgaattgatcacagaggctgtcggatctcatatcgatcagatgttaaatgaaagacttttaagcattctttctacaaaagaaaatgtgaatctggagacacttggattttcagcagaggcggtgcaggggtgccaggcaatcgtaactccgattgatattgcgggagagaggcttggaacattatttatttataagcaagataagacgtattcgatagacgacattattttgagcgaatacggaactgctgttgtcggtttggagatgcttcgttctgtaaatgaagaaagtgcggaagaaacaagaaaagaacatatcgtgcaatcggcgatcagtacactgtcattttcggagttagaagcgattattcacatttttgatgagctcggcggaacggaaggtattcttgtcgcaagtaaagtagctgacagagtaggcattacacgttcggttattgtgaatgcgctgcgtaagtttgaaagtgcgggagtaattgaatctcgttcttccggtatgaagggaacctatataaaagtgttgaacgactatatttttgaagaacttgagaaaattaaaaaagaacgtatgtagttttttaaaaagcggaaagtcagatagaggcaggcaggaggaagaacgatgtacgaaggaaatcccgtagatctgcgtatggaaaaaatcatatcggcagatggaatttttgatgaagcgacaaggcagtgcagggttgaaaaatatgatccggaggaagattacatttatcttgagttgaaagaagatgaattgacggtaatttcactcgatgctaaatacagatgttatatttcgacaaggacagaacttttgtattgcacaggggttgtgaaagaacgatattgtcgcgatgaccgaaagtttttgaagcttcggattgaaaatggtttttacaatgtatatgaaggcagaaaaatgacgaaacgtgcgtagatgcgtttcgtctttttgtatcaagaaaaccacgcgatagtcgcgtggttccgtgaaagctttagcggtgtattcagaaataaaaactcctaatgtgtataataaaaacgtg

SEQ ID NO: 7680 - DNA, 15866 bp, Unknown
  gut microbiota DNA sequence
cgtggctggcaggccaataaaagacgcacttgtgcgtggctagtaatattagggctatgcccgaaaatgaaaaaccacccgctaggcgggtggatgtttattgaatgattctgaatgggatcattatttccgatataagagtatcgtttttgtgcgtaaaaggcggtgcgcgtatggttgtcaaaacaatttttgagtattgaattacgctttggttagtgttaaaatgaagaatagtggtggcatcggagctattaccgatgctaaatttatataaggagttaattacagaatatgggtattatagaaaagattttcggaacccacagccataatgagctgaaaagaatttatccgatcgtagaccggatcgaagctcttgctcctgcgatggaggcgctgtcagatgaggaactgaaaggaaaaacaaaggagtttaaggacagactgaatgaaggagagacgcttgacgacattcttcctgaggcttatgccgttgtaagagaggcagcatggagaagtatcggtatgcgtcattacagagtacagcttatcggtggtattattctgcaccagggtcgtattgccgagatgcgtacaggtgaaggtaagacgcttgtgtctacacttccggcttatctgaacgcactttcaggaaaaggcgtccatatcgttacggtcaatgattatctggcaaaacgtgacgctgaatggatgggaaaagtacatgaatttcttggattgacagtcggtgttattttaaacggaatggacaataaagagcgccgtgcggcatatgactgcgatattacttatgtaacgaataatgaactcggatttgactatctgcgtgacaacatggtcatatataaagaacagctcgtacaaagaggtctgaattttgcgatcatcgatgaggttgactctgttttgatcgacgaggcgagaacgccgcttattatttccgggcagagcggaaaatcgacaaagctttatgaagcgtgtgatattcttgcccgtcagcttgaacgtggcgaggcaagcggagaattctccaagatgaatgcgattatgggagaggatatcgaagagacgggtgattttattgtcaatgaaaaggaaaaggcaattaacctgacagaagacggagttaagaaagtagagaaattcttccatattgaaaatcttgccgatccggaaaatctggagatccagcataatattatccttgctttgcgcgcgcataatctgatgtttaaagatcaggactatgttgtgaatgcagaaggagaggttatgatcgtcgatgaatttacaggacgtatcatgccgggaagacgttattcggacgggctgcatcaggcgattgaggcgaaggaacacgtaaaagtgcgcagagagagcaagacgcttgcgacgatcacattccagaacttgtttaataaatttgagaagaagagcggtatgacaggtacggctcttacagaagaaaaagagttccgtgatatttacggaatggacgttatagaaatcccgacaaacaaaccggttcagagaaaagaccttgaagatgcggtatataaaacaaaagcagaaaaatatcatgctgtcgttgaagaagtaaagagagctcatgctacaggtcagccggttcttgtcggaacgatcacgatagaagtgtccgaacttttgagcggtatgctgaaaaaagaaggaatcaaacataacgttctgaatgcgaaatatcacgagcaggaagcagagatcgtagcggatgcaggtgttcacggcgccgtaacgatcgcgacgaacatggcaggtcgtggtacggatattaaacttgatgaagatgcgagagcggcaggcggattaaagattatcggtacggaaaggcatgagtcaagacgtattgacaatcagcttagaggacgttccggtcgtcagggagatccgggtgaatcaagattttatatttcactggaagatgatcttcttcgtctgttcggttcggaccgtcttatgggagcttttaatgcgctgggtgttgcagacggggaacagttggagcataagatgctttccaatgcgatagagacagcacagaaaaaactggagacaaacaacttcggtatccgtaaaaatctgcttgagtatgatcaggttatgaacgagcaaagagagatcatttacggagagagaagaagggttctcgacggcgagagcatgagagataccgtctataatatgatcacagaatatgttgaaaatattacagaccgtttcgcctctccggaagcggcagcagaagactgggatgtaaaaggtctggagctgaacttgcataagattattccgatgatggagcttccgtcagagaaagaatgtattgatatgcgtcaaaaagagctgaaacatctcttgaaagaacgtgcggtgaaagcgtatgaagtgaaagaagcggaattcccggaagcagaacagatccgagagttagagcgtgtcgtacttctaaaagtaatcgatgcaagatggatggatcatatcgacgatatggatcagcttcgtcagggaatcggtcttcaggcatacggacagagagatccgcttgttgagtataagatgacagggtataatatgtttggcgagatgacaaatatgatcgccgagacaacgatccgtacactgttcaatgttcgtgtcgagcagaaagtagaaagagaagaggtagcgaaagttacaggaacaaataaggatgacacttccgtacgcgctccgaaaaagcgggaagataagaaagtttatccgaacgatccatgtccttgcggaagcgggaaaaaatacaaacaatgctgtggaagaaaaccggtgtaatagacggtattataaaaaacaatagaatccgtataataaaagataagacaggatttgtataataaatgaaagaggtgatcaaggtggttttgttagatgaactgaagttaagactaagcgcatatgaagaaccgctgaaagatttgagggattcactttgacttagcttctaagaagctgcgggttgaagagttggagaagcgtttggaagaaccgggattttgggatgatccggaagtttcccaacaagtaatgaaagaattaaaagggctgcaggactctgtaaaagaaatcgaaaagctgtattcagattatgaggatatgatgcttctgattgagatgagcgaggaagaagacagcgaggaaacagcggaagagattgaagaagaattgcagcagtttgaagagacgtttgaagaattgcgtatcgggacacttcttacaggaccatatgacagagataatgcgatcgtgacgcttcatgccggggcgggcggtacagaatcttgtgactggaccggaatgctctaccgtatgtatacgaggtgggcggaaaagaaagggtacagtatcgaagagctggattatcttgagggagatgtggcaggagtaaaaggcgtgacttttgaggtgaagggcgagaatgcatacggatatcttcgctcggaaaaaggagtacaccgtctcgtgcgtatttctccgtttaattcggcaggaaagcgtcagacatcatttgcatcctgtgatgtgattccggatatagaggaagatattgatatagagatcaatgacgatgatctgaagatcgacacatatcgttccagcggcgcgggaggtcagcatataaataagacgtcctcggcagtgcgtattacgcatcttccgaccggaatcgtagttcagtgtcagaatgaacgctctcagcatatgaacaaggataaagcgatgcagatgctcaaatcaaagctttatttgatgaagcagcaggaacaggcggaaaaaatgtctgatatccgcggagaagtaagggatattaattttggaaatcagatccgttcctatgtcatgcagccgtatacgatggtgaaagatcaccgtacaaatgcggaagtaagtaacgtaggcggagtgatggacggaaatatcgatccgtttatcaacgcatatttaagtgcaaatacagaacaggcatccgagcagtgatcggaagcctgttttggctaatagtggttttgtgaaatgttacgaacagaaaaagggataggaaaggaagaataggatgataagtatagcggtattgggatatggcacagtcggttcgggagttgtagaagtgctcgaaaaaaataaggatgttatcaatcagagagcaggagatgaaatcagtgtcaaatatgttcttgatctgagagattttccgggagatccgatacaggaaaagatagtgcatgacattgatgtgatcattaatgatccggaagttcaaatcgtagtggaagtaatgggtggagtagaaccggcgtatacatttgtaaaacggtgtctggaagcgggaaagagcgtggcgacatccaacaaagcgcttgtggcaaagcatggcgcgactcttctgtctatcgcaagagagcgggagatcaatttcctgtttgaagcaagtgtaggaggaggtatcccgattatccgcgcgttaaattcttcgctgacggcagaccgcattgaggagattaccggaattttgaacggaacgacaaactatatgcttacgaagatgttttatgaaggtgctcagtacgacgaagtgcttaaagaagcgcaggataacggctttgcggagcgcaatcctgaggctgatgtagaaggatatgacgcatgccggaaaatcgcgattctttcttctcttatttcaggacatcaggttgattttgaagatatttacacagaaggtatcacgcagataacaaaagaagatatgatgtatgcaaaagagatgaaaatgacgatcaaacttcttgcatcgagtaagcgtgacggcgaccacctccatgcgatcgttgctccggcgcttcttggaaatgaacatccgctttatagcgtaaacggtgtgttcaacgcagtgtttgtaaacggaaatatgcttggagacgcaatgttttacggaagcggagcaggaaaacttcctacggcgagcgctgttgtagcggatgttgtagatgaagcaaaacatcttcacagaaatattatgacaatgtggaaaaatgaaaagctggaacttcttccgatagaggatacggaaaaacgtttctttgtacggatcagcggcgacgaaaaaatgcgtcgggaagaaacagaagcggcatttggagcagtgacttttgtgagagcggaaggtcttgaaaatgagttcggtatcataacagaagtgatgacagagggagcatacagaaagatcgcggagaaatttgagggaatccttcatatgatccgtgttgaagagtaaaataaagaggacgaaaattatgaaatatatcgttattttatgtgacggaatggcagatgaaccactggagtctctgtcagggaaaacaccgcttgaagcggcaaagactctgaatatggatcgtctggcaaaaagcgcggagatcgggatggttcagacagttccgaaaggaatgtctccgggaagcgatactgcaaacctgtcggtgatcggatatgatccgaagaagtattattcaggacgttctccgttagaagctttgagtatcggcgcgcagatgggggacttggatgtgtcttttcggtgcaaccttgttacattgacagaggatgaagattgttatgaagaacgcacgattcttgatcacagttcgggagaaatatcgacagaggatgcggcagttcttatggaagcattaagtaaagggcttgcaaaagacggatatcatttttatgtaggaacgagctaccgtcacctgctgatccagaataacggacatgtgacagaattgacgccgcctcatgatattttgacaaagaagatcggcggatatctcccggaagatgaagtgcttcgggaaatgatggtgaaaagctacgatatattaaaagatcatccgatcaatataaaacgcagggaagaagggaaaaacccagccaattcagcatggttttggggagcgggaacgcgtcctgcgctgacttcgtttgaagaaaaaaacaaagtaaaaggcgcaatgatctctgctgtcgatctgttaaaaggaattgcagtaggcgcagaaatggataatattacggtagaaggagcaaatggcggactccatacaaattatggaggaaaggctgaagctgcggtgaaagcgcttacagaggacggctatgattttgtttatgtacatattgaagcgccggacgagatgggacatcagggaagtacggatgataagatcaaagcgattgaattgatagacgaccttgtgatcggtcctgtggcagaaggacttgagcaggcgggtgaagattacaggatgctgattcttccggatcatccgacgcctgtgcgcgtgcgtactcatacaggtgatcctgttccgtatatgttgtatgacagcacaaatgcagtaaaaggacaggatgagtattctgaacggacggcacagaaaacggggatcttcagagaaaaaggagatcgtttgatcgatcatcttttggaacgtgaataattgattttgcaggaaaataagcagagaaaaagaaagcaccactttgtgttgaggttgagtttgcaaagacaaaacttgcagcaaggaaggtgctttctgcgtttagaagcagtttcaggcttgacagacattcttattttgatgtaaaatagccgttgtaaagtaaaaatgattatgaaagtgttgaagaggacagtaagctgtccggtcatctcagagagggatctgtatggtgtgaagatcctgatgttccggctgactgaataccacctcggagcggccttaatacggcacggtgattccgttatcatcacatgaattaagatggttttctgacgaagacaaacagggtggaaccgcgggagttttcccgtccctgtgtggagtgtttccgtgcagcatagattcatagataagaggcattccgtatggagtgcttcttttatgtttgcggacagggaagaataacaaaaagaaaggaagaaaaagatgaagatcacattaaaagacggatcaagcaaagaatatgcacagccgatgagtgtttatgaaattgcgcttgatattagtgaagggttggcaagagttgctacggcaggggaaattgacggagaggaagttgatttaagaactgttgttgacaaagattgtgaattgaatattttgacatttaacgatgaaaaaggaaaaggagcttttcgtcatacagcatctcatattatggcgcaggcgattaaaaggctgtatcccgatgcgaaacttgcgatcggaccgtcgatcgcagacggattttattatgatatagacaaggagactccgcttacagcagaggatcttgataagatcgaggctgagatgaagaagatcgtaaaagagaatcttgagatcaaacagtatacaatgccaagagaagaagcgattgcgtattttaaagaaaaaaatgagccttataaagtagaattgatcgaagatcttccggaaggcgaaacgatcagtttctattcacagggagaatttaccgatctgtgcgcaggtccgcatcttatgacaacaaaaccggtgaaagcatttaaattaacaagtcttgcaggcgcttattggagaggcgacgaacataataaaatgcttcagagaatttacggaactgctttttccaaaaaggcagagcttgaagaatatctgacgatgattgaggaagcgaaaaagcgtgatcacagaaaacttggaaaagaactcggtctgtttatgatgcgcgaagaaggaccgggatttccgtttttccttccgaacggtatggttctgaaaaacacactgcttgattactggagagagattcaccgcagagcgggatatgtagaaattaatacgccgattatgttaagtcgccatttatgggaaacatcaggtcactgggatcattataaagaaaatatgtatacaacagtagttgatgaggaagatttcgcaattaaaccgatgaactgtccgggcggaattcttgtgtatgagtcagagccgcgttcttaccgtgatcttccgatccgtatgggagagttgggacttgtgcaccgtcatgaaaaatcaggtcagctccacggattaatgagagttcgctgttttacacaagatgatgcgcatattttcatgacgccggaacagattaaagatgagatcaaaggcgttgtaaaactgatcgacgaagtgtatagtttgtttggatttaagtatcatgtcgagctttctacacggccggacgacagtatgggaagtgatgaagattgggaaatggcgacagatgctcttagaagcgcgcttgatgatatcggacttccgtatattgtaaatgaaggggacggagctttttacggtccgaagatcgacttccatctggaagattctatcggaagaacgtggcagtgcggtacgatccagcttgacttccagcttccgcttcgatttgaacttgagtatacaggagcggacggagagaagcacagaccgattatgatccaccgcgttgtattcggttctatcgaacgtttcatcggaattctgatcgagcattttgcgggcgcattcccgacatggcttgctccggtacaggtgaaagttcttccgatctctgacaaatatcttgattatgcaggtaaagtgcttgaagatctgaaggaggcgggtattcgcgcagaaattgacagtcgtgcggagaagatcggatataagatccgcgaggcacagatgaaaaagattccgtatatgctcgttgtaggagcgaaggaagaagaggaaggcaaagtatctgtaagaagcagatttgccggagatgaaggtcagtgtggtctggaagagtttatagaacagattaaagaagaagttgcagcaaagaaactcagagagacagtgcaggataaataaatcataaaataaattaagaagagttcagaacagatgatactatcatactgctgaactcttttttgtattgggatcaaaatgtaaaagaaaaaacatctgttttaaggttcttcttttttgtaagattcatcggtggaaattgtgaccggaatgtcgatgatcttatgcggagtaatatttttaactaaatattcaaataaagttttgatcaataaatatccttggtttaccggttcttgtcccaatacgaaatcaacaacctgtgtttggagcaagtgaatggagccttctgtaagatcgtgacagatcacatggatattctcagaatcatctatgatatccaaggcgcttcccactccggctataccgccgcctgtaatatagattccgtccagatcgggaagtttgttacagtattctaaggtgatgcgaaaggcatcttcttttttatcttgattttcagaaatgccgacgattttgatatccggtcgtgtttccgagattttattttgaaaaccaagcagtctttgctgatggcatgaaagttttgtactgctgataatgattcctattctggcatctttcggaagaatcttacacattaatccggctgcggttcttccgcctttataatgatcctgtccgataaagcataaactttttacttcgggagcaggagagttaaaggtgattacggcgattcctttttcgataagggagttaagaagggcgtaaacatttgggtgatccagaggaaagactgccattccgctgactccgttttcagttaaatcgttaataatccggatttcttcggaaggatcaagactggtcatcagtttgatgattacttcgattccaaaagcagaaaattccttcttggcacggttgattcccgaaataatatcatggataaaggggttataatccggtgttaagatgaccccgatttttaaggattcctttttagatactaacgctttggcaaggaagttcggttcatagtgcagttcttttgcgattttcaaaactttttggcgcgttgcctcgctgactccggaacgattgtttagtacccggtctacagtacctcgagaaacgtttgccagctctgcaatttgttttacggttaccgccatgtaataatcacctcccatataataccatttttactgctaataatataacataatatcgtgctcgtgtctagttacaaaaaataagagtttgtgcaaaaaaaatatatgtaacatacaactcaatataaatgtaaaaaatgcacaaaaaatacagtgaaaaaatggtgaatatatagtattgaaacaataaaatgaacatggtactataaatacaagaaaaacgtgcacgagcacgaaaaagaaggaggatgaagatgaaatttggaacattatattcttattggggaacaaaatggcaatgtgattatttgaaaacattaaaacgagtttcagacatcggatttgacattttggaaatgggtgctcctcacttgttggaaatgtcagattatgaactttcagaattgaggcgcgcggcgaaagatatggatatggtattgacggcaaatatcggaccggcaaaagataaagatcttgcttctcctgatccggatatacgaaaagcgggagtaaactatttgatcgatatattaaaagcaatggaaaaagtaggatctaaatcacttgttggagcaatgtattcttattggccgtgtcaatttgaaataacggataaggaagctgcctgggagagaagcatcgaggggatgaaagaggttgcagaagctgcggaatcattgggaatcgaatgctgtcaggaagttttgaatcgatatgaaacttatattatcacagattgcagggaaggattggaatactgcaggagagtcggaagtgaaaacgttaatctccttcttgatacatttcatatgaatatcgaagaagataatattccggaggctatccggcttgcaggaagaaaattgggccatctgcatgtgggagaatcaaacagaaagcttccgggaatgggatcccttccttggagagatatcggacgggcgctaagagatatcggatatgagaaaggcgtcgttatggaaccgtttcttcttcaaggaggagaggtcgctcgggactgtaaagtgtggagagatttaagtgggaatgcagatgagaaaatgctggatcgctatataaaagaatctttaacatttttgaaacatgaatttacgttttgaggagaggatatgaaatggcagaaatttggacgatgggtgaaatgatcgtggaaattatgcgggagaaagaaaatgagccactggataaagcaggagtttttcgaggaccttatccgagcggagcaccggcgatttttattgatacagtggcgagactcggacataagggcggaattatcggaggagtaggcaaagacgattttggaaaatgtctgttggacagattgaaaagtgacggagtcgatgtgtcgcatgtgattgaaaatccaaaaaaagctacaggatgtgcgattgtaacatattttgatgatggctcccgaaaatttatttttcatatggggaatactccggctgttgaagcgaaagcgccgcagaaggatgtgctggatggagttcggtattttcatgtaatgggctgttctttgtttgctgatatagagtttgcaaaagaaattttaaaagcggcacaaacggcaaaaaaaataggggcgaaggtttcttttgatccgaatatcagaaaagaattaataggggaaaaagagacggataaaattctggagaatctgatgcggttgacgaatgtttttttgcccggggaggaagaacttcttttgttgacaggaaaagaaacagtggaagaagctgttgaagaatgctttaaaaatcctgagcttgaaatattggcattaaagcaaggttcgcgggggtcaaagatttatacgaaggaaaaaacggttgaaacaggaatttacagaattcagcctgtagatgcaaccggagccggagatagttttgacgcggcgtttatctgcggactgtgtgaaggaaagagaattgaagaggcggcgaaaatggcagcagcagcaggtgcgattaatacagcggcgtttggtcctatggaaggaaagatcagcgtggaagcgatagataagatgataaaggaggaatgaaaatgaaaaaagtaaatatcggagtagcgggacttggatttggaaaagaatttgcggcgatttactgtgatcatccgcttgttgataaagtggcgatctgtacaaggaatcccgaaactttaaataaagtgggggaagaactcggaattccggaagaattaagatttacaaattatgatgatatgatttcacatgaagaattggatgcgattcatattgtgacgccgattaaagaacactatcctcagtcgatcaaagcgctaagagccgggaaacatactgcatgtacagttccgatggcgacatctttggatgagttgagagagattgtaaaaacatccagggaagttggaaaaatctatacgatgatggaaacttcgctttatacaagagaatacctttatgtaaagagattaaaagaaaatggtgaacttggaaaaattcagtatttaaaaggtgatcatatgcagaacatgtctctggaaggctggggagactactggcagggatttccgccgttttggtatggcacgcatgtactgtcaccgattctggatctggccggtacaacagctaagagtgtgcggtgtcttggaagcggaagggtaaataaagaaagagctgaacattacgggtgtccgtatgcggtagaaaccgctacatttagattgagaaacagcgatatcgtagcagaggcacatagatgtcttttcgagacagtacgtcaggtaagagagtgttttgatgtttacggagataaaatgtcgtttgagtgggagccgacggtagacgaaggacatactattttcacaggcattgatgattttacaaagtttacagctccggacacagcggaacttttgccaaaagagattcaaaagtatacgttgcgttcagctattaaagatccaaatcagccgtcctttatacaaggaagcgggcatggaggttctcatcctcatctttgcaatgaatttgtgaatgcgatcgtagagggaagacagccgtatatggatgcggttcgctcggcaaattatacggcggccggtatttgcgcacaggaatcagcagaccatggcggagcagaagtagaaataccggattttgcagaagaattttaagctgtttaggagggacttatggaaaaattactggaaatgaaagaaatctgtaagtcttttgggacgaataatgtcctgaagaatgtgcagtttgatctttttgccggagaagttcatgccttgatcggagaaaacggagcaggaaaatctacactaatgaaaatattaatgggtatgtataaaaaggattcgggaagtctttctgttttgggatcagatgaagcgtacacaaatccggatcaggcgctcaaagccggagttgccatgattcatcaagaactcaatccgattccggatatgtctgttgctgaaaatatatttcttgggaaagaaaaaagaaaatggatctttacgtctaaaaaagagcaggaaaaagagtcaaaaagatatttggatatgttgggaatcgatctggaaccgtctgtactgatgagagaattaagtgtttctgaaatgcagatggtggaaattgcgaaagcactttcttatggggcaagaattattatcatggatgaacctacttctgcaattacagaagcggaagtggagaaattatttcaaaatataaaaatgcttaaagaacagggaacagggatcatttatatttctcataaaatggatgaattgtttgaaatatcggatcgcattacagtgcttagagacggacagtatgtattttcaaaaaagacaaaagatctttgtccgaatgatctgatcaaagctatggtagggcgtgagatcacggaaatttatccggaaagtaagagtaaaatcggcgaagtgatccttaaagtaaaacatgcttcacggaaaggcgagtttaaaaagattgattttgaacttcggaaaggtgaaaaacttggaattgccggattgatgggagccggaagaacagaattgatgatggctgttttcggagcggcgaaactggaagaaggtgagattgaaataggcggagttcctgtcagaatacaaagtccgaaagatgcaatcaggcaaaaaatagcgcttgtgaccgaagataggaaacgttacggtttgaatttgacggcatcagtcgaggataatgcggtttctgtaattgagagcagtctttccaaatttggattttatagaagaaagttgggaagaaaagctgcggaggaaatgatcagccgtatgaacacaaaagttacgggaatggatcagattgtcggaagtctttcgggtgggaatatgcaaaaagttgttctttcaaaatggcttttaaatgatcctgatattatcatttttgatgaaccgacaagaggaattgatgttggcgcaaaagcagagatatataagattatagaggaattagcctgtaagggaaagggaatcattattatttcgtcggaaatgccggagttgatcgggttaagtcaaagaattattgtgttgcatgaaggagaacagaccggagaattgcgaggaaaagagatgacgcaggaaaatattatgactcttgcatcgggatacagaaaggaggaaaaagaatgaaagttttaagtaaaaattctgttatggaatttgtaaaaaagacggcaatactctgggttatgattattctgatccttattttatctgttatcagtccaagctttttcagagggcagaatcttctgaatattataaagcaggcgtctattacaggggtaatcggcgtagggatgacatttgttttgatcacaggagggattgatctttccgtcggatctgtaatggcgttatcgggaacaatggctgcatctgtagctgtggcagaaaaaaatatgccgattgctctggttattttagttggagtcggacttggggcgctgtgcggacttataaatggaatcggtgtatcatacattggatttccgccgtttattatgacgttgggcatgatgacgattgcaagagggattccccttgtttttacaaacggaactccgatcttcggactatctgaagagtttaatatgattgcgaattcaagagttttaggagtaccttcacttgtgattttccttgtgatcactgttttagcgggacatattatcctgagtaaaactgttttgggaagacggatttatgcagtgggaggaaatgaagatgcagcgaggttaagcggtgtgtccactgcaaaagtaaagttgtttgtttatgttttttgcggaattttatcgggaattgcaggaattttgatttgttcaagaattacgtcggggaatggcactgtggcggaagggtatgaaatgaacgctatttcggcggcagtaatcggcggtgtcagcatgaccggaggatcgggaaatgttcttggcatggttgtcggggcaatgattttaacgattattcaaaacagttttgatattatgggagtaaattcgttttatcaaaatatcattaaaggaattattattttactcgccgtatttttggatttaagaggaaagaaaaagaaaaattaaaaaatgagttttaaggagcttcctgtataataaaaaatgtggatgttgaaaat

SEQ ID NO: 7681 - DNA, 1825 bp, Unknown
  gut microbiota DNA sequence
cactgccaacatctttttcttcatcatttttcctcctcatataatcaagtgttttttattgaaaattcaaggtttttcaaccttttatatctcagtgaataggcctcagctacaagcatttccgtgtatcgggtactgaaatagtgattaatgggtatacgaaataaaacgtcattgtttttcgctttactggccttgtgtatacccttccctctatggcagctaacctcctatatccaccaggatcatctctgtctccagaggtcctaacttccttcgtactgcctgcccataaccaaggtgtcagctttgctccctaacggggtcatgccccatggaaaatattcctgccgactactggctcattctttgtattattgattactgactcgcttcctgttccagcactgtgttcagtggacgttatctgttacattctgcttattcggtggctgcccagatgacagcctccactatagttacttgtttttcttacgcagcctgcgcataagccgccggtctcctgatgtcattgaccatcttcttgggatcatagcccacgccttttgtcagtatggcataaaaaacacgaagcagcttcgctgctattgccataagtgactgcatcttctttaatggatttagccttctagttgtgtagtaattatggagttccctaaattctgggttcttcgctacaagcgacattgcaacctcgaagagcaggtatctaagtctctttcgacctcgtctgcttattgttgtcttgcccttgtgttttccagaactattttcaaccagtgctaaacctgcaagtttctgcagttctttcgggtcattaaagcgtctgatgtcgcctacctctgcaagaaatccagacactgtcttgattcctacacctttgatttccaacagcttttcagccattggaatctgatttaccaatccttcaatcagacccatcacttcctgaagacgtatatttctggattcatagtcctccagaagcattcggatttccattcttgcagatactgcaccttctttgcttccgacactgtgctcagcagcttcgatcagggtctttgccctcgcctttccaactgctctcaactttgcatcccgccaaatctggttcactccatcaatacccaacgtcagaatatcttctgggagtggtgcttcctttagaatcagtattccacttttggcatccggcttaccgtataccgtcttatattcaggaaaatatatattgaaccaacgattaatcctattttgaattcgtgtaagctccgcttgtaattgaaatctgatgtttgatgccgttctaagatcagcataaacaccgtctggcaggtatgggatcatgtatcgtccctctctaactaatcctgcaatgacttttggatccttacgatcattctttgtcggatgattgtcgtcgagttcttttgatttcttcacatggtgaggatttacaagaaccggtttcatttcattatcttgaagaaactttccaagattaaaccagtaatgaccagttggttccatccctggaatcaccttatccttcccatgcttttctttgatatccagaacccatgccttaaatgtcacgaatcctgcttccgtgttactaaatttgaatggtttcttcgaatactcgactcctctgtaatcaaaagctctggcataatgcgtttcacttccgacatcgattccgagtaccaaagttttttctgtaatagcttcaatttttgcgttctgtgtgttagacttcattgtagatacctctctgttcaataagatttttactaacctg

SEQ ID NO: 7682 - DNA, 6303 bp, Unknown
  gut microbiota DNA sequence
accagatacagagaaatatccatgattcttgttcattcatctgagatagaaactttaaaaaacctttattttaaaggaaaaaagacttgatttattagggagtggaagaatgcaaaagaagattagaaagatcgtatcatcgattcttgcttcctgcatggttattagcgcatttgcgggcatagctccgcaaaaagcagaggcgaagacaacgcttgtcaatgttgccgttaacggtacggtaagtacgcagaacggtgagaatggaagttatgtaatcggaaacatcaatgacggtgatccgaaaacaagctggcagacacaaggaacgtggcctgcaacggctgtgatccagttggataaaggacgcagtatttcaaaagtggctgtagaacttggcgaagacggggataacagtacaggaagaacggcgcttgtgacagttcagtatgcacagaacggcattacaacggatttgattgatttcggaagcaagagaatgacggtagattcaaaagaagagtttacagcggacgtgccgaagtcggcaacgcatatttatgtaacgctttccgatccgcagaattctgatggaagtcagggcgcgttctggccgtcggttcaggaagtggaagtgtttgaagagcaggaagaaaaagtgtctgattacaataacattgcaaatcaggcgaagatcacaacagacggaaacgaaaatcaatctgaaggatcagcaaaccttgttgacggaaacgacaaaacattgtataagttccacaatgaagcgcagacttcagagaagtacatcgctttgaattttgacgaggcaagaacgatggatgcgttccgcattgcttttgagcatgtgggagatacggacagtgttgatttcgcgttcgagtacagcatcctggcgaagaaagcaggagacagcgattatacgaagattgcagatcaccagaaggcaaaccgtacagataattatgcgcaggtttataagtttaatgccgcgcagtattcagaagtgaagattgttatgcattcttgtaagacacagggcggaacgcagaacggatggccggcagtggcagagtttgaggtgtacggaagcgagatcgaagtacaggatacaggcagtatcgcatttaagaaaccggtacatacgccgtctggaaaaaatacggcgaaaaatattacggacggaagcaaaaagacacagtggaccggcgcatattatccgtcttatgtagatattgatctggagaaaaattataaccttgatacggtagaagtatatacaccggagaatggatattctcagtatacgatctatacaagtatggacggaagagattttgataaactggcagagaagacatcaaaagattcctgtgatgctgaaaagggagaagtttaccaggcggaaggaaaagaagcgagaatcgtccgcgtttatatggaatataattccgcgtctacggcggctgtactgaacgaagtccgtgtgacaggaaaagagagcaagtcagaagttcagaaaagacctgagatcaatacagtaaaatatgaagagtcagaatataatgtagagattacagaaaatgatacgaaaaacgaagtttacggtattatcgaaagaagactcggaaaagcttacaaagactggtttaagcttgaacttgcggagaatccgaaaaagaacggttatgattactttgaactttccatggatggagatcaggtgaaaatcaaaggaaacgacggtgtttctcttgcgacaggactgaaccattatctgaaatatttctgtcaggtaaatctttcacaagtgggagatcaggcagatatgccggaaaataaacctgttgtgacagaaaaagtatttaaagagacgaaggcggaagtccgctactcttataactactgtacgctttcttattctatggcgttctggggagagcaggaatggcgtgacgagttagactggctggcgttaaacggcgtgaacgtcgttcttgacgcgacagcgcaggaagaagtatggagaagatttttaggagaacttggatattctcacgaagatattaaagactttattgcaggacctgcatattatgcgtgggcatatatggcgaacctttccggtttcggaggcccggtgcatgactcgtggtttgaagagagaacagagctggcaagaaagaatcagcttattatgagaaaactcggaatgcagcctgtactgcaaggttacagcggaatggttccgacaaatattcacgattatgacaaaaatgcagaagtgatcgagcagggcgagtggtgttccttccagcgtccgacgatgttaaagacaacttcttctacatttgaaaaatatgcgaagaaattctatcagtgtcagaaagaagtttacggagacgtaagcaactattatgcgacagacccgttccacgaaggcggcattacaggcggtatgaatgcgtccgacatttcggaaaaagtattaactgaaatgatcacggcagacaaagatgcggtttggatcatccagtcatggcagggtaatccgacaactgcattgttaaacggtcttgacagagtggaaaagggaacagatcatgcgctgattcttgacttgtacgcagagaaagacccgcattatgatgaaggacgtcccggcgcggaagcatatggagacgaggaagaatttgacaagactccgtggctgttctgtatgctgaataacttcggaggacgtctcggactgcacggacatcttgacaaccttgcaaataatattccgaaagtatttaatgagacgaaatatatcgcgggaatcggaatcactcctgaggcgagtgtaaataacccggtattgtatgatttcttgttcgagacgatctggcaggatgatgcgtcacagaagatggaagtgatcgatcttgacacatggcttgatgattatgcgacgagaagatacggagcagagagtgagtcggcaaatcaggcatgggatattttgaaagaaacagtatataaggcgagcttaaacggccttggacagggtgcgccggagtcagttgtaaatgcaagaccgaatcttacgatcggggcggcttctacatggggcaacgcggtgatcagctatgaaaaaggcgatcttgaagaagcggcagcgcttctgttagctgattatgataagctgaaagacagcgcaggatatcagtacgatctggcaaatgttttgcagcaggtactttccaacagcgctcaggaatatcaaaaaggtatgtctgcagcgttcagcgcaaaagatctggacagctttaaaacatattcggaaaaattcatgtcagtgatcgaagacatggaaaaagtaacgggaacaagcgaatacttccttctcggaagatgggtagagcaggcaaaagcgcttgcaaataatgcggatgactttacaaaagaactgtatgagttcaatgcaaaagcgctcgttactacatggggatcgaaaaatcaggcggaaaaaggcggtctgaaagattactctaaccgtcagtggtcaggcttgatcggtgatttctataaagcaagatggcagcgctggatcacagcaagaacaaacgagctttcgggaacggattatgagagtaatatcgactggtttgagtgggaatgggaatgggtacgcagcaataaagagtatccgacaactgcgacaccgcaggatctgaaaacactcggagcagaaattttagaaaactactctgtaaaaaatccggcggcaaatgatgagtttgaccttccgacagaagggatgactgctacggcaggaagcgcgcagccgcagacagggaaagaaggacccgcatcatatgttctggataaagacgtgtcaacgctttggcacagtaaatatgaaggcgacgaccagaataatctgtggatcgatattgccctgggagagagcaagactgtcaacggactgcgtatacttccaagaaacggcgcggtgaacggtgtgatcgttgaataccgtattgaggtaagcaatgataacggacagtcttatcatgaagtggcgacaggaacatggacaaatgattcaggatggaaatgggctcagtttgatcagacagaggcgacaaacgttagattatatgcagtgagaacattgtcagatcaggcaggaaagaactttgcatctgcggcagaaatccgtataatggctccgaaaaaagaagaaccgcagccggaacaggtaaataagcagttccttgaatttttgatcggatacgcacagagcgcgaaagaaaaaccggaatatgaacatgtcgttcctgaagtgaaaaaagcgttagatgcagcgcttgcgaaagcagttcaggtgaaagataatgaaaaagcgtcacaggagcaggttgacgaagcgtacacagaattgcttgaaatcgtacatatgcttgactttataggtgacacgacaagcctgaaagtattggtcgatgcagtgagcgataagactgaaaaagactatactccgtccacatggcagccgtttaagagcgcattggatgcggcaaatgaagtcttgaaaaatgaaaatgcgcttgatgcggatatcgaggcggctcgcacagcgcttgagacagcggtaaacggacttgtaaaacgtgcagatttcacaaaactgcaggcttcggttgatgaggcgaaaaaagcgtacggggatctttcgggatatacggaagaatccgcagcgaagtatacgcaagcgctgacagcggctgaaacggtacttaaaaacgcggatgcttcacagacagaagtagatcaggcgaagacggatcttgaaactgcgatcagcggactgactgcaaaaccgagtccggataaagtggataagactgcgcttcagagttatgtagatttcgcaaagaaatacgcagataaagaagaagagtatactccttcgacatggaatgcttttaaggcggcatatgataaagcgcaggaagttcttaaagatgagaaggcggcacaaaaagaggtagacgacgctttggctaaactgcagaaagctgccgttgatttggaaatgaagccgagcaaagaaaagttagaggaattaaagaaagcgatcaaagcggctgaaaagaaagatttaagcggatatacggatgcgtctgtcgaagcatataaagatgttgtggaaaaagcaaaaacaatgttgtcagataaagaaacaacagcaacagaggttgaagatatgctgaaaacattaaaagatgcagacaagcttctcgtagagaaagacaatccgcaggaagaagacaaaaagccgagcaaagagcagttagaagcattgaaagaagcgatcaaagcggctgaaaagaaagacttaagcggatatacggatgcgtcagtgaaagcatataaagacgttttggaaaaagcaaaagcggtattggaagacaagaaagcgacggcaaaagacgttgaagatatgttaaaagcgttaaaagatgcagagaaactgcttgtgaaaaaagatgacgttaaggaagatgaggataaaaatccggattcacagaaaggtcaggcagttcagacaggcgatcagacaccgatcatgttctgggcgttcatgctggtagcttccgcagttgttattttcagaagaagaaaaagagcatagagcaatgcataaaaaaatcagcacaggataatcaaatattgtgtgcggatgaatgagaaaagcacagagcctttggaatgggttctgtgctttttgcaatggcgataagccaaagtccgggcttgcccgtgaccttggcgaccgcttgcactcccggaatgtgccttttggtacttccggtgattgtatcaagaaaaccacgcgatagtcgcgtggttccgtgaaagctttagcggtgtattcagaaataaaaactcctaatgtgtataataaaaacgtgacctgccagttacgtaaataaaaacacattaggaggaccgtataatgtcagaacaaaatacagacgtaaaaagcttagcacatacaaaatggaattgcaaatatcatgtagtgtttgcacctaaatatcgaaggaaagtattttataacgaaaagaaagaagcaattcgtgaaataatccgaacactgtgccaatggaaaggtgttgaaatcatcgaagaagaagtatgtccggatcatattcatttacttctgagtatcccgcccaaaatgagcgtttcgggattcatgggatacttaaaaggaaagagtagcctaatgat

SEQ ID NO: 7683 - DNA, 419 bp, Unknown
  gut microbiota DNA sequence
atcattaggctactctttccttttaagtatcccatgaatcccgaaacgctcattttgggcgggatactcagaagtaaatgaatatgatccggacatacttctccttcgatgatttcaacacctttccattggcacagtgttcggattatttcacgaattgcttctttcttttcgttataaaatactttccttcgatatttaggtgcaaacactacatgatatttgcaattccattttgtatgtgctaagctttttacgtctgtattttgttctgacattatacggtcctcctaatgtgtttttatttacgtaactggcaggtcacgtttttattatacacattaggagtttttatttctgaatacaccgctaaagctttcacggaaccacgcgactatcgcgtggttttcttgatacaa

SEQ ID NO: 7684 - DNA, 17470 bp, Unknown
  gut microbiota DNA sequence
ttacaagagcatatcgtaaaacacgagagccacgtttggacatccttgttgtcttagcctgaaagttaccagactgataaacagaaggatccaggcctgcaaaagcaagcagcttgtttggattggagaaacggtgaatatcgcctatttcaccaaggatcattccaccattgatataaccgataccaggaatggtcatgatgacagaatcgttaaatttcatgatatccgtcatctcagcttcaatcttttctaattggctatccagtaactcgatttgttgaatggtttgagttatctgaatagatatagcgctgtcgttggcaccgacagacttctgtgcgagaattcttaattctttggcctgctctttagtaaaatgtccgtgcgagttcactttgagcagatttgccagatgagtcatatgcatggaagcaatctcttttggagaaggtgcttcttttaaaagagcatagacagcattctgatgcagaccggatttgaaaaagtattgaatctccgggaatacttgatcaacataggttgtcagttggattttcaatcgggtgcgttgcttaatggttttctgccgaaagcgccccaaggccttaagatccatcatatcgagatcaaagaaggtaataaatcttaggtcatcctgcatcataagagttttagcaataacaaatgtgtcgaccttatctgtctttgttttacgaacattgttcttacgcatctgacaggttttgatggggttcaacacacacacttggtagaactcagcaacaaggtatcgaacaaggttgtcaccgtagtgtgccgtcgactcaagaccgatgatgatgctgttcttatcgaatgattcgagcttagagaccagcagttggaagccatcagcgtcgtttgtgaatttgaacggctcaatgagtatttcaccgtccgaagaaatcgcagcggcgaaatggttgagtttggcaatatcaatgcctacaaaaattttcatgaggttgtacctccctttcataaagtctgataccatgatgtccaccatcgattatcatcgtagacttgatagaaataagtactctgagtgaaaaacactccggcaacatccagctaataaacaattcagataaaggtagcggcaatacactccagtcgagtagtcaaggctacagggaaaaatcaaaagtccatagtatctgaattgtattgaaccacgatattaaaagaaaggaaacgtgtgataattaacttcctaattatcatacaagggagaaaaatgaagaacagaaaaaaagtattatcatttctgctggcaggtgttcttactttggggtgctttccggtgacagccggagcaacgaataactcaaaggacggaacaaagccggcagatggaacaacagtggagcagccgttcccgaaaacgttgtttttggaggaacataattcatccaaaggatttacaagattccgtattcctgccttggtaactgcaggtaatggagcattaattgcagcaacagacatccgatgggatatttgcggagacggagcaggattggatacggcagtatcaagatccacagataatggagcaacctggtcttatacggtagctaattatctgggagataacggaaaccggtttaatcgtgattcaacagcatttattgatcctgcattgcttgctgacggagatacaatctacctcgcatgtgatttgttgccggcaggtctggcagttgcaaatgcagcaagatatccggcgaaggcaggaagtacaggttatgatacaaatggaaatctgcttcttgcactcagtacaaccagtgtaaatggtctttccagttcaacagcacgtgctgctgcaagttatgattatcatctggaaaaaaaagccgatgcgacatctgagtcctgttatgagatcaagaataacagtaccagtgaagttgtagacggagactatacgatcgatgatcattttaacattaagagtgcagacggagcagtagatacaaacctgttctgtggagatacaccgtacttccagtttccaacggattttctttatattacaaaatcaacggacaacggagccacatggtcagcaccgcagcttgtagatgccaagaatgaatccgagcaggtatttctgatcggaccgggacgaggaattacaacttctacgggaagactgatcttcccgtgctatcagtatacaagtggagttcagaggacatctacaatctattctgatgatgatggaacaacctggcatcgcggagctactgtatcaggcaacagctctgaagcagttattacagaagcagatggaagattgtatctgtttgtgcgtatgtccaatgcctattatatatctgaggatgatgggcttacatggtcagaaccaaaagagacaggttttaagtataataacaattgccagttaagtgccattacatattcaaagaaagtaaacggaaagactgcaattctttttgcaggtccatctgatacatcagcacgtaattcaggacgtatctgggttggtctggtacaggatgacggaagccttcagtggcaggataatccgtatgtagtcaatgatggtacgcattatgcatactcctgtattacagagacatcagatgcacagatcggtcttttgtatgaagatgaagatgagcagcttgagtttgataaaattgcaattgatgatatcgtaaatggtgcagcgaccagtggcgtatgggttgaaaatgataacggtgctgtagttaattcttctgtgatcaatacagatgcaacggcttcttatgttgtaagatgccttgatgcagatgctgacattacggtttcttcatctaacagagcagtgttggatgcaacttatgcagatggaagactgacattgacatccaaggggaatgtaaccggtctgaaacaggtgaaagtaactgttaaagcaggtgaagaatcttttattatgaatgtgacgattacagatgcagaaaagtacaaagtggtcagccttgaaaaagatgagaccaggacattgacagtaaaagacggaaactatgcagatgccgatacatcttctgttgatacagcagtagcgggagttaccgtaacaggtaaggatgtacaggatacatatgaaaagacggtggcacagattgccacagcgatggcaacgtttgatggtgcaactgtagatctgagcaaatgtatgtatacattagaatcaggaagtgacagctacacttataaagtaaaagctacggctgcaaatggaaacgggatttaccttggaccaaaggcatcttctactgccggtatcccgaatgtaacaacagcagccaatattacctttgaaaaaaatccttctgatgcgacattcagtattatggataattcatcaggcggcggtggaaagtatttgtatttccacagtaccgatgcgacaaaacttcatttcgacagacagaatgtggcagatgataactgctggtttgagttatatacaccgtccacatcagcggaagattatgacttgatcaatggatttaagaaaataacaagtgaaaaagaactgaaagccggagtcagcgtgctgattgtgacaaaagcagatgcacagggtaacagatatatcctgctttctactacaggaagccagaagtataatcatgtggcaaaactggtaaagcagacagcagcggctacagagggagcagcgtatccgggaacaagtaccgcagtatttggggatacgaatgtaaggggactttcagagtgtcagtatacattcaagaagatcagcaatggagtttatgcaatttcaggacatacagcagatggagcaaccacatttgtaacaatgggaacagtaggaatcccgaacaaaacagcaaaagccaatattacagttgctgatgttacaaattctaatggcaaggtatctctgtatgacggatcagcttcacgttacctgtatttctggagggatgcatccaaacttcattatgacagacagagaacacttgatacaacagcatgtgcatttgaactgtttaaaaagtccgcaacagcttcagccgattcaccgatcaagggatatgagaagatcaccggagcatcagcgattgaagatggaggacagtatctgatcgcggcagaggttgacggaacatactatgtgatgaacccgacactggatcattcaaacttcagacatgttgccaaggttacaaatacgatttaccggaatcctgccgcagaagccagcacaacgatcaattttacaggagttgcggcaggaacaacatccgtacagatcggtgacgtagtttactatgtgatcgtaaccgatgacgcagttgagtgtacacattctacaacagttgttcttgatgcaaaagaagcaacctgtacagaaaaaggatctacaggcgaagtagtttgcgtggattgtggaacagttgtacaggaagcacaggaaatcgcagcaaaaggacatacttttggtgagtgggtaacagtcaaagaacctacgacaactgaagaaggatcgaaagaaagaacctgctctgtatgccagacaaaagagacagagaccatcgcaaaacttccggataaagaagacccggatcagccggcaacaccgtcagcaccggaaaatgtagcgagcagtgaagtgacaaaagattccattaagatcacctgggatgcaccggcatcaacagaaggaatcgcaggatataagatctatgtcaacggagccgtatatgcaaccgatatttccaaagaagcagtaggatatacactttccggtctgaaggcaggagagacttatcagatccaggttgttgcagtcggaacagacgagaatgcaacagagtatgcggcagcagcactcagcgtaacaacgaagtctgaaaataaagacgacaataatggcggtaataacaataacggcggtaataactataacggcggaaatgacaacaatggtaataatggaaatgccggaaataacaagccgtcagataacaaaaacactacaaccgacaagaatcaaaatagtacagtaaataaagcagctaagacaggagatatgacaaacgttgtattccctgcagcagtgatgctgcttgcaggtgcagtagtggcaggagtccttttcagaagaaaatggatgaaataagagtctgatttgttaaaagaaatacagaagaaaaagaatagaaagcggaagcagatgcattcttaagattctctaaaccacctgaaatcccttgacaaatcagcacatgaccgctatagtatttgtagttaaaaaatatttaacaatttagtaaagaattaaaggtgctgaggaagaggagtacatcgttactgccgtcagagagaaccgttcggggagaggagcaaagctgccggtcagaccggttgggagagaagatcacccggctgaaagacggtttcggagagggatgatggaaggtagcttctaaaccggatatctgaagggctggaaagtctgtggaggttcctggattcaggatttcagaatgcagaggcagggcaggtaggatttcccggagtggtttccgttaaagaacttaagagatacagaaaattgtctgtaagataaggtggtaccgcgagattttcgccctttacattagtaaagggcgttatttatattatagacaattagaaaagtaaaggagagatagaatgagcaaggagcttgataattatgtgaaagcattcgagattgctccgctgacgacattttacaaaaatagtattttggtggcaattatagcaacaatattgaatttgttgattttcagtatggcagcatatgtgcttgtaagatgtagatttcgatttaagggtttgattacaatgctgttttcggcagctcttgtgattccgggagccgcgcttttgcagccgttatatcaaacgttaaattcggcacatctttacgatacgttgacagggttgatagttgtatatgcggcgcttggaatgccgactaccttatatattatgatgagctattataagacaatttctcctactttggaggaagctgcatatattgatggagcaggatttttcagaacatttgtacaaattattttgccgcttacgagaccggcatttgcgactgccggggtacttcagttcctgctttgttggaatgaattccagtttgcgttgacattgactacgggaactgaaaaaagaacgcttccaattgcgttatattatttcaagagtgcgtttgcaagtgattatggagctatgtttgcagctacggtgcttgttacagttccaagtattattgtttatatgttgatgcagaagcaagtaatatccggattggctgccggttctgtaaaagaatagaattcggaggaatgcggatgatgaatgatgaaattttgcggattaatggatttgaaattgtagaagatggatttgatcaagacaaaaataaatattatgaaggaatttttacacaaggaaacggatattttcatgtgagaggaagttttgaagaaggacttgcagatgctccgcaaaatgaagtgtacaccagaacgatgaagagtgtcactacggagcagcagcgacatccactttcaaagcagggaacatttttgccgcttatgatgggaaagcatccttttttagaagaggtgatcattaatttaccgtattttatgcggatagaaattgcggcaggtaatgagaagctggacatgatccgaagtgatattagagattaccgacgggttcttaatatgaaaacaggagaattgacgagatccttcacttggattacagcttccggagaggagattgatgttaaattttcaaggtttgcaagtcttgatgaaaagcgattgtttgtacagcaggcagacttgaaaccaagaaaaggaacgccttacattactgttaagagtggaattgatgccggagttactacaaatggttactgtcattttacagaatccagcctgtttgaaaaagagaataaaattggtgttacagttaagacagatgttggagaaagagcatctattatgtgtgaaaatcagttgcgtggtttagatgcggtatgtcatacagagttagagaaaacaacaatagatgtaatttatgaaggggctttgactgaaaatgcgacattagtgaaatatagtgtactgggatgttcgagagaccggacagaagactacatcaaagaaatgaaagagtgtcttgaacaaacagcgagattagagtataaacaattacttgaaaaaagtaaaatcatttgggagcagaagtggaaagattccgatgtgcttgtagagggatgccaaaagctgcaggatagccttcggttttcgatttatcatttacttagatgtggcggaaaagaggaagaacgtattcaggtatgcgcgaaaggatttgccggcgaggcatattatggaagatatttttgggatagtgaaatgtatcttcttccgttttatctgtatacggatccgctatcggcgaaaagtttaatcggctatagatattggactttggaaggagcaaaacaaaatgcgcagcgatatcattgcagaggagcacgttatccgtggcagtcagggcttacaggaacagagcagtgttctatgtgggaatatgcggataatgaagttcatattacagcagatgtagcatttggggtaatgcattattactttgcatcgggtgatgaaaagttcctttttgataaaggggctgaaattctgttggaaacttcaaggttttggagtgaacgtgtggataaaggcgaagacggggaatatcatcttttgaatgtgatgggaccggatgaatattctcctatgacaagggacaatgggtttacgaactatatggtgaaattcaaccttatttctgcattggaaacattacgccttttgaaagaaaagaaaccggaccgttatcgcgaagttatggaaaagacaaacactttggaaagtgaattggagattttcaagaagattgcagattctcttgtcgttccttatgatgaaaaacgaaaattgtatctgcaaagtgcagattttgaagattatgcactaatagatatggattccatttggaaggataagaagaaagcgtttggtcattacgcttctcaggaaaagatttatagaagcaggtgtatcaagcaggcggatataattgcgttaatgagtattttcccggaaaaatttacagaggagcagttgagggtggcatatgaatattataaacctttgacaacacatgattcatctttatctccggcagtgcatatgcttgtggcaaatcgattgggaatggaagaagaaacagaacaatttcttgatcggacaatagcggtagatatggaacttgtgcgcagaggagcggaagatggaatccatatagcaaattgtggcgcgctgtggcaaatggctgttcaagggtttatggggatgctgccggcttatcagggagagaaacttcgatttgaaccacatatgccatcgtttataaagagtatggagacgacgcttacatggaaaggaagaaaatataaggtacatgtacaaggtgaaaaagtatctgtgcaggaaatgccggtaaaaaaaagagggtttttgtttgacttagacggagtgttgacggatacttctgaatatcattttctcgcatggaaaaagctggcggatgaattgggacttgcgtttgataaaacagtaaatgagcggttgaaaggagtaagcagagagcgttcgtttgagataattttagaagtaaatggggcgcaggaaacatttttatctgaggataaagcgaaatttatagacaagaaaaatgaatactataaagcgttgatcaagcaggtgacgtcaaaagatattcttccgggagtgatggattttttgaatgaatcgaaaaagcagggaattcttcttgcggtagcttcggcgagcaagaatgcgagaacggttcttgagggacttggaattctgtctatgtttgattatgtggctgatgcttctaaaatacgatatacgaaaccggatccggaagtgtttatagattgcatggaacacttaaaactacaaccgtgggaatgtattgcgtttgaagatgcggcggcagggatagaagcgattcaggcggcaaacatagctgctgtcggtattggagcgagtgttaaaccggctgttccggacgtattcttggataatacggaagagttgtctattgaaaaaatagaaaatttactttataagtaagttttgacaaatagcggtctgatttagaaagtcattccgctatttgcagtttcacggcagaattctcagagcaatagtgtttagcaggttttcatagtttcttcatcggtcagccattccatacttacatctaaagtttttgcaagaatttttaactcataatcggtgacgaatctggtgccgatttcaattctgctaatactatctctttctattgtgattccttgagtttgcaggcgggcggccaagtctctttgagtgatgcgtttttttgttctggcaagtttgattttttcgccacagagattttttcttccttcatagttatagattttcatatatttatcggccctcttttgcgtggtaataatcagaaattttcttgactttaacatattttgaacgcataattgtgttaaagatacgcataaatgagttttattactctggattgctttttagaaaatatattacatggcggaaaacagagaacatcaattagtggaaggagatgctgtaatgagagtgtcagggggagggcacttcaaacaaaagtcgataaaatcaaaatttgtatcaatatcgcttagagataaattgatttttttgtttgtgggaactttgtttgttgagttgctgttattcggatgtgttatgtctttttatctgtatataaatgccaagaaaaatgtttccgataatattgatacaacagttacggcggtttcagaggtaatggatcaatcttttttggtgatggaaaatttggtgttagagttggctgcgagtaacggggtgcaaaattggctggatgacagtcattattatgatcgggaaaattctgaattttatcttagaaaaacagaatttagcagagagttaaacaggatattaatatacagtaatgcaaaaaaattagatgtagttgaatatgcggcggtatttaatgatggttatcttttggattatgttgatgtgcagtcagtcggtggaaataaagtacagcgagaagtttataaggcgtatgaagcggcagaacaagaaacagaaaaatacatttattcggaacttgtgatgggctctgaaaatgtgatttttcatatacgcagaatgagatcggattttgaaagagatgttccgcttattataatggttgcgacaaatgaaagagatattgcatcacagtatgagaatctcgttcaaaatgaaggtgaagtagtatatttgatagatgaggaaaataaagtactgtcaagtaataaagaagatgaaataggttcgtatatagatgaaaaaattacagaatgtgataccggggaagtctatttgaacgaaacatatatgatgacttccagagaagtggaaaatttgggaaagggagtacgccttgttcacctttatccacaaagtttactgataaaaaaagttttggaagggatacggacgtatatcattttgggggttatgctgattataatatgtcttattgcagctgttgtaattagtttgaaatcaacgggatttctaaatgaatttatacatgcgatggaaagtgtgcggaatagaaattatgatattcggatcaaagaatataaaaatgcagagataaatagtctgggccgagcatttaatgaaatgatggatgagctaagggagttgattcgcaataaatatgagtcgcagatattgcttaatgaaatggaaataaggtttcttcaacatcagatgaatcctcattttctttttaatgtattgttgacaatacaaattaaagcgaagagaagtgggaacgaaacaatctataaaatggtatcgaaattgtccgcacttttgcgagccagtatttatacgaacaatgttgatagaatcacagtgggagaagaacttgaatatacagaattctatttatatcttcagaaaatgagatttgagggtagatttttttataaaattattgttgaggatgaagaactaaaaaagagtattatacccaaatttgtgattgagcccattgtggaaaatgcggtgattcatgggattgaaaatatagaaaacgagggtgtgatacgaattgtattaaaaaaaatggggacggatttgcttgtgacggttcaggataatggagcggggtttgatgtgaaagaatattttaattcacttgaacaggctgagaacggttcgtcaagagaaaaaataggcctaaaaaatgtagatttaagacttcgacatatttatggagaagagtaccggattaaaattaagagcaaaataaatacaggcaccactatttacattaagagaccgattgaggagagagaagaaaatgtataatgttattgttgcggatgatgaaaaaaatatcagggaaggaattgtggaattaatagagtgggaaaagcttggatgtaaagtttgcgcttctatgcaaaatggcgcgcaagtgttgaaatatttagaagaagaaaaaatacatgtagatattataataacagatataaagatgccgattatggatggaatggaattaatcggaatgcttaatgaaagatttccggatattaaagtgatcattttgacggcatatagtgattttacatatgcacaacaggcaataaaatttcaggtttctgattttgtagtgaaaaacgatttttttttagaattgcctagagcagtgaaaaaaataattgagcagtgtgaagtggatgcaaaaaaatgtgtgggcagagagaaagagatcccctttttccaaggcgaagcatgcagggtatgtgcgtgtgaaatgcgagatattgaacgttatgattatgaggtgtgcaaaaatagaatagaagagatattgaatagtacttttttagatcacaaagttgtggtggctgagggagaaagcgggatgcttattttcgttatagaatataaaggctcggaggagaatgctgcgtggtttcaaagaagactggaaaaagttgtttcgatagcaaagatatttcagaatataagattgaggattggagcgggaaaggttgtaaagagtgcggaatggggaagagtggggaaaaaacaggctataagaaacctttccgatatatatacagataatagtcctgttaatgtaaaggaaaactatacggaatatattcagtattggaaagatgaaaatgatgtggaaagttatatgaggcgtttgtatgttgcgctgcgcagtggaatggaggagaacaagaagttatgtgcagaggagtttgaggaatatttaaaacaggaaactcgtcctatagagcaatgccggtcggatacgcatgcaataatattgtaccttgtcagaaaggtgaaaagcaaggaaaaaatggaaaagatattggtgcctgagaaggcgcttgatgcagtttatagaagtaaatcaaaagctgcgcttgcggaggtgatgagagaaacctgcgaggctatttcgactattttggaagaagaacaaaaagaaggaagcagcttgtcaagaaaggtaaattctattattgaaagggattatagagggaaaataagtctgaaagatattggtaaagagttgtttgtaaatagtagttatttgagtcgggtatacaaaaaagagacagggtatacagttactgacgctattaattcatatagaattgaaaaggcaaaagaaattctcgaaacaggagaatatagagtttgtgaagtgggggaaatggtggggattgaagatccggcatattttacacatgtttttttgaaatatgaaggaaaaagtccgtcggattttatgaatcgataaatttatgaatcagtcaaaattttacaagaaaataaacggtcgatgtggtgtcgatttgcacagaatataataagagataactacatctgtaatggaaatgctgtgaaaaagttccaaaaatatagaaagaacaaagaaaatactgatatttttgtgcgaatatggtaaaattctaatacttgtgaaacttgaaaaaataaaaaaagatcaaggggaaaggaaaagtatgaaaaagagaaagtatctggcattgttattagctgccggaatgatcgtgcagacagctctttcgaccggcggagttgtgcaggttcaggctgccgaagacacatacgttaaaacggatgagctgacagacaacgatacggcggcgccgaagaaggacaagacgataccgtcaaagaatcagtatgagtatcagaaacaggaactggctgcattttgccactttggaccgaatacatttaatgagatcgaatggggagaacattacggcgataagactccgaatgagatctttaaactgacggaagattttgatgcggacacacttgttaaaacattgaaagaagcaggtttcaagaaattgatcgtgactgcgaagcaccatgatggtttctgtatatgggcaagtgaagcaacgcagtacgacgtttccggcgcgacaaattatcagggtggaaaaggtgatgtccttgccgacatttcaaaagcatgtacagaacatgatatggacatgggcttatatctgtccccgtgggatatccatgatgaaagctatgggtataaagatgcatccggtaaggcattagtagagtttgtggatactaataatgatggaaaaccagataaaaaccaaccggtcaatggtttgacttgggaacaagtaaaacagcaagatgcgaaagattacaataaatattataatgatcagttgatcgagatacttggaaacgacaaatacggaaataaagggcattttaaagaagtatggatggatggtgcgaaaggaagcggcgccggatatcaggaatacgactttaaaaaatggtttgacacaattcagcaatatgaaggaattgccggaaatcaggttgacgactgtatgctgttcggagcagaagcttacacaactgtccgttggatcggaaacgagaacggatttgcggcagaggagacttggtcaaaatcgaatgtagataaagagaaaaatacgattaacagcaactcttcgggcggatatacgaaaggtttcccagacggaaatcagtggacagttccggaagcggacgcacgaatcacgtcaggatggttctggggagatagtaagaagacaccgaagacaatggaagaattatcagagatgtacttccgctctgtaggtcataatgctccgcttcttttgaatgttcctccgaataataaaggaaaagttgacgatgcgatcttaagacgtgtaacggaattcggtacggctattaataaaacgtttgagaagaaccttgcaaaagatgctgaggtttccgcaacagaagttcgcggaaaggacacaacttattctccgcagaacgtattggacggaaaagatgatacatattggactgtgaatgatgagacaaaatcaggcacacttctgatcgacctgaaaaaagatacactgttcgatgttgtgtctatcgaagagtcgattgagttcggacagagaatcggcaagtttaaagttgagtatcagactgcgaacggtgagtggaagaagtttgacgagggaacaacggttggcgcgaaacgtctcagccgcagaagccctgtaaaatcaagtaagatcaggatcacggtaacggcgcatgaaagcgcggaaaataaaattcctatgatcagtgaggtcggcgtttataaagcggcggcaggtatggaagctccgaacggaattccggaaggacttcaggtagtcgatgacagagcgtttacggcagacggatggtcaaaggagtcgggagatcagtttatcgaaggcacaggtatgtggtgtcgtccgaatgcagaggcaactgtgaagtttacaggaacgaaagtatggcttgtaggtacgatcgatccgagccacggtccggcagacgtatatatcgacggcaacaaggtggcgtctattaatacgaagtcagataagagaaagcttcagcaaagaatctttgagtctgatacgttaaaagaaggaaagcatacattaaaaattgttaatacaggaacgggtacagaggcaatcggagtagatgccgcgttagtattgaacaacggcggaaaaggtatgttccagatcgagtatccgagctatcgtgttaatgaaaacacaaagactccgatcatggtaaaacgtctcggaggaacaaaaggcgaagctacggtacagttccaggtaaatccgggaagcgcatggcaggatcactttaatgcagacggaaatatggagttgaagtttgcagacggtcagacagaggcgcaagctcatgttgagacaagaagagtgccgggagagacaggcgatctttcctttactgctgttcttgcagatccgacgaacggaacgattatcggattcaataatccggcgacagtgacgatcgctgactctgagcagtatacaaaagaaaaagtaaaagaaaaattagctcagatcgagaaagcaggatataatgaagcgcagtatacaagcggaagctgggaagcgcttcaggcggcgataaaagatgcgaaagcagttatggaaaaaacaaatgcaggagcacaggattatgccgaagcttgtacgaaactggaagcggctctgaacagtcttacaaagcgatctacatacacagatgaagatagatttattatgcctcgtctgaaaggaagaacaaaacagcttgaggcagagcacttcatattagataaaggaacatcggaaaatggtaaacacgttcgccttgtggcagatgataaagcaagtaacggacagaaagtcggttggtttgaaaaaggcaacatcatcaaagttccgttccatgcagataaagcgggaacatatacgttcaaagcaacataccagagcggaagactggcaagcggaaaacagccgaactctttgaactggtctggcaagaacgtgacagcaggatctaaggctgacatatatggaacagagtctaacggaacgaaatatgagacgttagagtttgatgtagagatcacggcagcaggcgacggagaactgatctttactgcagacgacaaaggttctccgaaccttgataaatttgaagtaacggcaaaagaagttccgatggagaaatacacgatcacttcatccgttgcagaaggcgagcagggaacgatttcaccgcttggagcagtggaagtagaagaaggttcttcaaaggaatttgaaatgaagccgaatgaaggctatgcagtgaaggatgtagtcgtagacggaaaatccgtaggttctagaacgaaatatacatttgaggaagttttggcaaacggacatacgatcactgctacatttgaaaaagagatgtatgcggaagacaatcgatttgaattccctgtagacggaaatgcaaagactcttgaagcagagagacttgaagctaaaaacgtagaagacccaagcgacggtcagtggaagatggaagtaaaggaagctgattgggcaagcggcggtaagtttgtcaactcgatgaacaaaggcgatacgctgacactttactacaatgctccgcaggcgggagaatatacagttacgttgtcttacagaagcggaagcactcagaacggattcaaatgggcagaaaaagacggcaagatcgaagccggagaagtaacggcaggcgcaagcagcgcagatgcgacacatacgaaagaattcaaactgaatgtgaaaacagcaggcgaaggatgcctcgtatttacggcgttcgatacaaaagctccgcagttggataaattcgatatcaagagtccgggaacaccggttcctccgatttctgcagtagagcttgaagcggcagttaaggcggctaagggattagatctgaatgattacaaagatgacgatgccaaaactgcatttactgcaaaactggaagaggcggaaaaacttcttgcagacattgccggcggaagctttgcgggaacacaggacgatgtgaatcagatggcaaaagagctgaaagctgcacaggaggctttgaatgaaaaagatcagactcctcaggtgaataaagatacgcttaaggaggcaatcggcaaggcggaagcgcttgatctgacacagtataaagaagaa

SEQ ID NO: 7685 - DNA, 5708 bp, Unknown
  gut microbiota DNA sequence
gcttccttttcgcattaaataatcagcaagaatccctttttcaatgcactcttttatcgcttttttataaggctcttcctccccggagatctggtagttctgtacagtttccataaactggctatattctttcagtacctgacacctttctaagatttcatgatgttcttccggccggatattgatgacctttacttttaattccagactcggctcaccgtcctttacgatataggcatctgacaagcgcagttctttttccttttcccatttttcttttccgttatagaatgtgtaaaattccggtgtcggaagggaaacgattttcttcttataaaggcttctaggcggcacaagtctttcatatgcacgcccgatgtatagcagactccgaaggagcatgttttcgttgaccgtagacggatgctcgccgaatacgatcacttttcctcctgcgtcaaaagaaatatcgttttgaaaattcatatagatcgtattgtctacacggaatttccgaatcttcgttccttccggcaacggctcatcatggattgcattaaaaagcgcgatctcgttcgcttctgctgattcgtcctcatagaataaatctacaaagacactgtttttaatttctctgttttcttttcctgccataggctctcctttcatgtgcatgaataagtcctgcagtacaggcgggaaaatacttttaagcttactgttttcaaacttgctgcttttaagcttgctttcgtcaaaagtcttcctctgaaaaagaaaattttttctcttttttaagaccttctcttaaaaatcagtatacgaaaaaaagaactgttctacaaggctatccacgcaaaaactgttgttgtattgtatcgggtaattttgagggaattcctcaggtcggcgaagctgccggtagcttccacagaaagaatttctgtaagtgggattatcataacatacttactaattagaagcaatgatcttttatctattcaattttcaccattaaaaaatatcagagtagcttaatggcgaaagggaagcaaagaaaatccccttttgaattgtcgaaatgcacaaaaaatatgatttaaaatagaaaaagtatacaaaaattatattttgtgtaaataaaatatacctgaaaaatgtaaaggtgttataatgaatatgattatgctcggtgttttgtgaaaaacatagattatgtctaaatcaccgtaacaaagattaaaaaggagaaagtgtatgaaaaagaaagtagtgagctgtttgttggcagcggctatggtcgtaagcagcggagcggctgttccgggatttttctttacgcctgaaaaggtacaggctgaggaaaatgatacgaaagcggaaaaagaaaatcttgcgttaaaaggtacagctgcggcaagcgaagcagaggctgattccacatcggcggctaaggcgattgatggaaataaaggtacgcattggggcacatcacagaacaaagtgacaaacgagtggatagaagtgacacttgaaaagccgacgaaagtaagcgaaatcaaggtgttttgggagagaacgggagcagccggaaatcatcagaataacatcaagcagtggaaagttgatgtgaagacgatgagcggcgagtacaaaaatatttatcaaaagacggatgaagatacatatgcgccgtcagagcagacgatcacagtggcagaggacgcgcaggaagttgtgactgcagttaagatcacagtgaacaaggcggatagaggaccggatgatttctggagcaatatcggacttagcgaaatagaaatttacggagaggagtccgatatcgaagcggcagagaataagaatcatgtgaatgcagcaggcgttacggcggaagcgtctacgacagaggcatcttcgcttccggtttctaatattaaagacggcaacaaccagacgcgctgggcttcggactattcggaagcaagtaagcagacggtaacggtaacatttccgaaggtgacgcttgtaaaagagctggattttgatcttcatactcgagacgtggcgccgatgccgtctaatgtgaagtcctttgatcttgtttatgcagatgcggcaggaacagagcatacggttaagatcagcaacgcgaaatcgacagaaagcggcaagacaggctatgtgacaaatgtacagcacatttttgagacgcctgtttatatgaagagcttcaagatgacgaactttgatcttcagattgacattgaaggacagaacggatataacaacatcagtattctggaagtgagagcatattccaatgatcagtctgagacgccgcagggtcagacacttgacgaggttgttgcttcgatcaaaggcactaagattgcaaaagatgtaaatgaatttacactgccgaatgtaccggacggatttacgatcgagtcgaacggagctgattttgagcagatcatcggagaggcggataaagagacaggaaaacttcctgttgttcatccgatgacggacaaagaagtgcagatttctttcaatgtaactgagacaaaaacaggaaatgtgaaaaataccggagatcttgcatttacggtagaaggtacgaaagatactacaaaggcgaaaaatgcgaaaccttcggttattccggagatacaggagtggttttcggaatccgatcagaaagtgtcggttgatacacttacggaagtaacatacagtgatgattcattaaaagcgattgtagatgaatttgtatcggattataaggattttacaggcaaagagttaaaagcaggcaagagcagcgaaggaaaggcaaatgcctttaactttaagaaagccgcgcctgatgagcttcttggcgacgaaggttatacgatggatatcaaatccgacaggatcgacgtacagtctgtctctgtgacaggtaatatgtacggtatgcagacgatccttcagatgtataagggaagtgaagacggcggatatagtatcggtacgatgcgcgactatccgagatacgagacgagaggatttcttttagacgttgcccgcaagccggtttctcttgagatgatgaaagagatcacaaggacgatgcgttattataagatgaatgattttcaggcgcatttgtcggataactatatctggcttggcgaatacggaaaaaatggaacggaaaacaatgcgtttaatgcgtacgaggcatttcgtcttgaatccggattgacaaacgaagcaggagaaagtcctactgcgaaagattactcgattacaaaagaacagttcaagaaatttatcgcagacgaacgcgcggtaggaatgaatattgttccggagatcgacgttccggcgcatgcattgtcatttacaaagatctggccggaattgaaagtgagcaataagcttcataacaacaacccgctgatcgatcattttgatctgacaaacgacgctgcggttacgaagatcaaggaaatttttgacgattatacaaagggaacgaatccgactttcgatgcagatacggttgttcacatcggagcggatgagtttatggcggatgcaaaatcatacagagagtttgtcaacgagatcataccatatgtagacaaaacgaataccgttcgtatgtggggcggcttgacgcagatcaaagacaatccgccgacagagatcaacaaagacgctattgatggcgttcagatcaatctttggtcaaaagactgggcagacggaatcgatatgtacaatatgggatatgatctgatcaatacgatcgacgatcacggatatctcgttccggacggaagtctcacaagaaaaaatgcttacggagatttgctggacataggccgtatttttaaagactttaaagtaaataatgtaagaacgaaaaacggagcttataaagcggttccttcaggagacgatcagatgctcggcgcggcatttgccctgtggagcgacaacattgacagaaaagcttcgggactttccgagtctgatctgtattggagattcttcgatgcgatgccgttctacgcagagaaaacctgggcggcaacaggacaggaaaaaggaacttcggcaaagctgacagctcttgcagagaagatgggaacaggtccgaatacgaatccgtattatcaggaggagaaaaaaggcgaagagtatgagaaatatgagttcgctgatatgaaagacagttcagagaataaacgagatctgaaagaaggaaaaggcgcggaagtcaaagatggcgtattgaatcttggcgatgaagaaagttatgtcacaactccgatcgagcagcttggaaacggcaatgctatttcctttgatcttgaactgaacaagccttccaaaccgggagatattctgtttgaggcagatccggcgtacggaacgcacgatatccgggtgatggaaaacggaaaattaggatttacaagagagctttacgattattatttcgattatgaacttccggtaggaaagaaagtcaatctgaaaattgtttctacacagcaaaagacagaattatttgcagacggtcgatccgtaggaacggctgtcggaaaattcgtgcataacggtcaggtgaagaaagaaggaattaaaaacgctacgtttgcgcttccgattgagcgaatcggatctaagacaaatgcgcttgcaggaaagatcgacaatgttgttgtatcggcagtgaatacagaagataagtataataaaaaagattggactattactacagactcagaatattccaacaattctgcgacagaaggtgaagttacaaaggcgtttgacggaaaagcggatacaaagtggcactcagagtggcaggcgggagcaggagagacaaacggaagacttcatgacggagcgccgacaggtcagggtacggtagatacgatattcgcacaggcaaagtttgacaaaggttatgagatcgacaggatcgcatttacaccgagacaagatcagccaagcggatatgtaacaaaggcagacttatatattcagacagagaaagacggagaaatgaagaaagttgtcacagacgcacaatttgcggcagataagacgcagaaagtattccgttttaataagcagactgtatatggattcaagtttgttgcgaaagcgtccaatgacggatgggtagcagtgtctgaattcaatgtaggcgatgagattcaagttgtcgaatccggaaagaatacaattttcgtaaatgcagaaaaaggcggaaaagccgagattgtcggagcagaagcaggaaaaccgtttgaggtggataaaggagcgaaagtaacggtaaaagcaactcctgataaagattatcattttgtaggatggtatcattcatctaatgcagaaactccggtttctacagatgcagagtacgaatttacggtatcgggaaattatgcgctgacagcgaaatttgaaaaagataatgtaacgccgccggttgaaacaaaagatgttacatctatcgacaaaccggaaaaagtaacggtagaagaaggaacaacatttgaagatcttaagaaagaccttccgaagacagtgaccgtacatttcggagaaggcgagaaagcagagacggcagacgtagaagtgacatgggaaaagggagaatataaaggagaagcagaaaagacatatac

SEQ ID NO: 7686 - DNA, 277 bp, Unknown
  gut microbiota DNA sequence
gacaacctcgcttccttttcgcattaaataatcagcaagaatccctttttcaatgcactcttttatcgcttttttataaggctcttcctccccggagatctgatagttctgcacgatttccatgaactggctgtattctttcagtacctgacacttttctaaaatttcatgatgttcttccggccggatattgatgacctttacttttaattccagactcggctcaccgtcttttacgatataggcatctgacaggcgcagttctttttccttttcc

SEQ ID NO: 7687 - DNA, 865 bp, Unknown
  gut microbiota DNA sequence
tatttaatgcgaaaaggaagcgaggttgtcaatatgttattagacgaatacgactatgagacagatatcgaagtacagagagaagaggcaagagaagaaggacgaatagaagaaaaaagtgctctcatccggaaaaaacttgaaaaaggaaaaacaatttccgaaattgcagatgatcttgaaaatacagaagaaaatattgctcatctgattgaacagtttcatctccatataaattaatcaaagataacttcatagaacagaggagagagttgatttctcctctgtcagaagtcgattaaaatataaatatatcattgtttctcatttaccgatatgctatgataattccactcacagaaattctttctgtgaaaaataccggcagcttcaccggtctgaggaattccctcaaaattacccgatacaatacaacaacagtttttgcgtggatagtcttgtagaatagttctttttttcgtatactgatttttaagagaaggtcttaaaaaagagaaaaagttttctttttcagaggaaaaacttttggcgaaagcaagcttaaaagcattttcccgtctgtactacaggattcgttcatgcacatgaaaggagagcctatggcaggaaaagaaaacagagaaattaaaaacagtgtctttgtagatctgttctatgaggatgaatcagcagaagcaaacgagatcgcgctttttaatgcaatccatgataagccgttgccggaaggaacgaagattcggagattccgtgtagacaatacgatctatatgaattttcaaaacgatatttcttttgacgcaggaggaaaagtgatcgtattcggcgagcatcagtctacggtcaa

SEQ ID NO: 7688 - DNA, 3302 bp, Unknown
  gut microbiota DNA sequence
agaatcaatatagtctgccatacggagcacatcccctttttcctgctccatgccctgttgttccaaaagttccagcaatgcccggatactgccctgctcccgaagcggttctctcgtttcctggatttccactgtttctccttcttccatttacatttcctccttcccaaaaggatgctgccgaagaacgttcagcagcaccctcaaaaatatctttttcactagcattcacctggtttcgttgtcatcaaacggtacagcttcgtattctttgggaagctgttctcaaatggcacaagatttccggaacaccggatcaaacccttacctgcgcctacattggtgatataggataactggttctcggaaatgttcaaaagagatgccagttcgtcccggtctgtggcagcctggttcaaaaggatcaaaaactcactgtttgccagcatcagccttgccgtatccgatttcaaaagttcctctacgttctgcgttaaacttgtgacaaacccatggtatttacggattctcttatagagccggtagaaaaagtccgcactgtactgataccggaacaacaggtaaaactcatcggcaaaaacccaggtagtctttcctttcttccagttttggatcacccggttgaagatgctgtccaaggtgaccagcattcccaggggcatgagctgctctcccagttcccggatatcataggcaatgatacggttcttcgtatccacattggttttctgggcgaaggtgttcaggcttccattgatgaacaactctgaagacaaggcaagccccctggcttcctcttccggctggagcatgagctgtcggtacagatctttcaaggtcggcacttcgcttttataaccgcttcggatatattcccggtacacatctgcggtacagcggtccaggatggacttttccttggcagacaagttgccagcccccaccaactgttcaaacaaggacaggataaactccgacttctcgatcagcggattcttgtcatttccataggcggagtccatatccagcgcgttcagatgggtatgggacgttgcagaaatggagattacttccccattcagcgcttccaccaaagaaccgaattccgactccggatctaaaatcaagatgtcatcttccgtagacagggcaaggtccacgatctcttcttttgccgagaaactctttcccgaaccgctgacacccaatcggaaggagtttccattcaataacttcctccggtctgccaccagcatatttttgctcaccgcattctgtccataatagatgccacccggctgcatgatctcctgggtatggaaagggatcagcacagcagtggattctgtggtcagggtacgaagggcattgatcttacggatgccataaggaagtaccgtattgagtccatccacttgctgtcatttcaaggttgccatctgacataaatgctttcttactaccgacaagatgctctccgtatccgaatccaactgtttcttgctgtctgccatatgtaccatggtgaggatgccgaacatcatccgctgatccctggtggtcaggtcatccagcatctctttggtttccttccgctgtaattccatatcataaggcacaatggcagaaaagttattgttggcattctggcgtctctgccagttggtcacattggtctccacgccaagcagacggttctggatctcacgcaccgcttcgtctgtgggtaccgggaggatatcgatggacagcatcaagtcccggcttagatcgcacagctccgagatcatgtcatccttgacataactggcataatcctgcatatacagcacccgcccaaaccgttcattaatcttgaagaagtctttggaaaactccatggactggggacagatccaatccttgaagctgctcccctttttggcaaatgccttcatatcgaaaggaaagcactggggttcatctgcccgaaagaaatcccggaagatctgtaacctctgttccgcatccagttcttccccaatggaggacagcttgctcagatgggtgatgatatccgttcccacacgtgcaaaataagtccttgcctcatcgatgttctttttatggacactgaccgtcagataccgttcctgatagatgctgttgttggtgccgctgaccttggatagcagcatttcgttgtattcctttcggtattcatccagcccgtcctctttcattggcaaaagaagggatgcttcaaattcttctttattgatctgcctattatttaaagtgatctttgccgccgcaccggaatctaaggcatttaacagttcactgtaatccaagaacatttccgtcttatcctctttgcttgcgatggcatagttgatatcggaaaaccggaaggtcttggaaaactttgtcccggactggaatactccatccggccagatccgctggatcgggatcgcctgctggacagaccttgggactttaaatttctcccggtccattttcaatgcctgttgtaaggttttaatcaaacgcaccactccctcccgttctctttttctgtttcatccgtttcttttttgcccgctgttccctttttttcaaaagggctgcaccatctcccctggtcttttctcccagggccagtgtttcttccatacaggcatggtacaagtcctcactttgaaacagcaggcgcttggggtataaaaattcagacttgatatacgcccaggcaaactgctccgcattcatgccatggtactggaaaaaaccacaggctgcgaaaggggcagcccctaagatgcacagccacccggtcatttcctgtcccacatactttcccaagccaaaataaatccctaccgccacagcgatggcaagcagggagaaaatacactggcgcaagttcagtcccataaacatggactcctgatagttgcggatctctttattcatttttacttccatatacttctatctctctctttctcttttcttttttcctgtcgatttcccttggactttttcctgttcttttggaatatccaatccccattgtctgcaaaattcttccaccccttcccggtcatactgggcaagccttgaaaagtcgaatgccaccggggtgtaggtggcaaatcctgaacgggcttgtcccggcagcacctttcccagcctgttctttttgatgaatgccagcttgtccttcgtaaaatcaccgcttacaaatgcttcttggggttccagcccatacccgcctgggagattcaccgtcaaat

SEQ ID NO: 7689 - DNA, 14443 bp, Unknown
  gut microbiota DNA sequence
atatttgtcaatatttatctgaatatttatgtattattttatgtttttctgttttgcattgttttgtactgtttttttctgattaattccgggtggaggattcaaaagatagtatagctatatcataagcaagattcctattttgaaaaccatatacaaaaaactatcccccttactatcattttctaaatagtaagggggattgcagtcattctgaatatggattttcttttatttttgcattactgaccgtcagaaaaagcttcatctatcgcttttccgatatcattacgcttatatttgtttttaaactgtacccattctgtcgctgcgtaggcattttttcttgcttctttcagattagcgccttttgcagttacaccaagcacacggcctccgtttgtcacgatgtttccgtcctcaaattttgttcctgcatggaaacagcaatacccttcatgtttactgaattcttcaagacctgtgataggatagcctttttcgtactgaaccggatagccttcagatgcaagcacaacgcacacggccgcattatcttcaaactgaagatcgatctgatccagagttccgtccacacatgcttcaacaacgtccaaaatatcatttttcatacgcggaagcacaacctgagcctccggatctccgaagcgggcgttgtactccaacactttcggtccttcttctgtaagcatcagaccgaagaaaataacgcctttaaacgggcggccctctgcagccatagcatctaccgttctctggtaaatatatttttcacaaaattcttctacttcttttgtatagaacggacttggtgaaaatgttcccattccgcctgtattcagccctgtatcaccgtcaccggcacgtttgtgatcctgcgcgcttgtcatcgttttgatcgtctttccgtctacaaatgaaagaacagatacttcgcgacctgtcatgaactcttcaatgaccatctcgtttccggctgtgccgaattttttgtcaagcatgatcgtctttacgccttcttttgcctcttcaaaattctgacagatcagcactcctttaccaagtgcaagtccgtctgccttcaatacgatagggaactttgcattctcaagataggcgattgcttcctttggatctgtaaaattctcatatcctgccgtaggaatatcgtattttttcataagatcttttgaaaacgcttttgatccttccaaaatagcggcgtttttctttggaccgaacgtacggattcccgcatcttccaatacgtccacaagacctccgacaagcggatcatccattccgacgatgcaaagatcgatctctttttctttggcaaattctgccagtttttcaaattccattgctccgatgtccacgcactctgcgtattctgcaattcccgcgtttccgggcgcgcagtatatcttatctgctctgggactttttgccacacttgccgcaatggcatgttctcttccgccgcttccgacgatcaatattttcatgatagattcctcctgtctgtacaaaccgttttacgttccgaaatgaccgcccggttttttcgtcccggcggtcattttttaatgtttcgacattctataaattttttataaaagcatgtccgttttcaacatgcacttttccgttcgcgatcaaatggatcgcttccggaaggattttccactctgcctgctccatcactcttctttgaagcatctccggtgtgtcatcctgctcaacttctactgctttctgcaggatgatcggccctgtatcggttccttcatctacaaaatgaacggtcgcgccgactactttaacacctcttgcaagcgctgcttcatgcacttttaatccataatatcctttcccgcaaaacgccggaatcaacgacgggtgaatattaatcatccggtttctgtaagctgcgatcatttccggagggataacaacaagaaatcctgccaaaacgatcagatccggttcgtactcgttgacggcttccaaaagtttttcattaaacacatccctggattcataatctttcggcgagatacattttgccgggatgtgattctctctcgcccgctcaagcgcatatgcattcttgttattgctgataactccgacgatctttgtattcctgatgacgccgccttttacgccgtcaatgatcgcctgcagattcgtacctcctccggatacgagcacaacgacctttagcataagtctactcctttttctcccgcttcgatgcggccgactacatacggcgcatctcctgccgctttgatcgcttccagagttttctccacatctgccggatcaacggcaacgatcattccaagtcccatgttaaacgtattgtacatcatctgctcttcgatatcgccttcttttgcaagcatcttgaagatcggcgggatcggataactgtctttttcgatcaccgctcgagtaccgtcgatcagcatacgcggaacattctcatagaaaccgccgcctgtaatatggctgcatgctttcaccgttattcccgcttctttaatactcttaagcgctttcacataaattcttgtcggagcgagaagcgcctctccgagagtacatcccaattcatcgtaatatgtatcaagagattcttttgtaatatcaaatacttttcttacaagtgaaaatccgttgctgtgaactcccgtagacgccattccgatcaaaacgtctccggcagacagattttctcctgtgatcatatcttttttatcgcatactcctaccgcaaatccggcaagatcgtactcgtcttctgccataagtcccggatgttccgccgtttcgcctccgatcagcgccgctcccgactgaagacatccttctgccactccgcttacgattgatgcgatcttctcaggctcattcttgccgcatgcaatataatcaaggaaaaacagtggttctcctcccgcacaggcaatatcattcacacacattgccacagcatcgattccgatcgtgtcatgcttatcaagcaccatcgacagcttcactttcgttccgcagccgtctgttcccgacagcagtaccggctcttccatttctttgatcttatcaagagaaaatgctcccgaaaatcctccgagtcctccgagcacttccggacgcatcgtctttttcacatgctctttcataagttctactgatctgtaaccggcctctatgtcaactcctgctttcttataatccataccactttctcctttactttaaatactcctcatatccgacctcggcaagacgatcggctttcgcctgaacggtatctttcatctctgccgaatagtcttttaacttttttaatacctcttcatctgatacagcgaggatttttgccgcaagaatcgcagcgttcattccaccgtcaatcgcaacagtcgcaaccggaattcccggcggcatctgaacgatcgagtaaagagcgtccataccatccagattctttcctgacatcggcactccgatcaccggcatcgggaacagcgccgcacacattcccggaagatgtgcagccattccggctcctgcgatgattactttaatcccttttccttccgcagcttttgcccactcaaaaaatacatccggcatacgatgtgcggaaatgatcgtcatttcataatcaattccgaatttttccaacattgacgcagctttgctcatcactttcaggtcagagtcactgcccattacgattcctacttttggcacgttatttcctccttaaaatctcaaatcaattttcgagttgttttaatggttcatttaaaatctcagttcccggaagcacaaatcttccgtctttaattagtataatgtgtttcccgtcttttgtcactacacttatttcttctaactcttcataaggtacggttatatctgtatgacattgaaagtatgccgcagacggatcttcttttcttttcagcgaacaagaattatcctttgcaacgatttcttttccgttcggattatatacacggacgtcttcgctccatgaatagcatgtgtcgcccactgcaaaatgaggtcctgttttctctgcgatcaaaatcggcatcttatcttcgatcccgtatttttttcccgcggcataagcagtcgtatttgttccgatcgcgaattcgccaagcggaagagtatcatgatttttcaaaacattatcaaaaatatatcgtctgccttcttcctcgtctttaaaattgccgcatctataatcaacgatctttccgtctttaaatttcaattcaaggtctttatactgcaaaccgtcaagatacacccggctgacatgcaaaactccgttcgttccttccagcaccggtgatgtaaacacctcgcctaccggaatatttacatctgccacacagttttcaaaaatcgtctctttccgagcatcttttaacgaccaaagccgaatctccatatccgtccggttctctccctttccgatcacacggactttttctccctgatcgagcgcatcgatcatcgtctgttgaactttctcatataattttgcatctaacgtattaattcgtattacttcatcgaaaatttcttcatatttcggaccgatctccggcacaggatatgcaatgatcgtaaaacttctctcttctcctttgatatattcatttgtgatctgaccggatctgctgtcgtattgaagcgcaagctccctttgctcttcacagtaagccggagcttccggtactgctttcggtgaaaacggcttttctccgaatgtttccatcacggcaggtcctgcgaactgcgctgcctgttctttattttgttcataaacagtatgcatcacttccagacgccgttcaatatagcgtttatccataaataacgcctgatcttgtctgtgatcgtactcatactgccagtttgccacagcgccgaaatatccgattttgtgatgctctcttttcgtgatcacacccgacgccgccctgtatattacgggttttaaccccatagcgcgaaaatttgcgatcgccgctcttatgacccgttcaaatccgaggctgtaacgaatatttacgactgattttttggacagatcttttcctgtattgataaatccgatccgatatccttccgtgtaaacgtccgccatcttttgaatcgtctcttcgggaagcgacctgagacggcgcgcagttcccagctcattttctgtaatatattctccgaaacgatacaaatacctgtcgctgctcaaatctgcattttcgataatatctgccgcaaacgaatacgacggatcgatctgttctttaatccgatctgccaaaaatacgtcgcaataatcgcttgcataccaatacacgatatctcttactcttcgtatttccggttcagcgccatctgcccggcaattttcaaaatacgtatatacctcgataaacaattcatacaaaatcgtcagataatcaagtctgccttcaaacgcataagggatgccggagcgcatttccacatagagaaaactcaaaagccttcccatctccggctcaaaccagctgcatgcatatttcggatttgcatagcttttttcgtaagcatccccgacaatatcactataaaggatttcgttgatctgtctcatgtcttcttcattatattgatcccattttccgctttccacctgaatccgcacattttccacttcaagcaaaaacagggcaaccaatctgaaatacgcgatataagaatcttccacagattcctcaaaaggcagcgtgcgaagacgttctaccgacaacgcatgccgttccctatatgaatcgttgttgtatttttctgacacttcctgcattttcctttccctcccgctcatctgtttacttttctttattatttatcttttttcactactttttatcttttgcttactaattcaaacctctgataaataccgcaaaaaatgaaataatcgccgccgcattcatgacaataccgatcttacacgtcagataactgcgttctctctcccgaaatcctataattgccgaataaattccgtatcctgccagtatcaaagaaataatcgtaatacctcctatgatcccgggggcttctcctcttcggacaaacgcgtatgctatacatcccgccaacactgcggccgaacctaatccgaacagacacgaaagatttccgttgcccgcctgtttttgctttggctttttatgtttcaccccgctttttttccggttttcctcccgtttcaaagcagtttcttttttcttatcttctgcctttttttcctttccgaacataacgttttctccttatccgactgcataccacaaacaaaatatatcctaaaactccgccgattgtatttaataaaatatcatcgacatcaaaacttcctactctcgtaaaaagttgtattgtttccacgcccagactcagcgccatactgaaaaataatattttaaaaaatcccatggactttcccgccatggaaataaagaaaccataaggaacaaagatcataatattcccgagaaggttcgcaagcaccgtaaacatgccaagctgttctctataagtaagaaaacgtctgatttctttaaataattcaagattatatctatactcttccgtcacttccgttcttccgtaccattccgcaagaaacagaaaataaatcaaaaaaacaatatatagtaaaaacaggattttcccaaatatcctataaatccgctctttttttatactcaaaaataactctcctcacacaaggaactctccctatcagtaattttttcaaatcaccggaagcgctaaaaaagcgcgctccgggactatacacggccgcaaagtctcaggcaaacccagacttcgttccgccgccgttgcaaaaagggactgcctgtattccggcttagtcccttatttttctttctgtttatttatctctctttcatccgtgtcctttcacagtttccctgaaagctgtcaagctgcttaaaatgtaatctcttttttatgtttgagtaattttgctccgttcacgattgcaagtattcctgttgccactccgacaacgagaacgataatcccaagtgtaatgctacttgcaccactgtttttcattgtaagatatgccttttccataaagcgcctccccgttttattttactccatatgtttcatagtatgtatcgatcgcagcctttaatgtatcgtcgatcacaacttttccgttatacggcttgttgtacaagtgttccacgacttcttccatcgtcacgatcgcggccgtatcgaaaccatacagatctttcacctcgtcaagggcgcatttttctcccccttttccgacctccatacgattaagagatacgattaatccgacgatctccacatcagcggcctgctttactttcggaacggtctcttccatcgactttcctgacgtcgttacatcttcgatcatgataactcgatcgccgtctttaaatttacttccgaggaagcttcctttgtctgctccgtgatctttctcttcttttctgtccgagcagtatcgtacttcttttccatacaactcactgtaagcgatcgcagttacaaccgcaagaggaatccccttataagcaggtccgaacaacacatcaaaatcatctccgtatgtgtcatggatcgctttcgcataatattcgccgagctttttaagctgcgaacctgtcacatatccgcctgcattcataaaaaacggagatttccttccgcttttcaatgtgaattctccaaatttcagcacatcgctgtccaccataaactcaataaattcctgcttataactttccatctttcttaaaacctccgtatttacgggcttttctcgcccttactttctatgtttcatcccctgctacaccatttttacaccacttcatgctcaactacaccttctcttaaacttctccgtttccaaaaacagcgtatcctctgttacgtggcagtacaaacccattgtcatttgtaatgtaccatgtcccagaagtttctgcaatattttggggttcatgccatattcgattgctcttgtagcaaaagtatgccgaagtgtgtgcaatgtaaagggggcaaaatcgggaaaaaactattaaaccttctcaattttatcatatatttcctgttatttcaattaaggaacttccttaaaaatgtacgaaaaactgtcaaatagtccttttcttactctacaatcgtactaatgatacttagtattgttgtaacgattttgatagcgtatataaatcaatcaaaaaagtaaccgcccctcgcccaaggaatgcggttactcttttgagtaattagataatttggactaaccaactatcaatagtgtcttttttttattattatttttcgtaaattttatatctaatttttgattatccgtataaacactatactttcaaatattttgaagtatagaaaagcactcattttaccacgaatttaccataattaaacgagccttgatatgactataaataacactaaaaagacctcacacctaaacggtgtcttttttaaaagcagtcaatcataagaccaactgctttgtaaatatagatattaaattgttaagctgagattttacttagatttatctttcactggtttgctattttcatcattttctccttcaagccatgccattatgccaaagttacaaaatggataaattattacttctttataaacttcttgctcacaacgagggcagatgacatattcttcaccttttacattttttaattaccgaaattcccttttttatttgcaaattacatgtcttatagcttaccatgtttttcgtatcttgcgactcttgatattttgttatcctcatctacaaatactactttaggtggatttttctttacctcttctggagtcatctgtgcatagcacattatgattatcttatcacctgtctgaacacatcttgcagcagctccattgagacatatcattccgctgcctctttctcctgcaattgtgtatgtctcaaatctgttcccattatttatatctacgatacttaccttttcatactccaaaattccagcactgtcaagtaagtcttcgtctacagtgatgcttcctacataatcaagttctgcttgaactactgtagctctgtgtatcttcccctttaacatttcaaatgtcatatttaacccccgtttaaccttcgtaaataaagttgtcaatcaatctggttttgccgatataaactgccatggcaactagtactggtgctgtcatctccttgaccggtttaactgaaacagcgtctacagcctgaacataatctattttcgccataggctcagtttcaataagcttaatcatttctgatacaattttatctgtatctttttctcctgcttttgccatatcttctccgagcttaactgctttgcttaaaattagtgccgcctttctctcatctttgcttagatatgtatttcttgaactctttgcaagaccatcctcttctctaactatagggcagcccacaatttcgatatcaaagttcaaatctctaaccattctttttataatcgcaagctgctgtgcatccttttgaccaaagtaagctctgtcgggatttacaatattaaaaagtttagatactactgtgcctacacccctgaaatgtattggtcgtgattttccacaaagttcctctgaaagactttctatgtttacatatgttgaaaaatcgtcaaaatacatattttccggctcaggattaaatattaaattagcacctgcctcctcacatagcatagtatccctttccaaatccctcggatagctttccaaatcttcccctactccaaattgagtcggatttacaaaatcactgacaacaactctatcgttttctgaaacagcccttgtaattaaactcttatgtccttcgtgcaaaaatcccatagtaggaacaagacctactgtaagaccttctttcttccattctttgactataactctcacttcatctacggtttttactattttcatcgttctatctcctaatataacttgttaattacatcttctgaaattttaaatgtgtgttcaggtgctggaaagcttccctgtttagtttcttctatatatgcagcaaaggcttctttcattacatctcctacctttgcgaattgttttacgaatttaggtgtaaagtcagagaccattccaagcatgtcctgataaacgagaatctgtccatcgcagccagatcctgcacctattcctattgtaggaatattaatgctttcagaaataatttccgctaattttgcaggtacgcattccaaaacaatcgcaaatgctcctgcttcttcaacagcttttgcctcttcaatgagtttctttgctccctcttcactttttccctgaactttaaagcctccaaaaacgttcactgactgaggtgtaagtccaatatgtgccataacaggaattgaagcagctgtaatagctttaatctgtggacaaacagaggctccaccttctagctttactgcttgacatcttccttctttcataagtcttcctgcgttatacatggcctcttcaactgaaacttgatatgacataaacggcatatctccaactactaaggcatctttggcacctcttgtaactgctcttgtatggtgaatcatatcttccattgttaccggcaaagtattttcgtatccgagcataaccatgccaagagaatctccaacgagaataccgttaatacctgactgatccatcaatttagctgtcgaatagtcataggctgtcagcattgtaatcttatcgcccttaaccttctgttctttaaaagtggatactgtgtttttcatttttaattacctccgtcatcttcaaatagtcactgtctaaatgtttttcctgtgcaatactgagaagcttttctgaaagcaaaagatatatcatctcatatcccaccttttcctcagactcgtttatccatgctgccttaatagcttcaatgtgttttgtgatagtcgacaaatcatttcgctcaacaggacctgtgagggcagccgcaactcctttttctgccaatgtgtcggcatttccagtaaacaaaggcactaaggctttctttgcatcttttttatcaaagccgcattttacaagcatttcagcccccacttgaaaaagtccgtttacgagattgcttacaactactgcaccgcagtggtaaagagatttattttccgctcccattgcgattaccttatttcctgctcgctcaaagatactcttaatctcatctagattctctgccgaaccctccacagtaaaataagccttattcaagtgtttccatgattcgcacttatcacttattgcatataggggatgtaccgaatagatatttgcaccgaggttttcaccatcaaaaaaaacggttgatgaaatcgaaccgctgcaatgacaaatatttttatttttaatatccagattcttcatataatcccatactttgcttatctgtccatcaggcacagtaataaacagggtatcactgtcacttaagatatcctctatactcttatatagttttgtgttagtaaaatctgctgctgatttagctgattccggtgatttgctgaagtaacccgtaatctctacgccgttttccttcaggtattttccaagggaaaatcctactttccccgctccgataaatcctgctctcatatcgatcactcctttctgggaagtgacaatcatgaaaatctgcatggatgaggtctcgttcaaactgatataatcctcatggtttaaaaataaaaaatatgtggtatagtttctgttcgaatactatctacccattactatagcacctatttaagtgattgtacagagaaaaaaataaggcaccactctaactaatttatcattaaagtgatgctaatataaatcgtgttatttagcttttctgtatttaatcattttcacaatctgaattatcaaagtcgggataaaaatataaagcatgacaaaacacttcttcatttttcgcttgattacccaccacagaaaagaaagaaccctgtaaagagccttaccaccattggtggtgctttgcactcttgattgggctttttgtttgctgtatctttcatgcaagaggaaaattaaagtcctctattccatttctcttttagataatcttcatagtccgtttcattaaaatctaattgtggcgaagtgttgggaatgttgtttctgttgtctatatctgcaagctgacggaatatccaatcatcataagggtcgtgatatttatactctttgggctgttctctgtatcggtctaaccctcgcatttccttatgtactttcatcatgcgttccaatttctgacgctgtatcaactgcttgatttccataagttcttccaactctactacctcactagaaagataattgctaatgtatctaatcaatgtagtttccatgtaaaatctacattctttttcgtcattgaaaaattcattttcagacaaataatctaaggaaacattaaaatcctgttctcgtttgataacgtccatgatatatggctcggtgtggtcaatatatttccattcccccgacaataattcattcggtgttactcccagcacgtccattatcttttccaatgtatcaaaggtaggataattcacacctcgttcaatcttggaaaggctctgcatattgataccgattttattggcaagttcctgttgtttcattcccctgtgttttcttatgatttgtatgttttctcctaagaaactgattttcttttcataatactccataacttagtataaccgctcctttcgttgcttttattgtcatttataagcatatcatacttaatatatatcgaaaagtcaatcgaaacttcttgacaagtaattctagtggcgttattatcttatcagacagagtgattaagcacgctagggtcaatcacacacttgagtaagcatatataagagatgttttcactttgatagcatgaatgagcatggactatcagactaaaaatagggtttctgactggggctgtttcgtttagccacgagcctctcaaggctcgtgagcgttaagaacggaacagacacaggaagaaagggaacgcctttaggcgctcgtaaagggcgtatatgtaacaccgccctgcgcatacatgtcatagtacctagaaactgtgataaataaaggacaaaacgctatttttaccccgcaaaaaaacggggcatacgaaaggagtaatgcactataactacacacaaaaatttatccgttaagattgattacatcagcattgtatttgaaacggcaaccgctgaagatgtaatcatgcacattttaggtttaccgactgatattttcaatgtctatccggcaagcattaaatacaaaacctatcaagcacgctggcagattggagatatttatgtatcgggggacgcaagaaagacagaggacaacccacaggggctaggctgttatcttgttatgactggcagaggttgtgatgatattttccgtattctcgacagtaggaattatacctttggggatatgttccgacgctgtgagcgaagatacggactggataattttcatttcacaagacttgatattgccattgatgataagaacgaaaagccattctttaccatagagcagataaagaagaaatgcgaaaaagaggaatttatctccaatagtgagggctaccactttgatgaaagcaagtttgacgatttcgacaccgcaaagactgtttatatcggtgctggaaaatctggattatcctaccgcttttatgataaggataaggaagtctgttcaaaacataataagacgcttgaggaagtcggcagttggaaacgaacagaaatgcaactgcgtgatgataaggctcatgtttttgccatgacatttaaggacagaccgctggaacttggggaactggctttcgggctactggcaaacaacctacgctttgtcgtgccaaacagaaacgaaagtaataaaagcaggtggaaaacgtgtcgattttgggaacgctttttaggggctgtggaagtcttgaaactgcaagtaccaaagcagcataattcccttgaagaaacacagcaatggctcacagagggtggcgtcatttccgctgtcaaaagtttttatttcttggaagaacatgacgcattaggtggactggaaaaagtaggaactatgcttgataaggcaagatacagcaattccctttccagta

SEQ ID NO: 7690 - DNA, 4887 bp, Unknown
  gut microbiota DNA sequence
ggcttttaaaagggctgtatcgcttggaaagacgcttctctgacggttcagcttccgataagtggaattcagagattcaatggcatttgttgtataaatgacaattctttggataatgaatttaatctttattccttcatgcctcgaatgtattcgttttataccaacatcaaagcggattatcttattgccagccatgttgtgatcgatagttttgtctttctcatccatacttctccaaatggagacgcaaaatgtgatttcctttgctgttcaacatttgccaagggtgaccgtgattatgaacaaaatcaaaagaaacgcactttactcaaaaaagagcgcatacatattccatccaatataactactgttttactcaacaaattagataatgaatcctcatagggaacatttcactaagcaacgcttgaaaatgttccctatttatatgaataaaattcctctcgcatcgtacacactctctgtattcatatttccacaacgaattgctctgtccaatcctataatcgttgcaatggcaccgtcaatcttctctgtggatttttctttgtctgccttgatatttcctgctgggtctgttcgaataaaaatattatccatcatccatcgaagcaccggatgtcctccatgagctaatttctgctccagtgtaagcttcatcagttcctttgtcggtggactcatatctttaaatccctgtccaaatggaacaactgtaaattccatcccttcaaggttctgcaccatctgtactgctccccaacggtcaaatgcaatctcacggatgttaaatcgttctcccaattgttcaataaatttttcaatgtatccgtaatgaactacatttccttctgtagtctgtaaaaacccttgcctctcccagatatcatatggaacatggtctcttcggactcgaagttccaaggtatcttccggaatccagaaatatggtagaatggcaaacttatcatcctcatccatcggtggaaacaccaacacaaaagccgtgatgtctgtggtagatgataaatccaaaccaccataacatacacggccttctaaatcatcttcatttacatgaaaattgcaggcatcccatttatccatcggcatccagcgaactgcctgtttgacccattggttcagtcgaagctgtctgaacgcattctcttctcccggattctgcttggcagaatcacaggctgcttgaaccttgtcaatacttactgtaattcctaaagatggatttgctttcttccatactttcggatctgtccaatcatccgtttcctctgcaccataaatcacaggataaaatgtcgggtctatttttcttccctcaatgatatcttttgctttctggtgtgtctcatagcagatactgtttgtatctgtacctgctgttgttatcagaaaatacaaaggctgtgtcctggcatctccagaacccttggtcattacatcaaataatttcctgttcggttgtgtatgcagctcatcaaatacaactccatgaatattgaatccatgcttagaataagcctctgccgacaacacctgataaaaactgttggttgactggtatacaatccttttctgggaagcgagaatcttcactctcttattcagcgccggacacatccttaccatgtccgccgcaacctcaaatacaatagatgcctgctgcctgtctgcagcacagccataaacttcacctctctcttctccatctccacaagtcagaagcagtgccactgcagccgcaagttccgattttcccaatatcccgaataatctgctcctgccagtcaatcagttcaaatggctttcctgcccatgttcccttggtgtgacacagacattcaataaaggaaactgcatagtccgccagttccttgttataaacggaatccttcgccttgaatttggtcggcttgtacttctttaattttctcaaatgatcacctccaaggcataaaaaatgacctgccatctggcaagccgtactatttcttctacgagagaaagagccatcggctcaatctcaatgctatttaaatttacttattttccccattcttaaatgcagaggacccagtaagatttttaagcaaaatcttccgctccactttgtactcttctccgatgaagccaagtcggagaagaaaacaccggaatgcatatttttcgttctccacttctctttcctgtacgctgatccgcttttgattacatgccatctcacagagtgcgtggacaaaatgtagatacgcattagctgcatccgcatcctctatcatctttttgaaccaaggaaatgtaactctacacttccaattttaaagttatcaatcgtagtaaaaacttgggcgcgttactaccaacctgctttcgaaataactatttgattaacaagattattttgtaattttacataatatacaaatgcattcgctacttcaagcagtacaggatttgctttttcttttaatggcaatccaactgagaactcaatatcatactgttctgatgaagatgtagttacactcgaataaaacgctttttcggccaaatggacatattccgaaaaatttctatacactaaatctaatttagcatcatattccgctaatctttgtcgcaaaatatagtccttcattttatttccacgattatctttcatatcactaattttctttccaacaaagaatccgtcaataaaatctgtctgactttctgcaataaaggccgcgaaaatccgcatacaattatctatctgcgaacgtacaaaatccctccacaagctaagtttctattttttatcatctcagaaattccatctaataaaacaacgcttcgatccatagcagaagtaaaaaagaaatcctccttataaagtgtatctccaataattgccttactcaattcgattattctttttcgtaattcattcaaaacctgtaatctaccatccagttcatctaaatatttttcattattcataaatatattttctccaaagtcatacacatctcttgccttacaaatatgtatactttattttgcttgaaacaaaagttttagaaaaaggtagcgttttgtctttttaacttagggaagcgcaattcaactcccctataattatatttcctcaaaatcaataagctgcgaaatattatcaatttccaatgcttctgctatcttagataaatgttcaaagttaattaccgttcgtgtgccgcgaacaatatcgcttatcgtagattctctaatgccagatatttgtgcaagctttttctgtgtaatatttcgttcttccaacaattctttaactttaagttttactttataatttttctttttcatattatggcatattccttaacattatagtcatatatgcaagatcccaaatatttgaatctttaccaaccgcattaggattatctccgattgatgctgcaaaattcataattttattaacgagatcttctttgttattatcccatacatcaatcggtccaactccatttttccactcatatttccctgtaactttattttttacaagaagtgaacgaaacgctgccactacaggatataacaaaccatccggtaccttatactgcattttatttaagccaaatttgctttttgctacaattttcccatctttgtaaccagcatatttttttcttccataacgaccgccaccagcattataagcatcagcaaattccatttcaactgcatcataaagatcaaaaatatccggcataatatttacatattctctatactcttcgggatttttaaggtacatatccaacatttttgcttttgatgaatatgcttgggtaggatgatgaagcgcatcatataagctaatattaaacatacttataattgcaacaatttcacgagcatcaatcattttatttttcttacctgtttcatcatctacggaaatctgattctgcttaaatgcaattctcttaaaaaatggcattccttctaatccttctttaataggatcaaatttttctgctaattcagccattgatttagcatctacctgaacagacgtatttcgagcctcagctaaattctctataatatcttccactcctgtcattacttcaaactgcacatactgttctaaattttcacctttatgttcgcagactattttgtatgtatgtccaccatcaatattcccatggctcagttcatccgaaaaaataatcgttgcaattttctctttattattgtaatgaacactctctgcagaaagaacaatacctctgttctttaaatgaaaatatccatcgttgcttaataaggactctttaatcgcagtcgcaacacctgacgttaatttctgatccctcggatttgttgccattggaattccttctgccacatcatctactttaacataaaatacatatttcttagccgctccattttcaaaaggatcttccaattttctaaatgtattttcccgtactttcatagtttttttaatcataagtgtcctccattttgtgcttagacccagagatctaacatccgttatcgcaataacataataacgatattgcgttattttgcttattacgaaaatatcaatcataaaaactatgttacaatacatcacttttttgtcgcacttattttttctgtatcttctttatctgaatttccaagttgatatattcataaaattttcacacccggactttagctcgtcgctgtgcaaataaacatccacccgcctagcgggtggtttttcattttcgggcatagccctaatattactagccacgcacaagtgcgtcttttattggcctgccagccacg

SEQ ID NO: 7691 - DNA, 1971 bp, Unknown
  gut microbiota DNA sequence
aagtactttattatataataattttcaataaatgtatttatataaatcattacccatttgcacttttttacttttctcacccccttatatccactattttcgtcaattttcaacatatataaagcttctgtcgattttctttcagttgcaaaaaatcctttttcaacgcattcttggattgcgtttttataaaattatcaaacaggggagaaaatgcattttctcccctgttctatagatttacctatgatcaatttatacgaagatggaactgttcaatcagacaagcaatattttcttccgtatcttcaagctcatctgcgatttgagaaatcgtttttcctttttcaagttttttctgaataagagtgcttctttctgcttttctaccttcttctcgtccttgctttctaccttcttctcgtccttgctttctaccttcttctctcccctgctctcttgcctcttctctctgcacttcgatatctgtctcatagtcatattcgtctaataacatattgacaacctcgcttccttttcgcattaaataatcagcaagaatccctttttcaatgcactcttttatcgcttttttataaggctcttcctccccggagatctgatagttctgcacgatttccatgaactggctgtattctttcagtacctgacacctttctaagatttcatgatgctcttccggccggatattgatgacctttacttttaattccagactcggctcaccgtcttttacgatataggcatctgacaggcgcagttctttttccttttcccacttttcttttccgttatagaatgtgtaaaattccggtgtcggaaggggcacgattttctttttatatcggcttctcggtggcacgagtctttcatatgcacgcccgatgtacagcagactccgaaggggcatgttttcgttgatcgtagactgatgctcgccgaatacgatcacttttcctcctgcgtcaaaagaaatatcattttgaaaattcatatagatcgtattgtctacacggaatctgcgaatcttcgttccttccggcaacggctcatcatgaattgcgttaaaaagtgcgatctcgttcgcttctgctgattcgtcctcatagaacagatctacaaagacactgtttttaatttctctgttttcttttcctgccataggctctcctttcatgtgcatgaataagtcctgcagtacaggtgggaaaatacttttaagcttactgctttcaagcttgccgcttttaaacttgccgctttcaaacttgctgcttttagatttgctttcgccaaaagtttttcctctgaaaaagaaaacttttttcttttttaagaccttctcttaaaaatcagtatacgaaaaaaagaactattctacaaggctatccacgcaaaaactgttgttgtattgtatcgggtaattttgagggaattcctcagaccggcgaagctgccggtatctttcacagaaagaatttctgtgagtggaattatcatagcatctatattttatcgcaatgctatgtttacatttttaactaagttcagactaacttccggtattccaattaggggagttctcagattgcctccccttctctgtaaatttaattaagatccgttcctcccaagttgaaactcttcaatcagatgagctatgttttcttccgtatcttcaagatcatctgcaatttcagaaattgtttttcctttttcaagctttttccgaattaaggcgcaagttttttgaagagtcccttgctttctaccttcttctcttccctgctctcttgcctcttctctctgcacttcgatatctgtctcatagtcgtattcgtctaatagcatattgacaacctcgcttccttttcgcattaaataatcagcaagaatccctttttcaatgcactcttttatcgcttttttataaggctcttcctccccgga

SEQ ID NO: 7692 - DNA, 4530 bp, Unknown
  gut microbiota DNA sequence
tgtaaaataggtatttcttggctctaatatattattcgaattcaatcgttcccggcggcttacttgtcagatcatacataactctattcacgcctctaacttcattgataattctgctcattaccttattaagcacttcatacggaatctctgctgcttccgcagtcataaaatcaactgtattcaccgctctgagtgcaatagcataatcataagttctctcatcgcccataacaccgacgcttctcatgtttgtaagccccgcgaaatactggccgatacttctatctaatcctgcatttgcgatttcctcacggtagatggcatccgcatcctgcacgattttcactttttcagcgttcacttctccgatgatgcggataccaagtcccggaccggggaatggctgacggaacacaagatattccggaattcctaattctaatccggcttttctcacttcatctttgaaaagatctcgcaacggttctataatttctttaaaatcaacataatccggcaagccgcctacattatgatgcgacttaataaccgcagactcgcctccaagaccgctttctactacatccggatagattgttccttgcacaagaaaatcaactgcacctatcttctttgcttcttcttcaaatacacgtataaattcttcaccgataattttacgtttttcttccggctcttccacaccttttaattttgcataaaatctttcctgagcattgacacgaataaaattgaggtcatacggtccttccggtccgaaaacggcttcaacttcatcgccttcatcttttctcagcaaaccatgatcgacaaatacgcaagtaagctgctttccgattgcttttgacaacataactgcagcaacagaagaatctacgcctcccgaaagagcgcacagcacttttccgtctccgacttttgcgcggattgcttcaatcgtgctttctacaaacgcatccatcttccaatctccggtacagccgcacacatttttcacgaaattattgatcatcttcgttccttctaccgtatgaagcacttccggatgaaactgaattgcataaagcttctcttctgcattttctgcggcagctacaggacagtctgccgtgtgtgcggatatttcaaatcccggagcaattcgggaaatgtaatcgaaatgactcatccagcaaattgtagatggtgaaacattatcaaaaatctttgaagaagttttatcaatcaaaacctctgtttttccatattctctcacatctgctttcttcacttccccgccaagaacatgcatcataagctgtgcaccgtagcacaagccaagtaccggaatgcccagtttaaataattcctctgtataggtaggtgaatccggcagatagcagctattcggtcctcctgtcaggatgattcccttcggattcattgctttgatcttttcaatatctgttttgtaagaatagatctcgcagtatacattacattctcttacgcgcctggcaacaagctggttatactgtccgccgaaatcaagcacgatcacaagttcattcttcaagattgtcctcctgtttaacacggcatgataaccgctttttatgtactcattatagttgggcgtttccgtttttacaagtgcaacaaaaattcccaacgtattttattatacgtcaggaatttattattctcaactattttgtagtttccatcgtttcggttttaattcggttttaattcaagttctattcatgttttatttgcaagattgtaatttcaagattcggacaacctttcatacacatctctttaaacataaaatttcttatgctgcatattttgcaatttctctgcaaagttcttcacagtcatctgtgtacatctgcaaagcaatttcattattaataccaagatgcataattccaagtaatgactttgcatctacgactacatgtccttttttcatatccatgtcaaattcatacttggagaccgtgtttacaaaatcaagaatctcatcaggatgcttgaatgtaatcttcatttcactcatttttcacctctcctttgaatatttatgcgaaatttaattgtttttatatttttagaatattttctttctatttttccctaaaaacaatcatctgtaatttccagacctcatattatcatatttttccaaagttaaaagggtgaatttctttataaaagagtacttttttaatgcatttatcgtatcagcaatgcgccgatttacggaattcacttggcagtacgcccacttcatctttgaatactctgctcatgtattttgcatctgaatatcctgccaattccgcaatctgattcaatttcagtttcgtgttggtaagcagttctttgattcgttctatttgtaatgtacgaaccatttctttaaagcctaccccgatttcttttttaaactgactgctcaaatattcttctgatacaaataatttatctgccatttcttccaaggtaatcccctgatcgtattccttttttaccatctgcagcgctttttgaatcagcggacttaaatcggcattttcgttttcttcctctgcctgaaaattcagtgtcctgaaaaataattctaccgcggcgcgaatttctccccaactcatcgccttcgcaatatcctgcatgcttttttgcacctgcagttccgaatgaatttctcttttcagcttatatgcgttcaaaacagccatgttaaaacgaatcaaaacttcttttatctgactcggactatgcgggtcgcgtttacacagatcatacaacgtataataacactttatgatttcttttcgattggaaataactgccgaccggcgcagcctgttctccagttctgccggatatttaagaggaacgatttccatagattctacatcctcgcgtctgatcagatctcctctgtcaaagaaaagattccactcccgtatcatccgtagatttttaagtgatacattcaacatttctaaatgctgcacatcctcccacaaacagaccagttcccctcggatcattccgcttaatcgtgacactacctcatttttgaaaaaaggataccgtattgtttttttctccggtccatatatgatcacagtaaaaagatgccattcatcaataggaagcacacaaaccgaaaattcttgattctgtccaagtttttctaatattttttgcgtcatctccctctgctccatatagccgtttccaagccataccacaaacaggtttccgcgatcggcaagcgtaaatccatacttttcgtgtgtaattccgtcaacaatctcatctctgtggatctgtccgtttaaacatgccataaaaatattttctacggaaagagctgtttctatcacaagttctcccgccaacttgtcctcaatcatctgcagcgcttttgcaatttgcacttttttcaccggtttcagcaaatattcgtccactccaaaactaattgcctgtcttgtcctgtcaaaatcattatcttttgtaattacaagcactctgctgtgaatttgctcagaccgtatctttttcaaaagtggcaaaccgtttttccccggcagttcaagatccatgataataagatccgggcgttctttcacgattatctcacaccctttccgtccgtctgccgcttccccgacaattttgcaccctgattttattttatgtgtctcaaccactgtgtttatagcttgtttaatgacttctctggatgtctcttcgctgtcaactattacgatcctcattcgtcacctccgcctaaatataaaccttcgcgtttatctcttactgctaattcgtaccttactgtatctttctagtatattcggctctgactcgatttgtaaagaactttcacttctattcagataacattttgtgcaaatatttttcccgcgtagccatccctccccgaatatgacgttctgacttattcgtatccaatacctttcgcgcctcttttgctaaagccgggttgatctgtatgagtcgttcggttacatctttatgtttggtcgtcacaatttagaacggtttcattttcttcaattaatacagattcatctaacccaagatcaccaagcaagcgtaaataaatatctacatttccctccttatctacttctatcttctgaatcaatcgttttaactgctgattggtcatctggtgtacatctgtgatgtcctcaatctccttaaatgtattatttaaaatgttctctaactgttctcccttggttaaatgataagataccatcttaagttcattttctatccgctccatctcctgacgagaaccgccaatcttctcattcaactcttcacgggagattagatcatccgtgtacatatccatatatttttgtcttgtcttttgtaatttagcaagttctgcatttaattctttttcgtactctatattttcgtctttggctttatatacacgctgaaattcatttaccacatgag

SEQ ID NO: 7693 - DNA, 1479 bp, Unknown
  gut microbiota DNA sequence
ttaaaaaaagctgtatgctaataaagtgattggatttattgttacaaataatcgcatcacaaataggactgctgatttttttaacagtccgatagccttttggttatgtttttatttaaatacagcttttcatatggctgtaatatctccgacgtgtatgttttcggtatctaccaaactttctatcagggcggataatgggacatgttttggaagcttcttccactatccggcatatcatctcgtaacatatggacaagggcgaccgcaaaaggtgtacgatacagttttttatacggtttaatatataactacggttagcctggtaagcatgcctattattgatagacacaatgatttttgaatctgattccgactttataaccgcaactagattggataaatacattgctgcaaagaactcctgttggatactggcaggcttaatgctgttaaaggcttctatttcaagcctgttcttaagttctctatatttgctttcaactccccaacgaaactggtataaatctggaaagttctccttagctatctgctcgggcatcagatttgtcactagatattctgtgctgccgtcttccaataaaaagtgaatgctccttaaagtaagggattctttattacaagaagcaggatatgtaaacaaagcatcttcctgttccgatatagctttcttaaacgtctttggcacacgcataagaaacagaattcctttggagtttagatagtgaaacatgtcttcggaaggatatcctctgtcaaaaagtatgatactgtttggaaacctaggtaaaaaatctacatgagctttagccgattcccgttcattgtaacgatagggatgaagagaaacgtcaatcagaatatcgtttattacatcataaagaacggatgcggaagcaagaggcgatatgatttttgtcttgtttgggttacctccaaacacttcataattctcttttgattccggaatctgtatcgtacttccgtcaacggcataaatatggaaaccattccaagtgcgtaaatttactggttgaaaatagaattgtttcacagaaagacggaataattcaagaaatgctttatgagaaataccctgtcttgcctttgaaattgcctgttttgatacaaatattggaagatcagatggaaaattttctaaaaatcgggcatagtttataggaatggatttatgaaccgactggagcacaaaataaatcaagttagaaaaagaaagctttccagaacgtgtaaaagcattacctatacgatgccttgtcaagaaatcttctgatgtaataaggtcattggaagattgtaaaatggatgttaaaagttttgtattcataaaatcacctcgcattgaaaaagtaatcaacgcaaggcaacatttttttcgcattttatcaagtgcttttagacatttttattttatatttttgatatatcttaagttga

SEQ ID NO: 7694 - DNA, 8823 bp, Unknown
  gut microbiota DNA sequence
caggtcacgtttttattatacacattaggagtttttatttctgaatacaccgctaaagctttcacggaaccacgcgactatcgcgtggttttcttgatacaataaagaaccttgcaagcgcaaggccctgtaaaagcgttttctttcagctccaaagagcctattcggtttgaggttatcgcataacccaaggtcgggctccacaatgggctgcataccgacacagtcaattgcttcatagccaacgatagctgatctcgtcgctatcctctataaacattatagcacaaaagtgattcaagtcaataacttgaattttttccgtggacgcgtctgatgacgtgtctaatatattatatggaatgatcttaaaaaatgtcaatgaaaaatttggaaataaaaaggagcgtgaatgctatgggaatattaaaaggaattttcaaatcaagagataagccaaagaatgcaacatcgggcagtgcataccgattctttatcggtggtagttccattggtaagaatgtcaatgagcgttctgctatgcagatgacggcggtgtattcctgtgtgcgcattttgtcagaggcggtggcaagccttccacttcatgtgtacaaatataactcagagggtggaaagggagagattattgcattgtatcccctgatgccaaaccgaatgacggtggacagggatgataagggacagctttattatcagtataacaccagcaaggatgatgcaccgaccatgaaaggaagtatggtgaatctgaaaccttcggatgtgcttcatattcccggtctgggatttgacggactggtaggatattctccgattgccatggcgaagaatgccattggtatggccattgcctgcgaagagtatggtgccaagttctttgcaaatggtgccacgccgggcggtattctggaggatccgggaaccgtaaaggatccacagaggggcagagacagttggacttccgcttttggcggcagctccaatttcaataaggtagcagttctggaagagggaatgaagtacacaccaatttccattagtccggaacaggcccagtttttggaaacaagaaaatttcagataaacgagatagctcgaagcaagcaaaagtcaggctggttacacggcagaagttagagcgattgtaactaagtacggagcaagccgtctgagcgacattgatccaaaagactttgcagcagtattaaaagatgcggaggcgattgaaaatgagtaaacagaaggtgaattgtgccaaaggcacaagagaggctgacctgggccatgcagtattatccgcttctggttcgcacagatggttgaactgcacaccatctgcaagactggagttagagtttgaaaacaccacatcggaagcggcaagggaaggaactgcggcacatgctctatgtgagcataagctgaagaagttcttaaagaagcgaagcaagcgtcctgtttctgattacaactcagatgaaatggaagaatgcaccgatgcttatgcggaatttgtcatggagcaatacgaagaagcaaaaaagtcctgcaaagatccggtgattctcattgagcagaaacttgatttttcctgttatgtgccggagggatttggaacaggggactgcatcatcatttccgatgacaagcttcatatcattgatttcaaatatggacaaggcatatttgtcgaagcggaacacaacccttagatgatgctatatgcacttggaacattagaaatctacgatgccctttacgatatcaaagaagtttctatgactatcttttagccaagaagggaaaatgtcagtacatggactattccgattgaggaactgaaagtttgggcagaggaagaactgaagccgaaggcacagatggcctacgatggcgatggtgagtatctcccaggagaatggtgtaccttctgcaaggtatcagtaaaatgcagagcaagagcagaggaaaaaatgaagttggcaagactggaatttaagatgccgccacttctgacagatgcggagattgaagaagtactggatgttttgccagatctgaccaagtgggcaaatgaaatcacagcttatgcaacggaggctgccattcatcatggaaaagagtggaatggatttaaagtagttgaaggccgttccaatcgcaagtaccgtgatgaacttctggttgcagaagcagcaagggaacatggttacacagatatttaccgtcaaacgttaattcctatgacagagatgcagaaactgatgggaaaatctgcttttgaggaaattctcggtgacctcatttataaaccaccgggcaagccgatactggtaccaaatacagacaagcgtccggctatgaacgtaacaaacgcagaaaacgaatttgataaaattatggaggattagtattatggcaaacatgaacagaacaaaagttatcaccggtatcaacacaaaactttcttatttccacggttgggagcctgtttccatcaatgggggagctgaaaagtattctgtatctgtacttattccaaaggacgatacagaaaccgtaaatgcagtcaataaagcaatcgatgctgcgattgaggaagggtgttgcaaaattcggcggtaagaagcctaataaggctgcaatcaagcttccacttcgcgatggtgatatcgagcgtgacgatgaggcttacaaaggacattacttcatcaatgcgaacagcacaacagcaccgcagattgtcgatcgtgcagtaaaacctatcttggacagaagtgaagtatattccggatgctatgcaagagtatctcttaacttctatgcatttaactcaaatggaaataaggggattgcctgcggtcttggaaatattcagaagattagagatggtgagtctctcggtggcaagaccactgcagcagatgacttcggagcagtagtggatgacgatttcttagcatagggagggcgagacaatgacagaagtgcagaactttatgcttgtggtatgttttggatgcacgataggcttcttgattggaacatttagcatcatggtatcagacgggattcattatctgaaaaagagaatgcgtatgaagaaagagcagaaagaacagaataacgaataaatgttatgggcggtatggaggattactatatcgcccaatttttttgttggagggaaattattttgttgaatttagaaattgatattgaaacattttcatctgtaaatcttgccaaggctggtgtttaccgttatgcagaatcaccggattttgaagttctcttgtttgggtatagtgtggacggaggagaagtaaaagtaggcgatcttgtaaaaggagagaaaataccagaagaagtaatgagtgcgctggaagatgaagctgttacgaaatgggcatttaatgctcagtttgaacgtatctgtatttctagaatgttaggctacgaagcaggaacataccttgtaccggcgtcctggaaatgttctatggtgtggtcagcctatatgggacttccattatctttggaaggtgtgggtgctgtgcttggtttggaaaagcagaaattaacagaagggaaagatttgatactagagaggcaatcacaaaggaccagatgagaaagttccttaagtttgtacacgatgataacgtgtactgcaagtattacgaggtgttctacatcttgttccatacgggacttcgaatttcagaattttgcggacttaccattaaggatattgatttaaagaaccgcattatcaatatcgaccatcagcttcagcgaattggcagcatggagtatcacatcgaatccacgaaaacaaatgccggtacaagaaagcttccaatgacggaggacgtgttccgaatgttccgggcaattttggaagacaggccaacggattttccggagattatggtggatggttatgtgggattccttttccgagataagaatggaatgccggaggtagcacttcattgggagcatcggcttaagaatgcggtgaaccgatacaacagcatttttagggtgcagcttccgaagattacgccgcacatttgcaggcacacttactgcagcaaccaagcgaaagccggaatgaatcccaaaacactgcaatatctgatgggacattccgacattggagtgacgatgaacacatatacgcatcttggcctggatgatgcgaagaacgagatgattcgcatggaggaactggagcaggcgagaaaagaagtggataaggcagaagacaaaaagccgatgaaacagaatatgttcaaagtagtttaagacaagcagcagacgctcaggggaaaccgtgggcgttatttttgtgcttgggaattgtaggatgcttggaaaaatagtataattgctatgaacatttaatagataaaaagttgtctcaatactaggtcagtatatgatactagataaaatgatgaaatagttaagaatgtgagaaaggaaaatagagttatgaaaattaacgccaaagacttatgttcaattaaggatattcaagaattaaagagtgttgattcaattaacaatattcttaaagttataaatagtgaaattactcctatgtctgttacggcacaaacatatgaagaattgttttcagtaattgcagtattaaaaaagcaatggaataatttcaattctgatgtttatttcaaaaatgagaatgtgaagatgatttattcactattgtatgctcgtccggaggtaagaaatataaatataggatattcagaggaattgcttgaggatgcggaaaaagcgaaaaaatggtatataaacttagtcaaaaaaatacatccagatgcaaataaggcatgtcctgaggaggcacaaaaggctatgacagaactggaaattatatacgaaagaatccagaaatgttttgctaacgaagaggaagaataaatggaatctaaaaataagaaagaagaattggagatacgaaaagcatcgtcatatgatatcaattttccggataataaatatctagaaaactcagataaacagagaatccaaaaggctgttactgatggaggtatttcaatcggtaataaaacttttatttctgaaaaagaattaaataaattgcttgttacagatagaaaaggggttaccaatgctatgatgagtacgccacctggcgatttgaaaaaagtgggtgatgtagaatatatgtcgactccacatttgcagaaagagatttctcaaaaacgacagcaaccaagaagtattacggagcaagaaaaattaggatatgctcaagattgtgttaacgctttttcaaataatgaagaattgagtagacagagagccatagaagcagacttaattacaaaacaaagggctcaacttgggaaaaaggtaattaaagagagaaagtcaaaagtgagtgaattgtcaggtaaaccattagatggaatggctgaagttcatcataaagatagagttgcagataaaccagaacgtgcttttgatcctactaatttggcggtcattagaaaagatgagcattctgaatatcataattcagattatccacagaatgaaaaaggatacgaacaatttgaaaaaaaatataaaaaataaggtatatgtgcttgaactttgggattcaaaatgcatcccccttactcaatcaatcgttaaaaggttcaaaaatcggagtagtctgcacccccttaactgactaccaattaactactatcgactactacactaggctgtaaattgccgcattttgcgtgattttcaagaaactgcacagaagtatgtaagccaggaaagttcaaaaaagtccgcaaaactgggcaatctacggtatttcaggaggaaaaatataatgattaaaatactttttgtttgccacggcaatgtttaatggatgtcgtgaaatcctcgattttattggatttctttgggattaaccaataatttacaccttatttatacctttggaagaccggatcggaatagtataaaaaataaagaaatagatcaaattaacagaactggtgtttttattttataaggaaaattgagttatcgtatacgtttagacaagacaaattaaaaaagaagatccttttgtcgtagcagatagcacttccctttaatgacagatttttctgttgttcgctaactgatcgtcaccattccaatagtggggaatttcttatggcttgggggttttctagcaaaaatttcagtattgttaaaataaaaaattatatggagagagaatgttgcttatatgaaaaaaatagatgagaatttttatggctatataagggtagaaggcgatacttatacatataatgtatcagataatatagtcactttgcttccagcacaaagtgatccccaaaaaagagatgattctctttatcgcataaaatcacacaagacagatacaccagaatatttattcggcgaagataataatagcatgattgcaatattgcgtaatgggaaatttgttacagatcctattggcactaatgtggctattagatttgcaacgcctatcattataaaggcatgtggaaatgctgaaggattttttaatatgttgacggaagattggtgtaaatttcatgcaattacgttttgtggtggaaatataaatgcattatatactcctggcatagcaatcgagcaaccagatgtctccgaattattaaaatatgatggagcaagaacaataaaaatgcgtccttggagtgcctatactcggacaacacaatttcagattgaaaatgaaaaagtaacattaactgtttcaataggacaaaccgcagaaactaataatgcagaaaataggggtgcatataatcttggaaaagtgtataccttttttcgtttttcctttgaaaatgctcaaggatttgaaaagatggaaaaatattacattatagcaagaaaaattgttgcgattttgacttctcaaaataatatttgctttgaagaggtatatcttagtcaaagaaattctgaacaaaagtattttaagacaggaatatgtaaaatttttgattcttatgagaattattctataaggcaatggcataaagtgattccaatatttagtgtttttgattatattcccaatttaatagatggaattgtaaatggtaaggttaattcattgctggaacttcttccagaagataataagatggttaaccgaatatcgattaaaaatgttcaagatttatgtacggcgttagaagtttcttaccaactagatgataagagaaaaagagagaaagatgcacttattgaggaactaaaaaagaatattaaaaatacgatagccgaatttactaaagcacataatgaaattgatgtaaataaagaaactacaatgagtagtgcttttcaatatctggattatacattgaaacagaaaatacttacactatataatgaaaatagtgatatagtggatgaaattgtgtcaaaatactcgttaccttcagtaaatgagaatagtatagcatcttttgtaaaattgcgtaataataagacacattctggtacagttgaatggggggaaagtgcaaagatatatacacccttgtttgctatcgtttatgctagtttttttaaatatattaaattgccagatgaagtaattaaatccacgttattacagattttttaggtgtgaaacacaaaaaaatatttaggcgaagtgcggtattatataatgctttatatatcaagcctttaatgatgcacacccctattcgtagtctgcccctccgagctgactacgatttgactactgtatatggaagtgctttgcattattttgcaaaaagtgtagttggggagaagaaaaataggatgcccggaaaagtcgacaaaccaacgcaaaacttggcaatatagggcatatcagaacaggagaaatttatgattagagttttattcatctgccacggcactctttgaaaaactccttaaaaagtcagtaaaatcaatacttgagaggcatttgtggggaagaaataacccgaaaataccccactaatttttggcaagtagtataaagtaaagaattataattgggaacgtgacatgatcatggaaagctatgagatttttattaactaagtctcatggcttttttataataatgtaatcaagaataaatgatatttgatgttgttttataagatgatacgaaaaaaatgggtttctaaagcaaaggagaaaatctaatgatatcgtgagaaaacacttgtttgggttcgcacgatatgatatgatgtaaatcacggaaattatgagcatggaggaaaaataatggcgatttgttatgacaaattatggaaattactgatagataaaaaaatgaaccgcacagaattgaaggaagcgtcaggaataagttttaatgtgttagctcggttaggaaagaatgagccagtttcatttgaatcaatagaaaaaatatgttttacattaaattgtaagatagaagatgttgtagagatacaaaaagaagaaccattacaaatcgatagtgatgcgtttacaaccatagaactgtttgctggagctggaggtttggctttagggatagaaaaagctggatttgaaccattgggactaatagaatttgataaagatgctgcagaatctttgaaaaccaataggccgaactggagagttattcatgatgatatagctaatatatcttgtttggatttggaagattattttggtataaaaaaaggagaa

SEQ ID NO: 7695 - DNA, 505 bp, Unknown
  gut microbiota DNA sequence
gaaagtctaactattaaaagtcaaggttaaaatgaagattttttgagtaaattgcagaaatgcttttcagatatatttgaaccttgaaaactgcatgacaataagagcatctttgcaggtgctctaaaaggagatatgaagttaaattttatgctgctctatgataaagctgccctgacttttctagttggtaaataaccctgaccagtttcttggcagcatgggatatggcaacattatagtgtttgccttcggaacgcttctttgcaagataagcagagaactgattatcccaaatgcagacaaattttgtcgcattaaacagcgcatagcggaggtaacgggaaccacgcttttccatgtgagaataacagccgtcaagctgacctgattggtaagtagagggagaaagtcctgcataggcaagtatcttgtcaggggaactaaaacggttgaagtcgccaatctcagcaatgatcatcgcacccattcggtaattgatacc

SEQ ID NO: 7696 - DNA, 254 bp, Unknown
  gut microbiota DNA sequence
aacattccatcggttcaaatatgcctgcaaaatctcttgaactaaagcacacaattcggcttattcaggaattaacttctgagattgatgaaatagaatgcttcattaaatccattatggacgaaatccgctctccaattctttccatccctggtatcaattaccgaatgggtgcgatgatcattgctgagattggcgacttcaaccgttttagttcccctgacaagatacttgcctatgcaggactttctccc

SEQ ID NO: 7697 - DNA, 7250 bp, Unknown
  gut microbiota DNA sequence
ttaatactttcccatgagcctcatccaaatcaataataatctggcatctgcttcgaatagttttagatgtattacttttgcgaattatagattttaatgtcttcaattcatcatctgtaagtttaatgacatattttcttggtcttgccatataaatcaccgccgttttcttttattttaacatgaagcggctataatagctataaatatttagttaaatgtcaacaatacagtacactagctcttcttatggaaaataacacacagtacacaagtgtgcatacagttaaagcctctattttcaaggcataaggggataggggtacagtttacggatgagccgacgggaaatctggactcaaaaacaagtatggatgttattttgctgatgcaatcgatcagccgtcagttccaccaaaccaccattatgatcacgcacaatgaggaaatcgctcaaatggcagaccgtacaatccgcattgaggatggcaaggttgtttcgggaggtgtcagatatgcacgctaaccgaaataaaaaagcagttaagagagtggaaaagggaatgatgaaagcaaaccgtattcgtaacctgtttgcggtgtttgcgatcgttctcactacctttatgattacaactgtgtttagtttgggcattaactatatggaaaatatgaagttaatgcaggtgcgtaccgcaggcacaaccgctaatgcgtcccttgcgatgccgacagaaaagcaggaacagcagattaagaatttggaatatgttaaaactgtcggtacgcagtatatggtcggctcggttgctgagaagaacgacgaggggcgtgatctttctatcgcactttcgtattacgaccctacggaatgggaaaaacactataaagaaacaatcaaagatatagaagggaaatatccttcagatgaaaatgaaattatgctgtcagaggatgctctttcacagcttggaatgaaagagccgaagctgaatatggaaattcctctgtcctattatgataaaaacggtcagcaggaaaaaaatttcacattaagcggatggtttcattcctatacaggtacgggaatgggctttgtttccgaagcgtattgcaaaaatgcaggttatacaatggcagaggacggcgttctttctttgtcgctgaataaaatgcccgatgatttttatcgtattcaaaaagatgtggagcttaacgaaaatcaatctttcggcggtgcggtttccatgaaatcatcaagcggttcagttatcgcaatggtaattctattggtattctttatcattggcagcggctatctgcttatttacaatgttttgtatatatccatttcaaaggatacccgtttttacggtttgatgaaaacgcttggaacaacgcaaaaacagattaaatcactggtaaaaaatcaggcagttaagtttgcctgcattggtatcccgattggtattgtgttagccaccgctgtttcctttggaattgttccctttgttttgaacgagggctttgaacagggcaagtcgatgatggatgccgaagtgtttttccatccatctatctatattctgtccattctcttttcggcggtaactgtttggattgcctgcaatgctcctgcaaaagcggctgcaaaaatttcgccaatagaagcattgaagtttcagaattttgcaccgaagaaaacaaaaagcagaaattccactaatggtggcaagctgcatgtgatggcatttcataatgtgttccgtgacaaaaagcgggctatccttgtgtttatgtccttatttatgggaattactatgattttaggtgtaaatggagttataagcagtatgtcggctgagaactttattaaggaatacatggattataactttgaatacaatgatattcaatttgaacagcctgagcaactcaacaaggaagtacctcaattcgacgaacattttgtggaacagattaagcaaatcgacggtgttgaaaatgtagatattcaaaagacagtctgggcaggtattgactttgatgaaaccgctttagaaggctttatgaaaatccaatatgaggatagtagatataaatccaaagggcagtcctatgaacaaatgatagaggcacttaaagggtatgctgatgccggtgactacggctgctatattacaacacttccagacgacagggtactggaagaatacaatgcagagcattctgatacgcctattgacatggaagcatttaagcgtggcgaaacagcgattgcaggaaaagataccgaatataacgctcctaataccgctttagtgggtgaaacattgacactaactgccgacagtacagacggcaaggcaactgatttcaaaattggcggagctttttactatgatgattatgataatactctttcagaaggtattggcagacgcaaggacattcaaattgtgccgaatatcatctttgtcagcgaagcgggtatggaacgactgacgaaagaaccgatcatttcggcaatcggtgttgacattaagaatttcaacgatttagagcgaattgacagcgaattacaggcgatcaacagtaccttgactggatcagaatggcaacttagatcttctgttaatcagaaagaactatttgaacagatgaactactctttaagcttgttggggaacggtgccgcaattctgctcattgtcattggtttgattaactttgtcaatgtaatgctgacgggtgtggtggcaaggaaaaatgaatttgccattatggaaagtatcggaacaacgaaaaagcagattatgaagatacttactttagaaggcggtatttatgctctgatttctactctgctgattatgacttttggcaatgcgttcctaatgttggtggcagatgcagttccgcatatggcaaactatgcagtatttaaataccctgttgctcttgtcatcggtttgattgcagcaatctttgtaatttgtttaagtgttcctgccattgttcacaaggcaacttctgatgaaacggtcattgaaagactgcacaattttgagaattaaatgaggttgcgggacggacgcagcgttgctgcgtctgttcctgcaattttgcatattgaggaaggtggtgcgttttacggctatggcaaatatttttctccttgaagatgataaaattctgagcaagggtatttctatcgccttaaaaaaagacgagcatacggttacagcagtctatgggtatttggaagcattgcagcaataccaaaagcaaaagtatgatttgtttctgcttgatattaacctgcctgacggaaatggtttggaattttgtaagaaaattcgggaaacatcggaaacacccgtattatttttaaccgctaatgatacggaagaagatatgttggaagggtttggcgttggttgtgatgattatatatcaaagcctttttctattgaagttttacgaaaaaaagtattggcagttctaaaaagaaccggcataggaaaatttcgtatgaaatacagagatttagagttagataaagaaaagtgtgttgttttgatgaagggacaggaaatacatttgacctcaacagaatacaaattgctcctttatctaatggaaaacaggggaagggttgttacaaaggcaatgcttttggaacagctttgggatatagacggaaactttgttgatgataataccgtgcgtgtgaatattaagcgactaaggcagaaactgcatgatgaaaagcaggaatacattgtgacggtttttggtatgggttacacttttggagaatgacgatgaagcattttggaatttacagaaaactgattttaattataggtactgctacggcggtggtatctgttggtgtgttcttttttatggaggacatccttttccgtacgctttttatctcttttgcatttgtatttttatgtggcttgttgttcctaatggactttctgcacaaccgctataacgataatctgttagaggagattacgctgctcattgaagctttggtagaacagcaggaacggatggtcttttcagaagctgaggataccctgaccgcacggctgcagcaccaacttctaaaactccgcaatattttaaaggcacagaatcaaatgctgacacaagagaaagaacagatcaaaactttaatctctgatatttcgcatcaaatcaaaacgcccgtagcagcggcaaacacttttgcacagttattaggtgatacagggttatccgatgaggagagaagtgaatatattgccaccttgcagatgtcccttgaaaagctgacttttttgacaaacagtttgattaaaatgtcccgtttggaaagtggcattatccgattgaaacctgaacaaaacagtttaaatgatattgttatgcaagcggtgaaaacggtttatgccaaagcaagggataaaaatattacgattacctttgattgtgggcagacctttgaagccctgcttgattttaactggacggcagaagctgttaccaatgtacttgacaatgctgtgaaatacacaccaagcggaggagttgtggacttgaaaatcaccgaatatccatcgtatttgcgattggatgtatccgataacggaattggcattcctgaagaagaacaggcaaaaatcttcggcagattttaccgtggaaagcagtcagcaggagttgacggtgtgggaatcggtttatatcttacccgtgatattgtgaataagcagaacgggtatatcaaggtggcatccgatgaaaaaggtacaacattttctttatttttgaaaaagtttagagaacaatagtaattccagataagtgtacgatatgaatttgtcaagatagtaaatataaaatagaaagatcaaataaaacaagataaatggagatggataatttatgatttcagaatggataatttgcccgatttgtggcaacaaaacccgtgatagagttatggaagattcaagacatgcctgtggacttgtattagacaatggcatggaattgttattacatatcggaattgacactgtggaaatgcagggagacggatttgagtatctgattaaagaaggacaggaggtaaaagcaggaactccgttaattcgttttaatcgtcagaaaattaaggaagcaggatactcggacgtgactgtttgtgtgatcacagatggggcagatgaaaaaacagttcattttcatacaggaatttacgcgcaggaaaatgaaacagtgattattgaaatagaatagagggaaagcagtatggcagattttagtaataaagtgatttatcaaatttatccaaagtcttttaaggattccaatggagatggaatcggagatcttagaggtgttgcagaaaaattggattatctgaaagatttaggtgttgattatttgtggctcacaccattttttgtgtcaccccagagagacaatgggtatgacgtagcggattatcgaaatattgatccgatgtttgggacaatggaagatttagacaatctcattgcagaaggggaaaaacggaatattggactgatgtttgatatggtgtttaatcatacatctacatcacacgaatggttcaggagagcgcttgcaggtgaaaaaaatatcaggattattatatatttaaggagggggcgccggatcagcccccgacaaactggcagtcaaagtttggaggttctgcatgggaatatgtatcctctctcggaaaatggtatttgcatttatttgatgtgacacaggcagatctgaactggaaaaatccggaagtcagagaagagttgaaagaagttattcgtttttggaaagcaaaaggtgtaaaaggctttcgttttgatgtagtgaatttgatttcgaagcctgagatttgggaagatgattttgaaggagacggaagaaaattttatacagacggaccgtacgttcatgaatatctgaaagaacttgtacgagatacaggaattgaagattatgtaacagtaggggagatgtcatctacaacgcttgaacattgtatccgttattcaggtgcagaagaaaaagagttgtctatgtgttttaatttccatcacctgaaagtggattataaggatggaaacaagtgggaacttatggaaccggattatatggaattgaaagttatctttgaaaaatggcagatgggaatgcagaggggaaatgcatggaatgcactgttttggtgcaatcatgatcagcctcgtatcgtatcacgttttggaaacgaaggggaatattggaaagaatcagcaaagatgcttgccggtatgattcatctaatgcgaggaactccttatatttatcagggagaagaaatcggaatgacgaatccgcactatacatctattgagcagtatgcagacgtagagagtcggaattactatgagattcttttaaacgaaggaaaaacaaaagaggaggcgctggaaattctggccgcccgttcaagagataacagccgtaccccgatgcaatggacagatgaaagatactgtggattttcggatacaaagccatggattcctgtatcggataattttgaaaaaatcaatgtaaagaaacaaaaacaggatagagattccattttagaattttataaaaagctgattatgcttcgtaaagaaaaagaagttatcgccaggggaaacattgaatttatggaagtagaaaatgccggcgtgttggcatatacaagatgtttggataaacagaagctccttgtttgttgtaattttcgtgatgtagaaagtcagatggaatttacacaggaatggaagtccggaagaaaaatcctgggaaattacgaggaaaatcataagaacaattataaggtgctgacattgcgcccatatgaaattatagtcttggaaaaaggcgaagaataaaatgacatagtttgggtacacaatcaaggctgaagtgggaattgaactgctctctgtcaagtagacaactgaaaaatataaaatttttttcctgccggtagattatcttccggcaggagtttttttgtgcggcttgtaagtaaatttcgcgtttttccatcggtgttaaacttccgagagttctttgcaggcgtttgttgttggagtaatctgtataatccttaatctaaagggcgtttttgagaaatactgattggctatttacaaatgtgaaaaaataat

SEQ ID NO: 7698 - DNA, 24947 bp, Unknown
  gut microbiota DNA sequence
aattccttatatttgaattatacaggaagctccttccgtgtatataaaactgcatggctcttatattgttttactttgaaacatgcttttgtaaagcatatattattcccctttccacttcaatgtaccgtttaaccgctccatgtacataacaatatttttcttattaattcctgaaagtccaatatttacaaaaagtttgtatttaaattgtatttaaaaattcatagacaactcctttacattcctttataaattcataatcgtgagttattacaattactgtttttccttcttctttcatcttttgtaaatatttgacagtggacgccatctgccctttacaaagcccgcttgtcggctcgtctaatatcacgatcggtttcaaacttactatagcgagtgcgatcataagtctttgcttttctcctccggacaaagattgtggatgactgtctttcttgtcataaagcatcaactctttcaacacccgctccttttttgcatcgtcctgactgacgatggatatttccgaccatacagattctgtgaatatctgataatttacatcctgcatcaccatggagatatattcataagatctttttatttcattcccgcagtaaaaagattttccttttcctttcagcagttttgccatctttttaatgaatgtggacttcccgactccattctctcctataataaaatatattccttccgaaaatccgatttccccgatatccatgattttcgtatttttaaagctttgtgcaaaatttttacattttaaaatattcttatccttttctccgtttttcgttttgttcagcatctggatctgatagcagggattatccgataacagctcttctttcctgatttcttcaaaactccttaaggcatacgtctccttcagtctgcagatcttgtcatgatctaagtcttccacagagatcatttccagttttccttcttttaaaacagccagataatccatgatctctttcagataatacagtctgtgttcggcaattatcacgattttcccttttcgtttcagctcggcgatgcattttttcaaaagaccgatcgaatgatgatccaaagaagccgacggctcatcgaaaagatatacttgattgtccatcgtcatcacacttgtaattgccataagctgcttttctccgcctgacagtgaaaaaatatttctgtttaaaagcttttccgtatcgagcagctccgtatatttttttattatcttaaccatctcatccttcggcagatttctgttttccaaaggaaacgccagttcatccgtagactcaacgcaataaaactgtgttttcggattttgatatacggtcgaaatataccggcttctctgtgcaatatccatctcatttaaccgcatatcgtttaattttatttctcctgaaatttccgcctcggtaatctcagggattatcccattgattacttttaataaactgcttttgccggatccggattctcccgttatacaaaaaaccgttccttcaggaatatgaaaatgtatatcttttagtattttgtttcctttatatgacagatttaaatttctacacgcaaacatatttccctcctatataaaatcctatcaacacgagcataagcaaaaaacaaatgtagtctctcatacaaaacctgctttcgccgatatacgttcttttcccatggattttcagtcctcgcgtcatcgccgatacggcaacatcatctgctgtttttgtaagcaccataaataatggaaccattctgtattcaaaaagctttacaggatgaaaaaagaggcgtctgtttgtaagaccatgtaaatacattgcgtcttttacctgattataatcttctctcgccgtatgaaaaaatcttgccataaccgtaatcgggatgatcaacacaaccggaaaatgcatttttttaagcgctgacgtcatatggctcattgtagatgaagcaagagcaaatctcgccatcacaaatcccggaagaagccgcaaaaacatcatcgtaataaaaagaaataaagatcccaaaaaaccaccggctgaaaacacccattctttttgaatgatgtaagcagccataataaacaggattccttttaccgccgctttcttttccctgttcaagagtaaaaatacatatggcagcagcgaataagctgccgccacaatcgaaaatttcgtttgtatatttcccaggatcagagtatacgaaagacacaatgacatcaacattttcgtccgaaaatccagtttaaatttttcactgtgcacgctatgcctcctctgccatgcctgcttttacaaaatgtttcttcaacattcttatgcctatcgtgcagcctatgtacgcgccgagcattcctaaaatcacaatcagcggaagcgtccagttcggcaaaacactcatcattttttgtgtatattcttccccgtaccccatatcaagcatctgccggatataggcatctctcgcaaaataaatcggaagccagtttccaagtccatatatggactgtacgctgaaagcaagtcttgcatgctttacacttttataccgtccattccttaggacaacttctcccagtaaaccgccgataactgccgtaagcagtacccacggtccatgtccggttgccacaaatgcaagtgttactacgatcgtctgaatgaaaagcatccctgcttttttaatcttcgtaaaataaagcatgtataccggccctgacacaatcccataaacgaacggaacgaccggcattaagaccggaataaaaccgatcatcccagaaagaaacgtagcaataaaaatcaacacggaaaataatccgacatttaccaagtctctcacatttagtacgcctgttttttcttttttatccattatctttttctcccaactatacgaatcatgttaagcattgcagtatcaaataaatccacttcggataatagctttaattaactgtaactgtttgttctattttagaatcggatagcatttttctatatgcggccgaccgttcatacatttctttatcatttcctatcgcctcgatttctccgttgttcagaagaacgattttatcagcgcttcggatcgttctcattctgtgagctatcacaatcactgttttttctctgatcagctccgacaacgcctcctgaataagactttcattttcaacatctaaagatgcggttgcttcatccatcaatatgatcggagcatctttcagtatggctcgtgcaatggaaattctttgcctttcccctcctgaaagccgttctccgttttcacctattacagtctctattccatttggcattttttcgataaattcatcgcatcttgctattttagccgcctcaaaaatttcagcatctgtcgcaccttttttcccgatccttatattctctttgatacttgtgttaaataacactacctcctgaaaaacaatagaaaagttcttcagcagcgcttcaggatctactttacttatgtcctctcctcccagcaagatctttcctttattaatatcccaaaatcttgcggcaagctttgtaagagtagtctttccacttccggatgccccgatgagcgccgttacctctccttgttttgccgtaaaacttacattcctgacaaccgaataatcctcatatccaaatgaaacgtctttaaattctatatcataatttttcggatgaaactttgattccccctcttggatcggcatcgtttttatttcttttattctgcctacaacactgtcaagcatatcgatcatccccataaaggctatgatcccttctatcggaagatagatacttgcagtcatgataagaaatacgatatatacgaagatattaatttcccctgccaaaagcatttgcgcgcctgtaactgccactgttacgattcccattttcagaagcattcccgaaaaagccactgcgacacctgttacaatttcaatagtgccttttaattttgtgcttttctgtaatttttcaaaaaattgcttttttgctttttcttccatgttataggattttatctcctgaatctgttctatcgtttcctgaagatcatcaagtacctctctgttttgttctacccatttttcattacttttctttctcttattttttgataaaaagaaaatcaaaagagaaacggggatcacccaaagcgctgccagaccaagtttcaaattatagttaagaatcaaaacagaaatgatcgttgttgaaatcccggtagcatatatatgcggaactgcatgagaaaaaatttcttcatacagcgacatatctcccatcatcgtcgcagccaaatctgatatgtttctttttccaaaatacgataacggtaattttttcaatctattggcaatatcgactctgacatttgcgctctcactgtaaacgttcgtatatagacgggtatagtcccatcttgcaacaaaaaacataacaaaaagcattgccaatataataagtacataattttgtggtgttaatgctatcgcctcttccgcagtatccatatcgcttagcgattgaaatataaacataaatgcaatcatcggcggaaacatcttcgtcaaatttaaaatcgtacgggaaaaaacagcttttcttaaattgtttgctccggtctgcgacatcgcatattttttcataaaataattaatcatttttacctccaatcttccagttgacagatctccggtattcgtcccaaagcgacttgtatattccgtttttttctaaaagcgcttcgtgttttccttcttctgcaatacgccccttttcgattacgagaattttgtctgcatttacaactgtcgaaagccgatgtgcaatcagcaatgtcgttttattttcagctaactttttgaaagattcctgtataatgcgttcattttcaggatctgcaaaagcggtggcttcatccagtatcacatattccgcatcctttaaaaaagctctggcgatcacgagccgctgcgcttctcctcctgaaaaatatgtacctttcgttccatacactgtctccaatccatcttttagaccgtccacaatctcttttgctcccgcatcaaaaagcgcctgttcaatctctttatcaatggcatcttccttcccacacagaagattttctctcaggctcattttaaaaagccttgcattttgaaacacaaatgaaattttccgcataagcgaagttttatcatattcttttatattgcttccgcccaataaaacttccccttcatctgcatcgtaaaatcttgcggcaagacgggcgattgtcgtctttccgcttcccgaacgtccgaccagcgccactgtttcacctcgatttactttgaaagaaatgttatctaatactttttcacttccgtaagaaaaagaaacgtttttaaattcgatcccgcctgtcgtctgatcttctttcccgtaagccatctcatcatactcaagaatatcttctattttatcaagagccagttctgcaaaataaagatattgactgattgtcgcagtacgcataataagaactccgaaaatcggtccgatcaaaaagtatatgatcgaatcagcgacaacttcatgcggattttctcccgctgcaataataaacaaagcagccggaacaagaaaaaacgccgtcgaacccgaagtcgcttcaaacatagacattttatttctgtatcccatagtcattttcaagacgctgtccttcataacaataatagaagtataaagacgcttaaaactttccacgctctgaccgaatgtttttactaccgggattcctctgacatattcaactgtctcggcagacaatgtattgatctgtttatagtattcttctctgtttttcttcccttgagcagtcagcattgtcgccataaaaataaggccgataaaaacagggataagacttgtcaatcctaacctccagtcaaataaaaacaaaaagactaatatgacaaccggagaaacaaatgtcgaggcaatgtccgggagctgatgcgccaagacattgtgcgtttcacctgcgccgtttataatgatcccgcgcagtttcccgctttctttgttcataaaataccccaacggtttatctaacagttttttcacactgatctttataatattttcttcaacttcaaatgcaaaaaggtgtgaaaaaattcctgccaaaacatataaaccaagtcctacacaaggaaatattaccgcatatgctatattttctcttatcatggtgtaatttacatttccattcaagatcacattttttataatattgtgaatataccacataggcatcagcaacaggattcccgacaaagccgaaaaagccattgccaaaaaaagcatgtattttcttttccctgcataaggtatgattcttgttaaaacagactttttcttttcttttttcatcctaatcctctcctttcacgctcaaatcaacaaaatcttttcggatttcagatttgataattttatcccatttagtctttttttgtttttaaaactaatttccggttgctacaatcagtattgtatcagtttaattattgtgttacaataaacttagagtttttagtccaaaagggataacgtctaatcgggatatttgtttttgcatgaaagcggagaaaattataatgaactactacgaatttgttaaaaactacttaggaactgattcctgtaaagaaaaatcaaaatactgtaatatcggaactactttctgcgtttgcagagaggaagcagaaggctgttattggttttatgaaacggattcttttatcgtcgagatacatgacttttttataaaaaaggatattgtctactcgtctgctcttaatatggatcaatttatgtcgttttcttcttcctatatcattaccggaaacggcgaaagctttagtccttatcagacgttgtctgcaggctctctccatattgtcgatgtggaaaatatgcacaaagattataaatttcttttgcacagtaatttcccatatttaagcgtaggaatcagtttcaaaaaagaaatgatcgaagagtatctatattctttgaaaaaagaaaaaaatatttcttattcagatatattcacctctttcaatccggcaatcatcaaatcgtttgcaccgttagcgaaagaaatattaaactgcaaaatgaagtctcctgccgcagagctgttttttgaggcaaaggcaaaagaatggcttagcttgactataaacgcttttttcaacaataaagatgttcgtatttcaaaagacgatgacaaagcattaaaagatgtggcaaattacttagacgatcattacgcgctcgacgtttctcagcagacccttgaaaaaatcgcctcaatgagcggaacaaaattaaaaaaattattcaagcaaaaatatcagcttagtattacggaatattctcaaagaaggcgtgtgaacatggcggaagcgctgctgcttaacacttcccttagcattaaagaaatttccgaatctgtaggttattcatcccacagtaaattcagctcttgtttcaaaaagtttaaagggatatatccccgcgacgtcagaaagctttccgaaaaaagcacacacactttaggatgcggaagaatcactctataaacaaaatcaccggaagtgccaacaggcacatccggtgattctgtttatagaacttacttctgcatgtcactaattatttttttcagcatgtaaatttcttttcttcttttttccgtacaaaaaatatcgttcccgcgcttaataccgcaatcactgcaaataaaatcggagttgaactatcgcctgttttaacagcgcctgcattcttttctttgtcttcttttccgacttcttttaatttcaattcgtcgattgcttttgcaagtgcctgttctgcatcttctacttccgctttcgttgcgtcctcgtctgcaaatacctcttttgctttcgctaatgccgacatgaagttttctgcgctttcttctgtgtaaagcttcacatcgatctgttctgcactttggatcaattcttccagtttttctttgctcggtatcaacctcaatccaaagactgcattgcgaagatttgcacacgcctgatccacttcctcttttgtcgcgtcctgtttttctaaaatattttcagccgcctcaaatgctcccataaaaatctgaccgctttgggctgtatactcattcagtttttctacatatttccgcgaatcgtctacaagtttccgaagctgtgatttatccacaggtatcactttcaatccatccattgcctcttgtaattttttatgagccgcgtcaagttcatcctgcagcgcattttcattggcaagcacagcttccgcttcttcaagcgcttctttaaacgcattcgcactctgctctgtataaatatctgtattgatttcttttgcaatatctaccagctctctgagcaattttgcatctcctgtaaaagacaaatattcaagcatttttttaagatcagcttctgccttgtcaacttctccctgtgttgcggcttcatttgcaaaaacagtttcagccgcttcaagcgcctcgtctaatttctgttttacgatcggcacaacatattggtattcaggctttgtttttacatctttcgtatacgcaatcgcagctcccagagacttcttatccgcttcggcaaccggaggtttctctgtttttgttcctgtaaggcggatttccgctgccgaagcatagtcattatccgcttccacgctaagcgcgtccaaagatgtcaaacgcacatactttgcgcagaccggctcaaatgaagccagtttccatgcagcgttcgcgtcccatgttcctgttgccgcctcttcaaagtgaacgccgtcattacttacttccactttgtattccgtaataataccgtttgttcctcccgaaggtctcggctgataacggattccgtcgatcaaataaaagtctttcagttcaaactgaatccaatgtttttcgcgtccgtgaccggcgctccattttgtatgccacaatgtatccgcttttccgtccagaacattcgacgcctcctgacccgattgagccgaacctgccgcagcgctcatctgatctgtcgcaatatctcttgccgcatccgaaggatctactccgatgtatcccattttaacatccatatctcccgaacttacgcacaaatcatttgcattttttactgtgcctgtttcatcgcagataatttttggtcctttaaactgaatagttccttcatcgcctttttgtacagtgtattcaaatactaactccttgtcgtcattcccaccggatacatagtttgcataacggcctttaccatttaacataaatctgaatttcggtgttccttgcacagtgacattctgatctgttttcactgtgatcacatatttatctcccgggagcgtataagcgtgatcgtctgttttttccactttgtatgtaacagatgtaatcgtcggactcaataaattcacttcatctttaatatactctaaattaaacgcagtaaatttgatcgtattctgatgttcatagagaagtcccatatttccgtctttcatttttgtcagacaagaatatgcgtaattattaggacagaacattttttcttctacccagtctacagaaaaactatcctttgtttctgtcacttctccgattcgcaatgttccgttatttcttcctgtccctcccggattcgacatgatcactctgtctttgccgcctgttccgtttttatcataatataaaacagataactgacagtatacttccggcgccgttgtatcgatcggatcactccatgtcgctcctccgtctgtacttcttgaaacaacaacttttccgtttccgcgtgtatttctcataaactgaagcaaatttccgctgcttagttcaatgatctgactttctgtcagttcactgatgccgaccggattttgcgaagaagtctcctgtccgtctttgttgattcttccgtcattcggagattctcctctatgccatgtttttccgccgtcatcactgtaaacacaagccgaagactggaatcctataccgcttccggcaatcgtataataaatcgggaatataagtcttcccggatgcttttcatcataccgaagctgaactccgaatccaggaccgacaccgcaaaatctcatccagtcttcttttacctgcggcgtaatgtctaccggttcgctccacgtcataccgtcgtcatcgctataacttagccacaaatagcatgtctgcttaggatgaagcggagcggaatcgttgttcttagaagcgcttctcaaataaatatttcccacatatttaccggattgatacagatcgcctttttcgtggtatccttgtttatcatttccttcaaactgttttaccacataatcggttttgcgattctccttatcaaatacttctccgttctctcgaagcgtatattgattattgtctttatcataaagcgccagataatcttttccatctactttcacatagcctgttcccgtttctttgatcgaatatgtaccctggcttccattcgtcgattccggcatcatatctacaagcatccagacacgccccggattctttccgttttcgccctctgcgatcaatgccgggtcaatcgtatacgcagattgtgtgccgttaaaataggattgtgatttcagatcgattacatcgatcggctcttcccatgtcagtccgttatctgtacttcttctgacaactgtatcaatatttccccagtcggaccaatgtgtatttctttgatcggctgctgcgatcagagttcctttgctcgttgtaaccattgcgggaatacggtaattataagaatcataatcgcccatatcataaataccgtactcgcctgtcttatagacgttctctccgtattccggttcatcctgcggcaaagtacgtctatgaagctccataacctgttccgcatttaacgtttcatcaaacacattgacgctgtcgatcgttccgtagaacggccatttcgcgcccggcgtcttattcgttctgctgattccgccaagcgtaaccatatccggagtccaatctcccttcagcaaatacgttgtctcgaattttccgatggatgctccgtctaagtaaaactctgcatgtgtgccgtcaaaggcatatgtcaccgtatgccactgggcattattgacagattttccgtctttgagcgtaatatatttatccccttttccctgcacttcatatccgatccgattgtccttcggcttaatatagagcgctccgtactctttatccgcattgctgttcgacagcgataataatccgtaaatcgttttgcctacagccgcctcgttcaagcgatatgcaaaagaaaacgttccttttttcaatccggaaattgtctctttttgctccggaagctgaaccatctttccttctgttccgtcaaaagtttttctctgataagtaaaaatcggtgttcctacagaaactgcaccgtgatctgccaggatctgatcttcggaagccgcttcattatacagttttacctgcttgatacttccggtaaaaggataactgtttcccgaaatccgttttgcgcctccaaacgtcacagaagtcggttcccactccattttatcaacaaaattagtctcgtcaacttcccacttctgtacaagttgttgatccaaatatactttataatagttgtccttttctaccgcaagcgtgatcgtatgccattgatcatccgcaagattcacattatctaccgtaaaatttctgtgatcatttacagttgcgtttttacggaattcaaagccgattttatttccgccgctgatatacaaagacatgtaatgattcgcatgcttgtctccgttgatcgcggccagcgcctgcaaattagtactgcctgtcttaaaactcagcgtgattgtaccacttcccaaatcgtttacaaaagacacgtcttcttgtggtatttcaaaacgttgatcaatgccttgaatctgctgttcttcactcaaatactccttgcacaaaatttttgccgtttctgcatctgccgctgtctcaattccttccgcaccttcattttgagcaaaaacaggcatggcgccttgggtcaccatagcgagtgccaaaaggaccgccattatttttttcttcatgctcatctctccttctttcaatgaaatatattacaaattatagcatgttttcgttttcttttttgtgcaaaaatgttgcttttatttttactttttgtataatacggaatatttgatgttattttgcataatcaagttgatatatatatcgtttcaaaagacataactcccaatatcaaaaatcaccggaagcgccaaaaagcatcttccggtgattctattcacatgacctacttctgaacgatattgattatttttttcggtacataaatttctttgacgatcgtacctgtcagtttatcggctaccgcttcttttccggcggcgattgcctcatcttttgatgcatcggcagaaatactgataacagctcttgtctttccgttaatctgtaccggcacttcaatctcgtcatctttcattgcactttcgtcatatgacggccatcctgctttaaaaattgtttctccatggccaagctgctcccacatttcttcggcaaaatgcggtgcaaacggagaaagaagaaccgcgattgtttctaatgtttctttatcaattccgccttcctttttcgccatttcaataaacttgttgttatactccataaatcccgaaattacagtattcaaactgaaactttccagacgatttgtaatatcataaaccattttatggcgaagttttatcatctcttttgtcggctgaacgtctgcttctttactgtccataagcagattccaaagacgtttcaggaaacggtttactccgtcgattcctctgtcgtcccattccgcatccaactccggcggtcctacaaaaagctcgtacattcttaacgagtcgcatccataatcattcacaagagcatccggcgaaacgacatttccttttgatttactcatcttaattccgttctttccggtgatcattccctgattgaacaatttgtggaacggttcgtcaaaatctactactccgatatcatacaaaaattttgtataaaaccgagaatacagaaggtgaagcacggcatgttctacgcctccgatatacatatctaccggcagcatctcgtctgctttttctctggacactaattttttatcgtttttactgtctacataacgcaagaaataccatgaagatcctgcccattgaggcatcgtatttgtctcacgctttgcaggttttccacataccggacatgtacaatttacccattcttcaattcctgcaagcggtgattctcctgttcctgtcggctcataggaatctacgtccggaagcgtaagcggaagttcctcttccggtaccggaacattaccgcagtcaggacagtgaatgatcggaatcggttctccccagtaacgctgacgtgaaaatacccagtcacgcagtttaaagttgactgttgcttttccgaatccgcgctcttctataatgtgcggagcttcttttttaagcactgacgattccattccattccactcgcccgagttgatcattgttcccgaagcttctgtataagcttctgtcatattttcgatttcttttccgtcttttgcaattacctgaataataggaatattgaatttttttgcaaactcaaagtcacgatcatcatgagcaggaacacacataatcgctcctgtaccgtaatcagccaatacataatcagacagccagatcggtgtcttcgctccgctaagcggattgattgcatagcttcccgtaaatacgcctgtcttctctttgtcctgaagacgatctacgtttgatttcattgacgcatcgtaaatatatttttccactgcttctcttgtctcatctgtcgcaagagatgccgccatctcatgttcaggagcaagcaccataaatgtcgcgccgtaaagcgtatcaggtcttgtcgtataaacagtgatcttctcatctcttccgtcaacagggaactccacttctgctccgtaggattttccgatccagtcagcctgcatcttctttactttttccggccagtccagcttatcgagatcatttaacagccgatctgcatatgctgtgatcttcaacatccactgacgaagatttttcttcgtgacttccgctccgcagcgctcgcatttgccatttacaacttcttcatttgccaaaccggtcttacaggacggacaccagttgatcggaaattctttttcatatgcaagtccttctttaaacatcttcacgaaaatccactgcgtccatttataaaagttcggatctgtcgtgttgacttccatgtcccaatcataaagcgctgcgatctcattgatctgacgtttaatattcgccacattttccgccgttgatttcgccggatgtactcccatcttgatcgcatagttttcagcaggcagaccgaatgcatcccatcccatcggatgtacaatataatatccctgctgaagtttataacggctccatacgtcagaaattacataccctctccaatgtccgacatgaagaccgtttcctgacggatacggaaacatgtcaagacagtaatacttctgttttttatttccgttatcatccactcttggatttaccgaattttccgcccatttttcacgccactttttttcaatcgctttgtgattatacattatctttgtacccatatgtttctctccttcattcatcgttatattacgcataaaagaaagccttccgttcctgaaaactcaagagacgaaaaggcttatttccgtggtaccactcttgttcatccgaccggaccgggaaaacttttttgttcctgtatcctcatccgaccaaatgcactcattcattctataacgggaattcccgctttcgtctacttgaagttcaacgaaagaactccgaggtgagttcacagtttacgtttctgcctcgcaccgaccggcagttctctgaatacgatacactcctactattcctcttccatgtttttgcaatatccttattcattataaatatgtcattaaaataagtcaaggtattttcaccggaactatgccgattccgctatcactttcgatttttcaaagttacgtcaactctgcgattctggatacgccgacataaatttcggatattttataccatgtactgtagtcgactttccccgtttgcggcagttgaaacacttcctgaaattttctgaccgattccgccgtttttgaaccgtaaataccgtctgccgtaattttaggtatcgcaggatacgctcccgcaattacattcaactgctcctgtatctgcctcaccttttctccgcttgacccgatctccaatacatatcccggccacgaagatggaatacctgatatttccggcgcaatattaatatacatgtcatctccgtaaaaataacgaagaatctcgatcggtgtcaaacctttatctccaagttccttcgacccccattgtgtcatccaattcggacagctcaccattttcccgtcacaatactgtgtcaatatcggctgccgcacgttcggtcttgaaagataatttgcaaacaattcatctacgatcacggaaatgctttcatatacatttctttccggtatccacttatgatcgaatgctgtagatgaagtgatcgtaaaatcataccctttgtttctataccattcggtataaacgcgattgagcgtaaaagacataatcgcaagaacgtttgcccgaatcgtatttgcgggccaggtggcataaatttcgctggacgccacatttttgatataatctttatacttcacataatagttttttgcagtcgaatctctcggagaaccgtcatgaacaacaatgtattcaggaacaacaacacggcttaaaacgatctctccgctttcatttacaggcttgatctcatcttccgctattttaggaggatattctgcatataaagtatgagcagggatgacgaaaatttcttcctcttccctgcccgtatctgtcggtctcatcctgatattttgaattgcttttgtatttgccagaatttctgttcccgcaatgctcacaggctcaaaccccggagcgcttacattcaatgtatattccgaataaggctgccgttcgttttcagggtccagactccactcttccggcggcgcatccagctcaatcatatccgtctgccccgaggaatcagtcaccaactgttctaatgtattttccggaacaccggtatacgaaatcgaaatgcgagcttccgaaatcggatatgaattcaccgatgaagttacattcacctgtaatgatcctttatctgccgcctcctgctgcattttcacattctgcatcccgactccttgcattgcagctttataccgcttattgttttctgtttcccgcatacgttctccttcatcagatttattctctctaaatatatatgcggaagctttcgtttagaacaactttcgtattcggagtctctgcaagagcatatgataatcaaaacaacttcatgatatcgttatacatcacaacggccatcagtaccataagcaatgcgaatcccgcaaaatgtaccattccttctttttccggcggaacacgttttttacggatcgcttctattataagaaaaacaagtcgtcctccgtccaatgcagggagcggaagcagatttaaaattccgagatttgttgtcagcagaacaccgaagttcatcatactgagcatcacaacgccgaaccctgccggagctgcttcctgatacatgtcgtctacggcatttacaattcctaccggacctgaaagatctttaagtcctgcctgacctgtcacaagcatgcgcaaactgtctactgtataattcatccagtactttactttgtaaatactgtattcaacagatttgaaaatccccggttttactatatctccgcttgtcaccccaagcagcggtgcggcatcgccttccaactgtcgaggctccagttttgccgtatatttcttgccgtcacgttcatactctactttgaaaggcgcttcatcggcatgtgtcattgtatacagactgacatcatcccatatatgcacgttccgcccgttgatctctgtgataacgtctccggcttgaagtccctcttcctgcgcggaatagccgtccagcactcctgttatttccggacttctgtaaccggttatcataatcaatataaaacagaaaacacacgcaagaatgagattgaagatcggtcccgccgcaacaactgacattctcgcccacacggatttactgttgaaacttccttccgacagatcgtcggcatcatcttcgcccatcatacacgcgccgccgaaaggaagcagtttcagagaaaattttgtctctccgatctgttttcctaataacgtaggtccaagtcctaaagaaaattcatctacccgaattccgtttttctttgcaagaagaaaatgtcccaattcatgaaagatgataataaaactaaataataaaactgcaataatgattcccattcgctaccacctgttttttataaattcatatgtttcccgctcagtctttagtatctcttccactgtcggatctgcaatatttttatgattttccatacacgccgaaataatctccggaatctcaagatatgcgatctgtcttccgagaaacattgcaacagcacgctcgtttgccgcattaaacacagtcggaagagaaccgccttttctcccggcttcatacgcaagcttcagtccgtaaaacgtctccatatccggcttctcaaaagtaatctgcgaaagtgtggaaaaatcaagacgatctcccggaagataccttctctccggataataaagcgcatattggatcggcagtttcatgtccggtgttccaagttgagcgatcaccgcaccgtcctcatattctaccatagaatgaataatgctttgaggctgtacgacaacttggatctgatcgaccgaaacgtcaaaaagccatttggcttctatcacttcaagacctttattcaccattgtagaagaatcgatcgtaatcttctgtcccatctcccagtttggatgtttcaaagcatcttcaacttgtataccggtaagttcttctctttttttcccgcggaacggtccgcccgaagcagtcaataatattttatggagagctttgcgctgtcccccctgaagcgactgaaaaatcgcgctgtgttcactgtctacaggaaggatcgacactttatattgttccgccagcggcatgataatatgccctgccgtcacaagtgtttctttatttgccagcgcaatatcctttccggctttgatcgcctcgatcgtcggcaggattccgatcatacctacaatcgcagttacaacaatctgtgaatctttccaagatgcagcggcaagcaatccgtccatcccggataagatctccacatccagatccgcagtctttattttcagctctgcggctttttcctcattccacactgcggcaatcgacggtttgaattcccggatctgtttttccagaagttcaatgttatttcccgcagcaagcgccgtgatttttatatctttgtttgttcttacaatttcaagcgtctgggttccgatcgagccggtagaccctaagacagcgattcttttcatatctttgtacctcacttctgcatctgtcctgtaacatatcgcccgtaaacttatcttccggcttcataatgcccttatgtcttacaataaaaccgcaagataatatatgatcggagcagtaaaaatgacactgtcaaaacgatccagaattcctccatgacccggaatcagtttcccgtaatctttaatattatgataacgtttgatcgccgatgccgccagatcgccgatctgggaaattgcgccgccgactgcaccgatcactgcataagaaacgatactcgcccctgcatttccccagtggttcacagctaatgcataaagcacaccaatcagggctgcgcctgcaattcctcctatcccgccttctacggattttttcggactcagaaccggagccatcttatgctttccgatgagcatgcctacacagtatgcacatgtatcgcatccccacgaacagataaacacaagccatacggtaaacactcctcccggaagcattcttgtaaggtaaatgtaagacagcattaccgctacataaaatactccgaaaaatgccgccatgatctgctgtgtattatatttcggataagaaaatacaagcactgccatctggcagatcaaatacgccataaaaagcagcataaaccatgtatgtttttctcccgggagatattcttccatataaataagcgcataatacccgaaagcaaaaatataaccgacaattcccggcgcttttttctcaatgccaaacactttataaagttctgacattccgatcaggctgatcgcgaaaagaaccgtaaataaaacttgccctccggcaatcactgtcgtcaatgcaatgatcatcagcataatgccgctcaacaaccgtgttttaaacatagattacgcctcctcaactttgccgaatcttctgtgtctgtggttatattcttcgattgcttttacaagttcttcttttgtaaaatccggccagggcacatccgtaaaataaaattccgaatatgcaagctgccaaagaagataattcgacaatctctgctccccactcgttcggatcatcatatctggatccggaatcccatgagtatctaaatatgtctcaaacaccgattcatcaatctcttctgcttttatctttccttctgcacagtctttcgccattttttgcgctgcccgtgtcagctcatctctgcttccgtaattcaaggcaatcgtaaaattcagaccgccgttgtctgtggtagcagcttctagctcgcgaatcctgcttttgatatcgtcatccaacggctcaatatctccgatcacacggatcttcatatcattcttggccgctgttttcaagcatgttttcatataattacgaagcagtttcataagagccgcaacttcattttccgggcggctccaattttctgttgaaaatgcataaaccgtcagatatttaattcccatacgccatgcctcttcacagattttctccacatttttgcttccctgtgcgtgtccgtagtttcgcggcatcccctttgctttcgcccatctgccatttccgtctaaaataattgctatatgctgcggtacgttcatcttttcttcctctctatacgaaagggggcttacaatcaaagcccccagtttttgtaacggcgttaagaatccgattacacagtcataatctcttttgtctttacctcgaccatcttatcaatcttttcgatatatttatccgtaatcttctgaagatcgtcttccagatctttgatctcatcttccgaaacttccgttccttttaacttcttaaacgctacatttccgtcacgacggatatttctgacagccactttcgcagcctctccttttttcttcacatcttttgccagttcttttctccgatcctccgtaagttcagggaatacgaggcgaaccgtcgaaccgtcattagtcggattgatgccgagatctgacataaggatcgctttctcaatctctttgagcatgctcttttcccacggctggatctgaatcatccttgcttccgggacagatacgtttgccacctgttggatcggtgtcggcgatccgtaataatcaactgtcaatttatcaagaacatgtggatttgcgcgaccggctctgatcgtagctaattctccgtcaagattattgatcgtttttgtcatctttgaatcatatgtcgtcaatctttcattcatatttatatcctcctgcaaattttttataacgcttatacagtcactttcgttcccgtaaagtttccgctcatcgtttccacaatactgttttcctcgttcaaaccgaatacaagcatcggcatcttattttcaaggcagagaatcgatgctgtaagatccaccgcggcaagtttctgatcgatcacttcctgtatggatatctcgtcatatttgaccgcttccggattcactttcggatcgctgtcataaataccgtctatcgcctttgcaagcagcatcgcgtccgcttcaatctcgatcgctcttaataccgcccctgtatctgttgaaaaatacggatgtcccgttcctcctgcgaaaaagatcacttttccttcttccagcgccgctactgccgcatcttttgagaataatgacgtaaacgaaccgcatacaaacggcgtaaacacttctgttttcatcccgacataacggaaaatatcagatacataaatacagttcatcaccgttgccagcattccgatctgatctgcttttgtccggtcgatcgtctcgctcgtccttcccctccagaagttgcctcctccggtcacgatcgccacctgaatgccatcctcagtcagtttctttacctgctctgcaactttaatacaggttgcctcgtcaaaacctgtttttttatctcccgcgagcgcttctccgctcagctttaacagtactcttttcatatcgtactctcctttgttttcttcacattaactatttaaaatcaatgctgacctaaaatgaagtataacataagtttttcattttgtcatgtacatatcccgcatctcgttcatctgccataaccgtcagtttatcgcctgccataaggcatgtttttcctttcggaataaactcttttccgcctctgtctaccgcgacaagaaggcagttgtccggcagatctatttccatgacggtgcggttttcaagagcagaacctcccatgatcacaaactcgctcagcactttctgcccgcccgcataaaccggctgttcttcctctttttctcttcgcagcagatttgccagaaggctttcataaatcggttcagatcttaccaaagttgcagtgacatatgcagtcaccgaaacaagtgcaagagaaagcatctgacttaccgagccggacatctcaaacagaagtatgatccctgtgatcggcgcacgaacgatcgccgtgaaaaatccggccattgccagtaaaacgaaattattcatatacatcggatctaaaccgaagatttccgttcctgtcatagagaagattccgccgaccattgcgcctaatatcagaagcggaaaaaaaattccgccaggagcgccggatccgaaactgactgccgaaaacagaaatttcacaagaaacgtaatgatcgcaactttcaacaccatctctttatccgtcaaagcaacgatcagatcccctccgcttccaagtaccgaaggcatgcaaagtccaagcactcccgccgccgaaaacgcgatcataagacgagtcgtctcgtttaaaaatttcggtcttttataaagttcctgcgcttttagcattaccttattatagagcgctcccatcagacctaaaatcactcccaacacaaggatcatccaataataattctggggaagcgtctgttccaactgaaatcggaacaccggatcaagccccataatatgagacgatatataatctgccgtaaccgaagctgtcataaccgaaataagcagacttgtcgaaaaccctttgtgcagttcttccaacgcaaacataacgcctgccaaaggagcgtgaaatgccgcagccagtccggcgctcgccccacacgtcatcaaataccgttcttctgttttccctctgcttaaaatccgtgatattccctgtccgctcatcactccaagctgtatagacggaccttccctgccaagagacagtccgccgaacagacaaagaaatcctcccgcaaacttagcgggcagaactttaagccagttttgattcaattttccaagtatttcaccttcaacctgcggtattccgctccccgatatcatcggttcccattttatcagtttcccgacaagcactgcaagcagcatcaaaacagcaaaccatcccgcaatccgcagtggatttccttttataaacgccagcgcttcaccaagccattttcccgcacaagtaagcgcgattctgtaaaggagcacgatcaaccctccgacagctcctacgagaagtccttccccgatcaatataacaggaaaacgctgcgctctttttattgtatgcgatgtatttcttttcattttatcctcatttcttccattccttttttctacagttccgacaaaaagccgtaaagatcatcgaagatcttcccgaaaatatttcacaccagaaatatagacacaatcacagtgacaataccgcatataccgattgcaagtccgctcatcgcgccttccacttccccgatctcaatcgctttcgatgttcctaccgcatggctggatgcccctatggcaagtcctgccgcaaccggatcagataccttaaataattttataagaaggggcgcaaatatcccccctagtattcctgttccgataacggcggcaaccgtaatcggaacgacgccgcctgccggttctgatatgctcacggcaatcggggttgttacggatttcggcagcaaagaaactgtcagacttttatccagtccgaataaccggcacagtccgtaaacacttcccatagatgccaaagatccggccgtgcagccgacaagaatcggaagccagtactgtttgagtatctgtatttttgtatagattgccactgcaaggcaggcagttgccggagcgaggaacatattaataatctttcctcccgcattataatcttcatagggtattttaaaaataagaagaaccccgacaataagaacaatggcaatcaccaatggattacagacaggtgtttttaacttttcatttaatttcaccccgattccgaaggctagaacgcttagcgcaattccaaaatacggtgaagaacacaattctctcatttttctccgcctcctgactgtagattttctggtttcctgcttttcatcaaacggagtgtcaatttcacgctccatgcagtcactgcaaatgtaataattgtagaaataatacaaacaaaaactaactgtacaatcgaatgtttcagcacatcaaaataattcataatacttacgcccgcaggaacaaaaaagaacgccatatttccgagaagaaaatccgccttttcctgaatatgttctatctttaaaactccggtaaacaggcataaaaaaagaagtatcattccgatcacacttgccggaaaggtaaaaggaagcagtttctctatcacaaggctaagccagcatactgtaaaaatgatcccgatctgtctaatgattttcattgcatcaactccttaattgttcttgatcgcctatcattaactctactaaaataccactgtctttgcaagactgtcaatgtcgggcgctattctttaaatctgttcatatatcatttatctgcacattaaaaggcgaaaaaagagatagaaataaaagaaatatgcaaaaaaaatcattgacattcttttttttgtattctatgatactat

SEQ ID NO: 7699 - DNA, 2379 bp, Unknown
  gut microbiota DNA sequence
tcgcactttaaacagttaaaattttgcagtatgaagttgaacgcttttgttcttcccttcgctgccgaaaatatttttcataatacagggaggcatttttatgattatcgtactgaaaccacattcaacagaagaaactattacacgtgtagaaaatatggtcaaaaaccggggactcgacacacacatcgtccgcggtacagagatgacgatcatcggatgtatcggagatacaacgctgatcgacccacgactctttgaagttgacagttccgtagataaagttatgcatgttcaggaaccttacaaacttgccaaccgcgcgtttcatcccgaagactccgtgatcgacgtctcaggagtcaaaatcggcggaggacatatgggattgatcgcaggtccttgttctgtagaatcttttgatcaagtgctcgagatcgcaaaagccgcaaaagccgccggagctaatcttctgcgcggaggagcatttaaaccgagaacaagcccgtactcatttcaagggttaggtcttgacggactggagattctctgtcaggtcaaacaagaagtcggtcttccgatcgtaacagagctgatgtctcctgaatacctcgatgttttcaatgagaaagtagatcttattcagatcggagcccgcaatatgcagaattttgatttattaaaacagctcggtcaggtagaccgtccgatcttattaaaacgcggtttgaacgctacctacgaagaatggatcatgtcagccgaatatattatggcttcaggaaatgaaaacgttatcctgtgcgagcgtggtatccgtacatttgaaacatatacaagaaacactcttgacttacagagcattcctgtacttcgcaaaaagacacatcttcctgttgtaatcgatcctagtcatgcaggaggaaaatggtggcttgtagaaccgatggcaaaagctgccgtagcggcaggcgcagacggtctgatgatcgaagttcacaataatccggagtgtgctctttgcgacggagcacagtcactgaaaccggaaaaatatgacacacttctcaaagaaataaaactaattgccgaggttgtcggaaaacagctataaaaggagattctatgaaactaacagtcaatctgaaggaaaactcttatccgatctatattgaaaacgggattttaaatcgcgcgggagaatacatcgccgatctgtttcacggacagcgtattatgatcgtctccgatgacaatgtatttccactgtacggaaaacaattatgcgattccctttctggctacgagtgtcattctctcgtcctccctcatggagaaccgacaaaaagtttcgacacacttccgaaagtctactccgcaatgcttgacgcaaaactgacccgaagcgatcttgtgatcgctctcggaggcggagtgatcggggatctgaccggatttgcggcatctacctacttgcgaggaatcaaatgtgtgcaaataccgacttctcttttggcacaggtagactcatccgtcggcggcaaaaccgccgtagaccttcctcaggggaaaaatcttgtaggcgcgttcttccacccgaaaatggtgctgatcgatcctcttgtactgaacacactgcctgatcatttcatccatgacggcatgggcgaagtgatcaaatatggctgcatcaaagactccgggttgtttgatcttctcctttctcattcttcatttgaagatctcaaaccggatctgccaaagatcattgccagatgtgttgatatcaaacggatcgttgtagaagcagaccagtttgataccggagagcggatgcttttaaatttcggtcatacactggcccatacgattgaacaatattatcaatatgagcgggaaagccatggagaagccgtcggaatcggcatgtatcagcttacgaaaatgtcagaaaaacgcggccttaccgcaaagggatgcgctgaaaagattcggaaagctttagatatctacaatcttccgacaagctgcaaattgactgtttccgaactgatcaaagcgatctcccttgataagaaaaacttaaacggacacttaaacctcgtccttttaaaagaaatcggcgacagttatatttatcctacaaaaatcggtttttttgaaaacgagttgaacacatttatgtgagaatgttgtacctatagtcttcataaacgaataaacttttacataacgacaaaaataaagcaggagatgccgcaaatcaacagcgcatctcctctatttttatatcttttatatctttattttttatatctttgtttttaatatttttttaatatctccattttatatacttgcttttacatacttgctttt

SEQ ID NO: 7700 - DNA, 3640 bp, Unknown
  gut microbiota DNA sequence
cgtgatcggaagctccctcacaattactccgactgcattttgaactgcatttgaaattgcaggagacggagtattgataacgatctctccaatggattttgcgccgaaaggtcctgtcggttcataactgctctcgaattccacacggatctctccgacatcaagacggctcggtattttatactgcataaaggaattactgtagttctttcctttttcgctgtaaatgatatcctcataaagcgccattccgattccctgggcgattcccccttcagtctgcactcttgcaagattcggattaacgaccgttccgcagtctacaacagcggcataatcgattggttcaacaactcccgtctctttatcgatctccacttctgcaataccgaccatgaacggcggcggagatacaggagaagaaaaggcttctgttgcggacagcggcgcgttgctgctgcacattactttgtttcctatttcttttctcgttatctcttcttttgttttcagattgacaactttttctccgtcaaactccacatcatcaggactgcatccgagatattccgcccctctttcgcatatctttttccgaagtgtctcacacgttttcacaactgccattcccgtaacatatgtcgtactggatgcgtaagatccgcagtcatacggggaattatctgtatctactccatgcacgacaatatcttccatctcacactcaagacattctgcagccatctgtgtcagtatcgtatcgcagcccgttcccatatcggtcgccccgatcattaaactgtaaaatccgtcatcgtttactttaatttcaaccgcgcctgtatctactcccgaaattcccgatccctgcatcgccatagcaacgccgacaccgcggacttttccgtttccacagtcataacagggatatttttcatcccatcctatcatttctttcgcacgttcaagacatctgtcgagagcacagcttctcgtcgtctccccatagtaggcaggcatcatctgaccttcccgcaccatatttttcgctctgagaacggtcggatccatatgaagtgtctgtgccagttcatttaccgcagactctaaggcaaaaataccttgtgtcgccccatatcccctataagctcccgcagacataacatttgtatacactacgtcataactgaaccgaaacgcttctgcgcttccgtaaagaggaatcgatttatgcccggataacccgaccgttgtggggccgtgttcaccgaacgcgcctgtatttgacaatgtatacagatcaatccctttgatatttccctctttatccgctcctaaacgaacatggatttccatttcgtggcgaggtgacgaagcgatcagagactcttctcttgtgtaaataatctttgccggttttcctgttttccatgtaacaagcgccggataaatctccgaaaccgacgtctgttttgccccgaatccgccgccaatacgcggctttataacacggattttatgcttcggaatatcaagcgcatttccgagaatgcggcggacatggaaaggcacttgggtagaagatacaatattcagccttccgtatgcatccatatatgtatatgtacgaaatgtttccatcatcgcctgctgatttgcttttgtatggtatacccgatcgatcacatggtcgcaagatgcaaggactgcatctacatctccgctctcacttacgtcatgagcacacaaattacgtttgttatccgctccgacaggacaaagacttctccagttttcttccggatgaacgaggatcggatgatcttttgccgttctgaaatctaaaaccggctccaatacttcgtattttactttgatcagcctcatagcctgctttacaaccgcttccgaagttccagcgacgattgcgaccgcatctcctacgaaccggattctctgatcaagaataagccggtcgtacggacttggctcaggatatgtctgacctgccagcgtgaaacgtttattcggacagtctttatatgtaagcacacattcaattcccgggagcgcctccgcacgtgtagtattaatctctttgatcagcgcatgagcatgagggcttcttacaagctttacgattaagctgtctgaagatgcgatatcatttgtatatacggcgcgtcctgtcacgagcgcttttgcgtcaactttccggattcctttatttacaacacgcatctgccgcatcgtttctcttatttccttgttctcactgcacacattctgtccttctgccatgtctactcctcctttccgccttttttctctgcattttttacttctatatattttttaatcgcgcgaagctgtcccatatatcccgtgcagcggcaaagatttcccgcaaggtattctttgatctcgtccaatgtcgggttctgaagttctcttgccattgcgagcacgttcataataaatcccggagaacagaaaccgcactgctccgctccttcatctgccaaaaattctccgaactgcgcagcctctttttcaacgccttccaaagtcgtaacgctctctccctcgatacttgcggcaagaaccgagcaggaaaggcgggattttccgttgatccagactgtacacaatccacagtttgtcgtctcgcagccgcactttacgctcttacatccgagatctctcaacacatttaacaaaatcgtatctgcgccaacttctgcttttacctgtttgtcatttaaaacgaactgtatctccattatatttcctccgataaaatcgacattatttctctcttgataaggacctttgccaaatgctgtctgtacccggcgcttccgcgcatatttgtaccgtacttaaattctgccgctgccaaagccgcatattcctcgattttctctaaagacgcatcttttgcgacagaccatttcttttcgatcatatctgccttcatcggtcttgcgcctaccgcaaaataccatgtctcctgcccgttcgctttctctcttgacactgaacaggcgatcacagggaaatccgtcttcgtctgacggatggaatcataacggaactgtcttttcttcttcttaacaactatgaaaagaagcagatcattatccggttttttctttgcaaattcagctaagcagattcttcctccgtcataaagttctacatatgtatccagtgccaaaaatgcagttaatacgtctgaaaaaccgaatcttccgtaaatgcttcctccaaccgtcgcctgattccgaaattgaactccgacaatgtgacgcacagcctcctctattccgtctccgcataattttttaactgcttcgctttgctcgatctgacgcagcgtacacattgctccgattcgtatctcatcttccgtttcttcaatttgatccaatcctaaacctgaaatatcgatcaatgttttcactcttgcatttgaaaggcgcatccacatcattccgcccatgatcctgctgctgcgcgcctgatttaattcatatgcttcttccggcgttttcgcctttacataatttccaatcgtaagcacaatcgttctcctttcctgatacatacataataggtgtttgcgaaacgccacaag

SEQ ID NO: 7701 - DNA, 33303 bp, Unknown
  gut microbiota DNA sequence
gggggggggtaaaattataaagatataacatcatttatcattcgagtcgaaacagagatttcgataattataagggaaccgggaggtgagggaagaaaagcaatatatgaatatttctgcagaccgttgaattatggattgcaagtatagaaaaaaggaagaggtggataagattatgaaaatgaaacagacattcgctttattatgcgctggagcgatggttattacaggaagcgcatttccggtgaacgtacaggcaagcgctgattgggtatggaatgaagaagtcagtgaatcggggtataagaaagtgccttatacagagctgacgacaacagcggatacggaggcggataatgaatcaagtacaggtgaaggcgcggcatcgcccggaacgggacatgcagtcaatgcgacagacggagtgattacgtcttattatcattcgtgttatagcggagataatcagccgaacagggaagacggcgctctgacaggcaacaatacgataacagtagaacttcagaatgcgcagagcattcaggggattacttatcttccgaggcaggacgcgtttggaaacggaacagtgacagaatttagtgtttcggttcagaaagacggaactgaaaattgggaaaatgtaggaaataacttacatattagttataacaatccgggagctaattggtcggcagagaataaatccgaaaaggaatttgtatttgatgcagaagttgagaatgtcaaaaaagtaaaacttactgtcattcatacggatggaagcgctcccaatcagcatatatcggcggcagaaatcagtatattgactccggtaaaaaaagatgcggaaacagaagctttaaaaatcagaatacgagaaaaacttgcacagatggaatcacagatggagttgaacgtgcttagcggaaacgcagattcgggtaaagtatattccagagcaaaatttgatccgattaaggcagaggcagaagcaaagttagcgcaggaaagcacgacaaaagaagaacttgaggctgttttccaacagttggaacagttcaaaatggaatttcaggatgaattgggaacaggagtttatgtgtcggatttaacgcacttgtccggaaatactgcatggggtggagttaagaaagatctgtgtccggatggaaacaggttgatagcagtcaagaaagatacgtctacaataaatacatatacaaaaggcataggtgcacatgagccgtcttcgattgtatatgatgtgacaggctacaagatgttttctgccgacatcggtgtcgagaatcatcagattgcgtcagacggcggtgtttttgcaaatgtgaaagcgaaatttaaagtttctacaagtacagacggaagtaattatacacagcagtattatgcagaagatctttcggcaaacggtggattgcgaagtattcgtgtgaaattaccggaaggaacgactcatatgaagctagagtgccctgcaagcgcatggaacaacggaaatggcgggaaactgcatacgtgttgggcaaatgcaaaattatatgaaactgtagaaatcgcagttacgggaataacattagatcaggatgcattggctttgaaagtcggaggaacggaagagcagaagacggcgacgctgcaggcagcgatcaccccggaagacgcgacagatcaagaagttttatgggaatctgataatgaggaagtcgctactgttgacggcggagttgtcacagctcataaagcgggaaatgcaacaattaaagtaagttctgtgaattatcctaatataacggcacagtgtattgttacggttacccgcgacgatacggcgttagaagaagcgattgctgcggcagaaagcaggatgaaggaagaaaattttgcggagaaatatacggaagcaacgagaaaagcgcttgaagacgatcttgcagatgcaaaagcagcgaaagacaatacagctctttcagtagaagaggtgaaatggattgttgaatctttgaagacgtcgatcgaaggattgcagttaaaggcggttgttacgatcaacaacaacggaaacacagaaacaaaatattgtgaagtcggagatcaggtgagagttgttgcacagaatgtggaagacaagaagttttcacactggacattcaatggaactcctatctgttattcgagtccgtatactttcacggtatatggaaatacaacaatagaagcggtttatgtagaaaataatgttgttgtagagaaaaaggcgatagttactgtcacagctttttatgataaagcaacatctaaagcaaatttcttggtcaagagatcgcttccagaaggtagcacagtaaaggaacatggaattattcttacagatagtacgggatgggataaattaggaaaagaaggttttgtcattaatgcagaaagaactgttaaaggaacagcaaagacaaaagggttaatagggaactacagttatgcaatgaaaagtactagagctactacatggtatggaaaagggtatgttatatatacggataaaacgggagaagaacatacactatatagtgatgtagttccttgtgaagtgattcgataggaggtaaggaaatgaaaaaattttttgaaccagagatagaagtgattaaatttagtacggaagatgttattacaacgtctttcgtagaagataatgatagcgaagagggaacagatccatgggcttcataaattaatacttagagtattgaaaaagggcggtgcaagcgccctttttcaatatattttattatgaggaggagacgttatgcgcaatacatctttagaagaagaacttcgatcggggaaaacctgtgtctctacaaccgtcggagacagcatggaaccgatgttgcgtaatcgaagggatacaattattatagaaccggttcatggaagattaaagcgatacgatcttccgctttatcggcgaccggacggaaaatatgtgctgcatcgtatcctgcatgtgaaaaaggaaggatatatcatctgtggggacaatcgctggtggaaagagaatgtgccggaggagtggatacttggtgtcgtgaccgaattttatcgtggtgagaaacatatttctgtgagatatccgacataccgtctatatgttcatttgtggtgtgatttgtttttgatccgagcggcaattcttcgtataaaaaataagctgcaacgtattaaaaaagccaggactgctcaatgaaataatttatgtaaagtatgttttttacaaagggtgacattctttgtgtacacacatacattggttgttgtatacttggagtaaataaaataaatagaagaaagcagagaagtgaaaatgcagacaaagaaaagaattattcttgggtcggcttccccgagaaggcgggagctccttgagcagatcggaatttcatttgaagtaagagacagtgacaaagaagaagtttatcatagtctgatccccgaagagattgtaaaagagcttgcgctttcaaaggcggaaaatgttgcggatgatttacgggaaaaacaagagcaggtgaagcagataagttttgataagaaaaataatgtactgttggatacgattgtgatcggagcggatacgatcgttgtgtcagatggaagtattttagggaaaccgaaagatgaggcagatgctgtccgtatgatccgaagtctgcagggaagaagtcacaaagtgtatacaggcgtggcaattttggattatgacgatgagggaaaaagaaagtcggttgttcatgcagttgaaacggaagtttttgtcaatccgatgagtgacgaagagattcgggaatatgccgcaacaggagaacctcttgacaaagccggagcgtatggtatacaggggcggtttgcagcttatatcgaacggatcgacggagattattataacgtggtcggactcccggtatcttatgtgtatcgacagttaaaagaaatagcggagaaggactgatgggggcacagcgatgcccatataaaaggccggacaggatgattgttcaaatttcttgacattttttgtcaaagaggttattatggatacggtcaaagatgtaacagtttatcccacgccattcgtaaaaccgcactgcgtgcttattgtggctgacgccactgttttactcataaataggcgcttagcacatacagatgtccgcttgcaaaaacatgcaggcatgttttgtgcttcacacacactgtatggctaaactgttactaaaaaattacatatagattgatgacaaggggagcttgtgttacaggctgagaggaagttgggaacttcgacccataacctgatttggataatgccaacgtagggattatgttatgagtgtttataccttttgttttcaatctgagaacaggaggtttttttatgtttgatttacttgtaaatgcagaaggcgggctgacaactgcgggatatgttgtcacgatatccgtcgggatcgtactttttctggcggcagtatttttcgcgggaaagagatctaagcgtcaaaaaatgacgacaaagcagctagtattttgtgcggctgcaatggccctggcgtttgttacgtcttatgtaaagatttttcagatgccatggggaggcagtgtgacattatgcagcatgctgtttattgtacttgtggcaaactggtacggtgtcggaacaggagttttggtaggtcttgcttatggaatcctgcagtttatacaggaaccgtatgtactttcttttttccaagtgtgctgtgattatattctggcatttgcagctcttggtgtggcaggattttttgcaaaaaagaagcacggactgcttaaaggttatatcgcggcagttttggcaagaggtgcgtttcacgcacttgggggatatttgtattggatggattacatgcccgataacttcccgaaatcattgacagcgatctatccgattgcatataattatagctttcttttggcggaagcggcgatcacgctcgtgatcatttgcattcctgccgtggcaaagggactcggtaaggtaaagcagattgcggcggaataaaataaaattcacatgtgtaaagatgacaggcggttcggaaataaagaaatttccggatcgcctgttatcgtttgtggtataatgattgcacgttgtgcaatccaagccgattgcccggcttgccgccacaaaaagtggcggattataccggcgatccactgcttggaaaggaaatgtatgaaaggaaattcccgacggccttttataagaaaaatttaagaattacatcgaggtttttttaacagtggaagtgtactgtttatatcagataaaggaaaacgagaggagagaatgatggcagaggaaatgaatatgggagaggttgtcatggttgttgatgacaacaaagaaattgtatattcgatcagtgaacttttaaaatacgaaggataccgggtgattccggcgtatgatggaatggaagcgttaaacttgcttgagcagaatccggtagatttaattctgcttgatgttatgatgccacggttaaatggcttgtctgctcttatgaagcttcgggagaaatacaggattccggttattattctttcggcaaagacggaggaaagtgataaggtatcgggacttgtgcttggtgcggacgattatgtggaaaagccctataatccggcggagttgatggctcgcgtgaaagcgcatttgaggagatacagggcgtggggaggcgagcttccgaaggaaaatgatgatcagatcataaacggaggccttgtacttgacaaaaaacagcggatcgtacttgtggaaggggaggaagtgaggctgacggctacggagtataaaattttagaacttttgatggaacatccggggcaggtgttttcttcggagcagatttatgaaaatgtctggcaggaatcggcaaactatacagtggaaaacacggtaatggttcatatcagacacattcgggagaaaattgagattgatgcaaagaaaccaagatatgtaaaggtggtgtggggtattggatacaaaatggaaaaatattaagtcaaaggcgaaaagttttttagagaaatgctggcttagcagtacagggattgcagtgaaactattttgttttgtgctggcagggtttggaatcgcattctggtatagtgttgtagtgtaccgtacgtaccatccgaccggagaatcattgtttttcgggatattgggaaatgctttatttggagcagggcagatgatactgaccgcatttctcattatgaggaaattccgtgaatgggatccgggagaaaaggatgcgtatgtgaaatggcagaacaggtggaaaatcaggaatcgcagactgcagtggataggcggaacagctcttttgatcgctttgtggtatatgtcgtacttaatgaacggcggaatgtatataggaacaggatggcaatacaattatgcatcgggttatgtcatgattttatcggcgctcgttcagtttgtgcttgccggagcggtgatgaatcactttaaaaagaaacagttagacatgatcatgtgtaattttgaaaagataaatcaaaacaggatcaaagaagcgttagagatcgagcgaaagagtcttgaaaaagtatcgcgcagcgatcagctcagagtagatcttattacaaatgtttcccatgatctgaaaacgccgcttacgtcgatggtcggctatattgaactgatcaagagggaagaattaagcgatattgtccgcgattatgtggatgtgatttcagagcgggcagagaaactaaaagaaatgatcaacagtttatttaatcttgcaaaagcaagcagcggaaatgtagagctgcatccggagccgttcgaggtaaatcggatgatcgaacagatctttgcggatatggatgacaggataaaagaaagtcatttggaatttgttaccgatctgacaaaagaagatacacagcttatatcggacaattcttatttttacagaatctgccagaatctgattgaaaatgcgttgaaatattctgcaaagggaacgcgtgtctttgtgaaaacgaagcttttgcagtcggaaggaaaagaggaagtatggctggaagtaacaaacacatcgggatatccgatggattttacaaaagaagatattatcgaaaggtttgcaagaggagataaggcaagaaccggagacggaaacggacttggactggcgatcgtaagtacttatgccaaagcgctcgggggagaatttgatatattgatcgactgcgatcagtttaaagcctgtttgaaatttccgaaaaagacaacataattttgattattatgcagaagaatgcagaaaagcaaaaaatcacccgtttcttatgtgagtatattactttatgatgattcgggtaattttttgcttttttactctcgcagcgcagatagtccaagtccgggtctatctaagattttatcggctgcttacaattttggaacatgctttttagaacttccggcgatagttttatgggttatgtatatatagtagatgataaatgcaagcgctgtgataacccatgttaccggatagcttaaaataatcgccgatatcgtcggtgagattttcagcatggcggcaagccatgcgatgcgaaggacgcagacgccaagcagagtaatggctaccggaacgacgacgtttccgactccgcgcagcgctccggcgataacttcgataaagacatatacaatgtaccatggcgtgatcagaacgagcatgtcgcatccgatttcaattacatgactgtcgtttgtaaataaccggaataaaaggaatcgtgcggcgatcagaaagacaacaagtacggcggaaacaataaaatccataagaaggcatacgcgggtacttttgcgtacgcgatccatttttccggcgccgtagttttgccctacgaatgttgtgatcgcaattccgaacgcagtgctgaccatccaaaaaattgcgtccagttttccgtaggctgaccatgcggcggttgtgtccgtgccgaaagtgttgacagcagattgaatggcaatatttgtaatagagaacaggatcgcttcaaatccggtcggcagtccgagttttaactgcattttcaaaatcgaaccgtggaaacggatctgtttgacggaaagttttaatatgccttcagagcgcatcagttttaaagtgacaagtacggcgcttacagcctgtgcgatgagggtggcaacggcaactcccataacacccatatggaatacgataacgaataaaacgtcaagcacgatgttgatgatgcagcagacgatcaaataatagagcggacgtttggaatctccggtggcgcgcagtattgccgatcccatgttgtaaatgaggacgaaaatgattccggcaaagtagatccttaagtaaacggcggaatctgctacaatatcggcaggcgtattcatcatctctaaaagaaacggagtcagaattattcctgatacggtaaggatcaaacctccgaaagcggcgatcgcgtaagctgtgtgaagacctttatttgcagagcgggagtctttcgcaccgaaaaattgtgcaatcgttacggatgccccggaagaaagcccggtaaaaaatccgactacaaaagcaacgatctgagcagaagaacctcctactgcggcgagagcttcttttccgacgaattgaccgacgataacactgtcaatcgtgttgtatagctgttgaaagaaagtcccgagtaaaatgggaaagaagaaaagtagaagctgccgccaaataatgccttctgtaatctggtttttctgaatgttggtagacatagaaccatctcctttcaataattttcggtattaggcgtttgtgaaacgcctaatattatatatgaaaagcgaggtaaaaccaagtgaaattcaaacatatgttgttttgcggagctgttttcaaagatgataaaaataaaataagaaagagccgagtctttaagattttaaagattttggaaatccggaacagctccgttcactttgtccgtcgtctgtcggatgaatatcatctcttacagaagcaagagtgcgattaaacaaagattcgatctcttcggataaggttttcattgcttccatatatatctgtgctttaaactcacaagtctgtgaggtacaagtttgtgggttgcattgctgatgatgccgttctgcctgatgtctgcggcgttcttgcccgattcgaagatagagtgtccgcaatagcgtggagttctgtctgtttgtcagatccagatagcgggataccatatcaggatcaccttttgtaagtgcaatatcgaaagcgtgtcgtatggaacgctctactcttgatggtgttgtgtgatactttttagcgatatcgatatagagtgctgatatctttccgtcaggatagtatggatcggtattaaataattctattgcgtcgcaaatataagtaaaacctttgattcctgccgaaactccgatgttcatcagtacatctattacataatctttcatcatgcccctcgattctagttgttaatattacctaagaaaattgattcatattaagaaaatataccaattttacggctatttctacatcagtttacgacagatttaataaaatgtcaatgagaaactacaataatcttgaaaaagcgattgcttttacaggaaatttgtaatatactttgaataatatgtggtgaagagagggttaaaatcatgacgatgatcagaaataagattcgtaagcgacgtcaggagttaaacatgtcaagagtacagcttgccgaagcggtgcaggttacaccgtctgctattgcaaattatgagaatggaatcagctatccgaaaccggatatttttgttgcgctgatgatcacgcttgaagtagatgcgaattacttttatgaagagtatgtaagaaacagagagattgccatcgcatgtaaaagagcgatcacacaggatgagatatatgctcttgaaaagtacaggcagttgacgagcagcgggaaaaaacttgttcgtatggtgatcgaagaagagtattcgagaatgcagcaggaagaatggatttcttttccgtgtatgaaagatatgggaggagggattgatgcgatttgtaaaaaaagagcagaatattttgaattccgtgtacgcaaggagaatatgatagacggcatggaattttgcctgcagcttcagacagacagatacgagcctgtttttcggaacggggatgtgatcgcattgaccgaaaaaaaagcaggtcaaaatgaaataggaattttcttagtaaatgaagtttattatttgagattattatatcaggaaaatgaagagaaaaagctgaaagcattgaacgtattggaacaggatgtagtagtaaagccgaaagaccggtttatctgcatgggaacagttctcgggaaggtacaagggatgcctgatttgtgattctcgtttccgtgcagataaatccgatcagagaagatatcgatcataagaaattcggctgtaaaaatttaatcataaaagttttgtctataaagagtttttaataaagttgtctataagaatcttcggagcggtttgataatttgtcttaatgctgcgtagaataatttctttccggtgcttaattcttttgttttgtaattttccccgtaggtatattttccgtttgccatcgtttttgaaaaggttttatcatgttcggcttcttttcgtataattgcgtttaattcggttgaatcgacggcaagcattaattcggtatcaagatatgtgcttcgcatgtcaagattgtaagaaccgacgatactcatgcggtcatctatgagaacggctttcgtatggcaggaatggggagccatatattcgtaaactttcacaccggttctccatatcttttctttttcatttaagtaatctgtacagccccacggattggcgccttttgcgacatcatttgtaatgatctcgacagagacgttattatctgtgagctgagaaagatcgtcgtacatttccctgccgcatataatgtaaggggtgtagatcgtcgcctgttttccggacatcataagccggtgaagagagtaccacatccacggttctttgttttctgattcgatcggattgctcaaaagagtgatcttatttgtctcaaatgtcagttcttcccagttttgtttttcgtatgcggcaggatattttttctgtagctctttgtaatgttttttcagagcttctgttttttcgaccgtcttttttccgtttcttgagccacggcacggtttgctgtcagaagaatcccatatggaatcaaaataagtctgaagctgggacatagaagtgttttgcatatttttgcccggatctgtttcgtaaacaaacagctccttgtcgatgttttttccttttgaataatctccgagaaacaggtttgttgtgttgcgtccgccaagtgtatacatctggtcatcgatgatcagatatttgtcatgaaggcgggcctgcatatcccatggtttcaaaaaattcacaggattataaatgcggacctgagcgtttttatgagcgtctaaagcaagaaaccacggattgtgctgtacatccataaatccgctgattccatcgacgataacacggatatcgacgccccggtccgcggcgtttagtaaggcggaaagaatatcctgccccgcctcatcatcgttaaaatcaaaggtcgataaaatgatggatttttctgcttcttcgatcataccgagccgatacaaaagagcgtcgttattatcagtgatgtaggcgatgcgctctgtcccggatgtgtcggaataatattcggctgccgcatctttttctttgtattcttccgatacagttttatgcggcagataaggaacagtaaggaggataatataaataaggattaagataagtacaatgtatttccatgaaatatgttttgcgagaaaagaaaaactgtttttcatattttcgtaaaatctcctttcttttggaataagatagcacatttttttaaaaggggcaattcattaagacaaaacgacaacgcgttagtaacatggggtgacacgggataaatgtatgcattttaattcgatttttattttaacgaattttattcacactttaaagtgttgaagtaaacaaaaagttgtgatatactgtatccatatttgcagtgcgcctgttttgagagcgcatgatcatggagggagaaaagatggaaagaagaattaacggacatacaaggctttacgcgctgatcggttcaccggtaggccattcggggtctccggctatgtacaactacagttttgaaaagctagggatcgatgcggcgtatcttgcgtttgacataccgctggagaaaacaaaagatgcgattgacgcattccgcacattaaacgtaggcggttttaacataacgatgccgaacaaaaccgcggcggcacagcttgtagacagattgtcccctgcggcggaacttgtcggagcgtgtaacaccgtcgttgtggaagaggacaaaacgatgacagggcatattacagacgggatcggatttgtccgcaatctgaaggaacaaggagtcgggatagagggaaagaagatcgttttgcttggtacaggcggagcggcgactgcgatcgcagtacaggcggcgcttgataaagcgtcagagattgcgatatttaaccggaaggatgaatttttcgcaaacggagaaaaaacggtagaaaagattaaaaaagcagtaccgtcgatgaaaaaaatctatattgaagatattgatgatgagaaaaaattaggagaagctatcgccggaagcgatcttttgatcaatgcaacacgcgccggaatgagtcctttggaaaacgtgcttcccgttccggaagaattacttcataaagatctggctgttgcggacgtcgtgtataatccgagagagacgctgcttataaaaaaagcaaaagaggcaggctgtaaagccgcagtcggaggaatcgggatgctgctctggcagggagctgcggcgtttgaactgtttacaggaaaagaaatgccggcacaggaagtgatggaacttttcttttcctgaaaaagtatcgtgacagctcttacagattgtatgtgtgagccgatataaaagatttctttatcgcataaacgtatcgatcacatggagtacgccgtcttcgtcattggaacgagtgatgaagtcggcggtttcttttatgatcggctgtgcgttttccatggcgactccaagaccggcatattcgatcatggacagatcgttgaagccgtcgccgcagcagatcatctcattagcggtcagaccgatgctgtttaacagcttttggagagactgcgctttgtcaatgtttttcggcatgatctccaagaaaaacggttcggaaagatagatatttaaaagcccgtggtactgcttacggagcggttcgatcatcgtttcaagtgttttcggatcgccgcagatgagcagcttatttaccgggaaatcaagggcggatggaaagtcgtccgttggaacaatttccatattgtttattcccgattctatttctacatatttgttcggacaaatccctgagaaaatatgagtgtcatcgtaagagatgatatccagtcccggaaatgtctttacgtattcccagaccggacggatgatttcttttgggatcgttttattgtaaatgatctcgcctgtggaacattttgtaatacgtgcgccgttaaaggagagcatgtatccgccgaaagtatccatctgaagttcttttgcaagaggcgcaacaccgttgatcggccgcccgctggcaagaacgacagtgcggccggcttcctgaatctcaagaagcgcctgttttgtcggcgcggtaatttccttttttgaattggtcaaagtgccgtccagatcaaggacgagaacctgatatttcataatccttctcctatgctttatcaaaatataatattattgctgtaaaaatccgacgatttccggaaactccattccgtgtgaagcctttacaagtacggtatcgccttcttttaaaagttctttcgcctcgcgcagaaaatctgcctttgtggcgaaatggcagatctgagtcggaaaatgcgcagaagacgaaggcgtctcttcggtatgttctgcgtttttttgctgctcaagatattccaacgctccgtctgccgccgacttcatcaaactgccaatgcagatcaaaacatcgatgccttttctgacggcgtgaatgccgacttcgcggtgcatctgtttttcgttttctccgagttcaaacatatctccgagtattgctgctttgcgagtatctgcaaaggcaagaacatcgagagacgctttcatagaagcagggtttgcgttgtagcagtcgtcgatgatcgtaaaatggggcgcacggatcaggttattgcgtccggcaatcggaacatttgcttcgattcctgcgcagatttccctgtctgtcataccaagagcgtatccgactgcggtagccgcaagcgcgttgtacaccatgtgagcgccagggatgttgatatgtgccgtaaaagaagaatttggtgtgaaaaactgtgcgtccgttccgtttaaacctttgccggaaatattttcggcgtgaaaaccgcagctttcatcaagaccgaagtagacaggcgtgattccgttttcgggagaatatccgcgcagtttgtcatcgtctccgtttaagattattgttccgttttcattcatataagcaaacatttctgtttttgcttttaagatcccgtctcttgaacctagattttccatatgggcgacaccgatatttgtgagaacgcagatgtccggccgggcaactttcgcaaggcgcgtcatctcttcgaagccgctgatccccatctcaagaaccgcgatttcatgttccttacggaggttgaaaacagtaagaggaagcccaatctcattgttaaagtttccttctgttttcagaaccgaatatttttgtgacaggacagaggcgatcatttcttttgtgctcgtttttccgacgcttcccgaaatgcctacaactttgatatcaagggaacgccgatagtgttctgcgatatcttttaaagcctgttcacatgacgccactttaatataagaataaggaacatctccgagatcttcttcggaaacggcgcagagcgctccttgttccattactttcggaataaaggaatgtccgtcgacgcgtgccccccggatcgcgataaacagactgtctttttctgctttacggctgtcgatgacgacgctgcttacttcacgggggagaaattcagatccgccgtagtatgtaccgccgcaggctgcggcaatttcctgtaatgacatatatttcataagatagctcctgcctttcttaaacaacatgtattaataacgcgcttctaacgattttttgatgatcagttcacacagatcgccgtattcgattcctgccgctttcgcttctttcggcagcaggctggctgcggtcatgcccggcagagtgttcatttccagacagtaaagatttcctttttcatccagaagaaaatcggcgcggctgtatacgttgagtttcagcgcacggaatgcttttacggtaagttccatcatccgggaagctgtctcttcgggaatgtccgcagggcatacttctaaagtcgcgtccgcctgatatttattcgcataatcgaaaaatcctgttttcggtatgatttcgatcggaggaagcgcctcgttgtcaattacgccacatgcaaattcacgtccttttatatactcttctacaacgacttcatcctcatagaaaaaggatttttccaaagcttctgcatattcttcttctgtactgacgatatataccccgatgctcgaacctccagaacatggttttataacgacaggaagggaaagacctgttaaagcaagagagcggtcttttgatttcttgtgaatggtaacgcctgccggcgtgtcaatgcctgcctggagaaagacttgttttgtcagtcctttatccatagcgacggcgcagccgagagaatcgggacctgtgtagcggataccgagcaggtcaaaagtagcctgaagttttccgttttctccttcaccgccgtgaagtccgagaaatgtgatatctgccagacgacataattcaatgacgtttggtcctaagaaacagtcggattgatcaggccgggatgcttttacagcggcaagatcaggttcttcacaactgatgtttttcgcaatctcaagaccgtgaccgggaagggtaaatacgtcttccaaatgttcgggagcgtgttccagccctaaaaatacgtcaagaagaaaagcgtcatgacctttttcgattaatgtacggcagatgccggcggcagaagcaagagaaacgtctctttcagtgcttagtcctccggcgagtacgatgattttcataattgtttatactcctttgatttcgaaatattcgtttttgtttatttgattttcagatattcgtttagtttcattaaattataatatggaacgtttcggttaagtcgtctaagtcgtcgatctgatatagattcataagagagttgttcctatcggtttacgttatttaacagttcggtttttgtatcataaagtctttgtgaaaggtctacatatactttgtgcgggttaaagagacgctttgtctcatcccacagagtatttttctcctgttcgcagaaagaggcaatctcttttacggacggagaagtgtatttacattcgccgcggataaagatcggttttaaaatctctttcattgtatatgtgccgccttcaagccgtgtctttttccatgtggaattcggatcaaaaagaagcagatcttcagaagtatcgtaagtttcatttgcaaaacagatcagatcggcgcggatttttcctgtatctttatcataaatgcgatagatcgttttgtttccgggattggtgattttttctatattttcggaaatcttgattttcggaacaaattccccgtctttattttggatggcggcaagtttgtaaacccctccgaatgacggacagtcttttgatgtgatcagattcgttccgacaccccatgaagtgatggcagctccctgaattttcagatcgttgatcaaaaattcgtccagatcatttgacgcggcgataactgcgtcaggaaatccggcttcatcgagcattttccgtgcctttttggaaaggtaggcaagatcgccggaatcaagacggattccgtaacttttcggatggattccggcatctttcattttctgaaatacacggatcgcattcggaacacctgattttaatgtgtcgtatgtgtctacgagaagcgtacaggcgtcaggatacagtctggcgtattctttaaatgccgtatattcgtcaggaaaactcatgatccagctgtgtgcatgtgttccgagaacaggaacgtcaaacatttttcccgcgagaacattggacgttccgacacaacctccgatcatggctgcccttgccccgtaaagacctgcatcaggtccctgggcgcggcgcagaccgaattccatcacgccgtttccctgtgccgcgtggacaacgcgggaagcctttgttgcgatcaaagactgatggttgataatgtttaagatcgcggtttcgactaactgcgcttccatgataggggcgatcactttcacgagcggttcccgcggaaagatgacgctgccttcaggaatggcataaatatcgccgctgaagtggaatccgctcaagtagtggaggaagtcctcgctgaacagtccgagtccccttagataatctacgtcttcataagaaaaattcaagtttttaatatattcgatcacctgctctaaaccggccatgacagagtatccgcccttgtttggattttcgcggaaaaacacgtcgaaaatgaccgtttcgtttgcctgcgattcaaaatatccctgcatcattgtcagttcgtaaagatctgtcagcaaggtgagattttgtgcgctcatggttattccctcttttcattgccatgcataagacgaaacgatgaaactgctttcgtctgtatcgtaaatttgcagaggaagcagaagtggtttttactgcggcttccgtctgccaacgctcattatatcacaagaaaataaatttagaaacgaaaatctcttctgttatcctgctcgatcagtttcagattttccaaaacgacggcacgcgctttctcattcggaacattgagaacttctctgtcgatcagccggtctccgattgcctttgtctcaggagacgcataatccatcaaatattctttcagtgtcatgagagcgttcggatgacagcagttttggatctgtccgcttttgcaaagagacataaaccgatctccggttcttccttcacgataacatgcggtacaaaaacttgggatgtaatccatttccataagccagcggacaacttcgtcaagtgtgcgggtatcgctgacgtcaaactgttcggatttggcatcttcaggttccggttcacagtaccctcctacgctggttcgtgatccgccgctgatctgggagattccaagatgaaggacgcgctcccgtgttttctggttttcgcgggtagagataatcattcccgtatatggaacggcgattcggatgcaggcaacgatcttggcaaaagtatcgtcgtcgattccgttgtcaaactgatcgggatcgatatcgtcggcgtgtttcagacgaggaacgctgatcgtgtgcggaccgactccgaacgccgcttccagatgttcggcatgcatgagaagcccggcaaattcatagcggtatttgtccagtccgaagagaacacccagaccgacgtcgtctatgccgccttccatggcgcggtccatcgcttcggtgtgatagttgtagtcgtgttttggtccggtcggatgcagttcaagatagctttctttatggtatgtttcctgaaacaagatgtacgttccgatgccggcttctttgagcaggcggtaattatcgactgtcgtagccgcaatattaatattgacacggcggatcgcgccgtttttatgtttgatgctgtaaatcgttttgatcgattctaagtaatagtccatcgtattgcggacaggatcttcgcctgcttccaaagcaagccgtttatgccccatgtcctgaagtgcgatgacttctcttcggatctcttcctgagagagctgtttcctcataatatgtttgtttttcgcgtggtacgggcagtaagtacagccgttgacacaataatttgacagataaagaggagcaaacattacgattctgtttccgtagaaatcttttttgatctgttctgcaagcttatagatctctttgtttttttcttcgtccgaacaggcgagaagaactgatgcttcccgatgtgtcagcccttttcgtttttttgctttttcaatgatcgcatcgatcagtttcatgttatttttattctcatctgcataggcgagcgtttcgagaatttcttcatgattgataaaatcatctgcatgttttgaatttacatcgtacatagttgagtctccttttaatttttaatattatttttcggaattttaaatcgttttatctgctttcagacagggaaaatgtttcggatgaaagtgctttttatatgttcagggaatctcctctggaaactgtgatttcatatccgatattttgtattctctgctttaaagaacgaaggctttcggcggcttcgtcaccggtgcacagtttactgtcgtaaagtaaatatttttctctcacctgcggcggagaaagattcggcatgatcacgttcgctccggcaagaattcccttttcgcggccgtcggaatcaatcgtgccaagagcggtcgtggcagggagaaggactttcggaagaagcagacggatcaatccgagcagaaacagcgttagatcagcgcttccggccttttgatctgcaaacggggtgtcatgatgggggatgaaaggaccgatcccgaccatctgtggattgagttcttttaaaaacagcatatcgtctgccagattttcaaaagtctgataaggcgatccgaccataaatccggtgccgacctgatagccgatcttttttagatcaaaaagacattgctttcgtctggcggcgcttaaggcaggggggtgaagctttccgtaatgcgtgtcatcgtatgtttcatgtcttaaaagaaagcgattcgctccggcgtcataaagttgcttgtagctttcataagaacgttctccgattgagagtgtgatcgcgcagtcactccatcgcgttcgtatagaagaaataatatcagtcagccggtcatccgtaaatgaaccgtcctcaccgccttgcagaacgaacgtccgaaagccgagagcatatcccatctcacagcaggagagtatctgctcttttgtcagacggtaacggttggcatttctgttactttttcgtattccgcagtagaagcagtcgtttttacaataatttgtaaattcgatcagtccgcggatgtatacgctgcgtccataatggcgtgtgcggacggcctgtgcccgttcaaataaatagtctgcatcatcggccgttctgttttgaatcaggcggatccattcgtctctggaaagattacgggttgcttctaatcggtcaatcagttgttttgtatcgtttttttcggtcatagtcgtgtcctctcgcagaaaaataagtgtgacagttcagttcgcgccattcgtaaaaccgtactgcgtgcttatcgcggctgacgccgctgttttactcataagcgggcgtttggatcatatagctgttacaaataagttacgttgttttgccgtagatcgttttcgtgctgacgcccggaagcattccgagtttgccggaaagggcgctgatgatattgttcggggcgtctacggcgatactgataatatggattcctttttctttgtatggcagtcccattcttccgattacatattctccgtagtcgcttagaagatggtttagtttatcgacggattctcgggtttcgagaagaacgccgataagagcgattctagtgtccatagtatgtctccttgttataattcgtatagtgtaagcagttgacaaggtttcagacaagttcggactttcgtttgcagacattgtaaaaagcgcgcctgaaaaggcgcgcggatatacaaagaaagagggagagtccctctgatattccatatgtgcgcctttttgctcaggaggatgcctttgcagtcagaacgtatgtcttgtgtttgagtatagcataaagttggaagaatgacacgaaaaattttgggattcacttgttgttttatgtattatgcataaaactttaatatgtttttagtgcggtttctataatatgatttttatgatttcatttgtgatatagtcactgttaaaaagtttttattggtttaatatgaaactagagtataatagaaaagggttcgtaaattcatttctatgattgaagcatatattttcagaaattgaggaggcggtaatatggcagagatcagaaaacggatcgtttttcacggacgcgttcaaggcgtcggatttcgttatacggcaaaatatctcgcgcagtctttggaattgacaggctgggttcgcaacgactgggatcaaactgtgacaatggaagttcagggaagagaagcgctgatcaataaactgcttgtcggcttgaatcaagggcgtttcatcgatattcaatggatggatactgaagagattccgttagaggaagaacgggaatttacggtgaagtattgaaaaatgagcaaaacgaaaaactgaaaaaatgataaaacagagaaaatattgaatagaacgacgacagataaaaggaaaatagaaatatggaaaaggagaataagattatgaaattaggatttatcggaacaggaaatatggcgggcgcgatcatgggaggcattatcagaaatgagatctttaagccggaagagatcatcggcgcggatatttcaaaggaaagccgaagcaaagtgcaatctgcatatgggatcaatgtgacagaggataataagaaagcggcgtcagaatcagaagttcttgtactctcggtgaagccgcagtattatgcggagacgatcaaggagattaaagactgtgtaagagaagatcagcttatcattacgatcgctcccggaaagacgcttaagtggctggaagaacagtttgaaaaaaaggttaagatcgttcgtgcaatgccgaatacaccggcgcttgtaggagaggggatgacagccgcatgtgcaaatgatgcggtgacagaagaagaaaaagaatatgcgttgaaaatcttacgttctttcggaaaagtagagattgtggcggaaaatatgatcgatgctgtcgttgccgtaagcggaagcgctcctgcatatgtatttatgtttattgaagcgatggcggatgcggctgtgtcggaaggaatgccgagaaagcaggcgtatgaatttgccgcgcaggcagtttacggaagtgcaaagatggtgctcgatacgggaaaacatccgggagaattaaaagatatggtatgttctcctgcgggaacaacgatagaggctgtccgcgttctggaggagaaaggacttagaagcgcggtgatcgaagctatgaaagtatgcgctgataaatcgagaaagatgtaataacgaagaaataaagtgctgcaaaacagacttttacagaagcaaggaagcgaattgaattttgcagaatgaaagaaataaacaggtcgtttagtgacaggaaaaaaggagatgaaaattatgtatgatatcggaatcatcggcggcgggactgccggaatgacagcggcgatctatggtcagagagcgggaaaaagaacaattattatagaaggaggaacatttggcggtcagatcacttcgtctccgaatgtagaaaattatccggggatcgcaagtgtgagcggaagcgaattttccatgaatctgctcgatcaggcaatgaaactcggcgcagagacacagatggcgcaggtgacgggaattcgtgatgaaggagaagtaaaagtaatcgttacaccggaaaaagaatatccgtgccggagtattgttttagcaaccggagtgacgcacagacatcttggagtaccgaatgaagagcggctgacaggggcgggagtttcctattgtgcaacatgtgacggaatgtttttcagaggaaaagaagtcgccgtagtaggcggcggaaacacagcgatccaggatgcggaattcctttccgactattgcagtaaagtatatctgatccatagaagagatgagttccggggtgaaaacagcggtgtgaagcggctgaaagaaaaggaaaacgtagagtttatcctcagcgcgacagtgaaagaactcgtcggagaatccatggtggaaaaattaattttaaatgataaaaagacgggaaaagattttgaacttcatgtgtcaggtgtatttgtcgcagtcggccagatccctaaaaacgagacgtttgcagatacggtaaaattagatgagggaggattcgttctcgcatcggaagactgccttacatctcatccgggaatttttgcggcgggagactgccgtacaaaagaagtaagacagcttacgacggcggcggcagacggcgcggtggcggcgcttgcggcatgtaaatatatcgcagatcaaagtttgtgagattttgtgctgaattatcattttaataagtaaaataaaaaacagttccgttttacagacagttcgatgagtctgtatgaaaagcggaactgcttttttatttttttgatatttttatttgagtttaaaaatataattttgcatttttttcaatcgtttctttgatgatcgattctacgtgatctccgatatgacgttttgtttctttatcaagccggtccggatagatcggtttttggtattcgatcacgacatgggtttttctaatcttcggaaaatgattttcaaaaatttcagccgtgttgttcatgcagatcggaacgatcggacagcctgtttttgtggcgattttaaaagcgccgtctttaaacggaagaagggaaagctccgctcctgtgttgcgcgtcccttcgggaaagatgcagattgaaatcccccgtttaatgtaatctatagcagtcagtatagtctttagtccttgttttggatcggaacggtcaaggaagagacaatacaggcgacgcatccacgttgtaagtgtcagatatttctccatttctttttttgcgacatatccggtgagacgtttgcatcggctgtatgtcaggagaatgtcgaagtagcttcgatgatttcctacaaagagaaccgcttcgtcgggaatgttttcctctccgatgaccgtcgtttttactccggttatttttaaaatcactttgaatccccattgtacgatgcgcaaagaacttatgtcgcgggcgttcggggcaaattttccgatgatccattcaacgatgaggatcggaattgtaaggatgagaaataatataagaaaaattacaatacaaataaaacgaaacataaataaacctcattttcttcttaaatttgcaatacaacggtaattatacagcggaggataggaaaacacaagacttataaaaggatagaatgatataggcataaggaaggtgtacagcgcatatgtttgtatggaaaaatgcagaggttcgatcggaatggaccgaggatatgcaaaaagaaagctgttaaaaaaagatacgcaaaaggcggcagtgttcggagcggttctgatctgtgccgcagcgtttacggcagcgctgacaggatgtgtttcaacacaggcagagacggaaaagatacgagatatgaagtacgaggtgattgaggaagaagatattccccaaagtcttcgggagatgatcaaaggaggagagaagaaaccgtttcggattacatattcggatcagggattcctctatatcgcacagggatacgaggttcagccgacaaccggttatagtgtggaagtgaaggaactttatgagacggaaacggccgtctgtataaaaacgactctgatcggtccgaaaaaaggggaggaaaaagaaaaagcagaaacatacccctatatagtcgtgcagacggaagatgtaaaaaaagatgttttgtttaagtgaggaggagaaagatggatctgacgaaaaaaacagttcattatacacaggagggaaaaaccgtttttgaccggttttatctggatgaagattacaatgtgcccgagcagaaagaagctgttcaaagaatcgtgtacagcagtgccaagcttaagacagaggatgttcgtcctgtggaaaactatgtgaaagtaacaggaaaagcgtattacaaaatcctttatatgacgcagggggagacaacgctttcggtgttggaaggaaagattccgtttgaagagatgatctatgcggaaaatgacggcgaagagacgttttttatccgaaatgaaaggacggaatttactgtatcggtcgttcattcaagaaaactgactcttcgggtagctgcggaaatggaactgggaagggaacggatgagagatgaagaattgacgacagatgcagaaagtgattttccggtatacaaaaaacgacagaagatgaatgtgtcggaattaaagatttcaaaaaaagatacgtaccgtatcaaagaagaaatagtactgccgggaacgaaagaaagtatcggacagattttattttttgacataagcggaagaaaagcggaaatccgccccggacaggatgaactgcttatacggggcgaggcggaagtattctgcatgtatctgtcaccggaagaaaaagtggaatggattgaacagagcgtgccgtatgagggaaggattccatgcgaaggcgcagaggaagatatgatctgtcagatccggcaaagtctggaagatcctatcgtcgatatccgtcaggatggagacggagaaatgagagctcttggtatcgaagcgactctttctatgaaaatgaatgtttattctgaagtggaaacagagatattaaaagatatgtattctcttgacagagagtgcgtacttgagaaaaaagaaggcatttatgaggaaatgcttatgtacaatcaggcaaaatgtaagattgcggagcgtctgacgcttcctgagctgaaagaggacgttttgcagattattcacagtgaaggcagtatccaggcagaaagcgagcggtacactgaggaaggagtggagattgaaggaatactccatatttcttttctctatctgagagcggatgacgaacagccatatggaagttggacagggatgatcccgttttcgtatcttgtggaatatccgaatcttccgaaaaatgtcagcgcaagtccggcgtatcatgtcgagcagcttgccgtgactcttgcgggaagcgaggcggtcgaagtgaaggcggtgctgacctttgacatctttttgaaaaagctgatatcggcaagtatgatcacgaatgtttccgaacggcagttcgatacggacgcttctttaaaacgcccggggatcgtcggtcatattgtgcaggatggggaagatttgtggagtctggcaaaaaaatatatgacgacggtatccggtattatggaagttaattctatggacaatgaaaatgtgaaaacgggggataaattattgatttttaaagaaaatatgagtatactgtaagcataatgtatacaagatacaagtaaatgtacagatacacagaggcggaaaacgggcggaggacggaagatgaatgagattgaattgaaatcactggcaaagatcaatcttggcctggatgtgctggggaggagagaaaacggttatcatgatgtaaggatggtaatgcagtcgatttatctccatgatgaagtgaagatcgagaagaagagaagggaaggaatcgagattgtatcgaatttaagattccttcctataggtgaaggaaatatagcatacaaagcggcgcacatgctgatagaagaattttcattggaaggcggagtcaggatcactttgaacaagcatatcccggttgcggcaggacttgcgggaggaagctcgaatgcggcggcggttttgttcggtatgaaccggttgttccggctcggtttatctaaagaagaactgatggaaagaggagtgaagctcggcgcagacgtaccatactgcattatgagaggaacggttctggcagaagggatcggagaagaactaaaagaacttcctccgatgccgaagtgtacggttcttatagcaaaaccgccgatcagtgtttctacaaaggttgtatatgaggctctggatgcgaaagaaatctcagaacatcctgatatcgacggggtgatcgaaggattggaagaaggcagtctgaaaaaggttgcctctgctatgggaaatgttttggaagatgtgacgattcctatgcatccggttattgaagagatcaagcaggaaatgaaagagtgcggagctttaaacgcaatgatgagcggaagcggtccgactgtgttcggtttgtttgagaacaggactgcggcgcgtgaagcacagagacgtatcagggagaagtcactggcaggacaagtgtatgtgaccagtatccatggagtgaggaggaattaagatgccgattgattttgaagtgacgatgaatgaataccttcccttgagagatgtcgtattcaatacgctcaggcgggcaatcttaagaggagaactaaagcccggagagcggctgatggagatacagcttgcaaacaaactgggagtgagcagaacgccgatccgggaagcgatccgaaagctggaattggaaggacttgtgctcatgataccgagaaaaggcgcggaggtagcggagattacagaaaaaaatctgcgcgacgtactggaggttcggtgtgcgcttgaagaacttgccgtacagcttgcgtgtgaccgcattaatcaggaggaaatacacgaacttcatgccgctgctgccagatttgaacaaatgtttgacagtgacgatataacaagtatcgcacaggcagacgaggcgtttcatgatgtgatctttcaggcgacggataatgaaagactgattcagcttttgaacaatctacgcgaacagatgtaccgctaccggattgaatatttgaagaaaaaggaatgctatccgcagcttatcgcagaacacgaagcgatcatgcaggcaatcgaaggacacgacaaagcaatggcgactcagattaccgggcagcatatcaataatcaggtagataccgtagtcggaacgctgcgcagtaaaatgccggatttttgatgtataaaagaaaaagaaatgtccatactctctgtagcatagttataaaaacagcagacggagggaatacatatggacagaacaaagatcaaagatcaattcggacagttcggcaggaggcgggaatacggggcggatgatgacagaacgactagccggcagatgaaaaaatcaaggcggatgtgcgccgcagctgcggtactatttgcattcgctgcggcgtttgctctgacaacggcagtttacaggatggatgcgaaagcgcagagtgatcttcagcgacgattatcagaagaagtgcttcgctttcatgttctggcaaacagcgacagcagggaagatcaggcgctgaaattaaaagtgcgtgataaagtgctggagtttctggaggcaaacatggcggatgaacagcatatgacagaggatgaaaccgtgatgtggatacgggagcatatcgatgagatcgaggatgtgagccgccggtgtgttgccgaagaaaactatgattatcctgtaacggcggcggtgacaacttgctggtttcccgataaaacatatggcgatgtaacgtttccggcaggaaattatgaggcgctgcgtattgagatcggttcggcaaaaggacataactggtggtgcgttctctatccgagtctctgttttcgcgatgcggcaaatgcagtcgttccgaatgaaggaaaagaaaaattgaaacatgttttgacagaagaggagtattcagaaatcacggcaggaacagagtttaaaataagctggtatttttggaagaagaaataaaatgacacaatttttaatagaacatttcgtaaaagattatgaggacgtagagaagatatctgtaagaacggcgtatggagtgctggcaagtattgtaggtatcttctgtaatgtctttttgtttgcagtaaaatttactatcggagtgatcgcgcacagcgtgtcggttatggcggacgctttcaacaatctgtcggacgcaggttcgtcgatcattagttttatcggagtgaaaatggcggagaaacctgcggacagagatcatccgttcggacatggaaggattgaatacatagcggcgctagtagtttcttttcttattttggaagtagggtttacttttctgaaagattcgatcgggaaaatacgaacgccggaaatgctgaattttcagatagcttcggtcattatactgatcttatcgatcggagtgaaactgtggcttggtctgttcaacaagcggcttggcgagaagataaattctaaagtgatgatggcagtgtttgcggattctatgggagatgtgatcacaacaggcgcgacgatcctttcgcttatcgtttttcgaattacgggctggaacattgacggagtggtcggaatcggagttgcccttgttgtaatgtgggcaggggtcggcattgcaaaagatacgttggaaccgctgatcggtgaagcaatcgatcctcaggtatatgatcagattaaagcttttgtagaaaaatacgacggcattgtaggaacgcatgatctgatcgttcataattacggaccgggaaggagcatggcttcgatccatgcggaagtaccgaatgacgtagatatcgaaaaatcccatgagatcatcgaccggatcgagagagatgccaagcagacgttaggtctgtttcttgtcattcatatggatccggtggagatgaaagatgaaaatgtgctcaagatacggaaagtggcggaaaagatcttaagagaactcgatccttcgtgcagtctgcatgattttcgtatcgttcacggaacaagacagatcaatcttgtattcgatatggtcattcccatcgattatgatgaggagagaagaaacgagcttccgctgctgatgatggagaggctgaaacagatcgacaacagatatgagtgcgtgataacagtcgattatgaatttgtggcgaaagcggaagcagaagagtagagcgaaggataaaagacggatgaaagaagaataaaggacgatcggaaaatgctttaaaagaggcggaaaagcgaaaaacagctgcaagaagagcgtgaaaaacaacaagaagaatggcaggaagaaggaataaaaatggagagagcacataaatacgaatttgaaggcaaggtaagatacagtgagatcgatcacagggcgacaatgactcttccggcgttgatcaattattttcaggactgcagtacctttcagtccgagcaactcggatatggaatggatgtgttgaaaaaagagaaaaaagcgtgggttttggcatactggcaggtgattgtgaaaaggtatccgaagctatgcgaaaggatcacagtcggaacatttgcttcaggttttaaagggatgttcggaaaccgtaatttttatatgaaagacgaaagcggagagcagattgcctgtgcgaactcgatatgggtgtatatggacgtagaaaaaggaaaaccggttcgtgttgacaaagaacaggcagaagcctatgggattgacgaaccgctggaaatgccgtatgaggaccgcaaaatcgaagaagcggagtcttatgaggaaaaagcgccgtttccggtgcgaaaataccatatagatacaaatgagcatgtaaataactgtcagtatgttcagatggcgctggaagtgcttccgagggatatcttagtcagtcaggtccgggttgattataagaagtccgcagtgcttggagataagatatttccggaaacagcacagaaaaaagaccgcgtgctcgtccgtctttgcgatgaagacagaaaaccatatgcggtcatagaatttaaaaccggatgtcggtcttaaagatcgagtccggcaagaatatcttcaagaacttcttctacagagtcggtaatatactttgcatgtccggcgatgccgggggcggcgtttgacatggcgtatcccatgccgactgtttcaagcatttccacatcattatattgatcgccgaaggcgacacattcttcgggggttatgccgaaaagatccatcagatttcggagcgcgcttcctttgttgcacccgggaacgatgaagtcaatccaaatgtttccggaagtgacaactttgatttcggatgaaaatttctcctgaagttctttcagacagtccgttgttctgcgggaagtcatgttcgcgaacgcaatctttaaaaaaggacctttgacagttaagaggtcgtccacgatctcggttgtgttgtgcatcacatttacaatgtggtttgcgaattgggagttattgttttcgatcaggcaagtatcttctcgtgatactacaatctcaaatccgggttctttttttaattcgcgcagaatgcggtaagcgagatcgtcctcaatcagtccccgggagataactttcccctgatgaatgcacagagaaccgttttcggcgatgtaggagatatcgtctttgatctcgtgaaagagaagtcgttcgtttgcatactggcgtccgcttgcggcaacaaaatgaactcctttttgggtcagcgcccggataagttcgattgcccggggcgtcagctcctgcgcttcgttttgaagcagagtgccgtctaagtcgcttgcaattaatttgatcataggtcaatccctccataaagttatagaaaagttatagataaatataaggataagtgtttcttctgcgtgtccgcatattagattataacgtaaaaaatatcggcagtaaataaaaaataagacttaaaaagcgcatgaaaaagcgcttgataagagaactttttgatagaggcaagaaaaatccgaagttaaaaaatgagtagaaagagtgaaagtcagatgaaaaaagacaagatatggattttcgcgggaacaacagaaggcagactgctcacccggtatgcatcacaaatgaaaatgaagtgttgtgtcagcaccgcaaccgaatatggaaaaagcgttctgggagagaatgagggaatccgggtcatacccgggcggatggatcagtcaaagatgagagcgtttataagggaaaataatatcggacttgcggtggatgcaacccatccgtttgcaagacaagttacagaaaatatttgcgccgcatgcgaagaagaaaagatcaaatatgttcgctgtcttcgggaaagagaaacgaacgatccggctgatcatgcgggagaaacgagtgacggaagacccatatctgcggcttcggtagaagaagcggtggaatatttaaaaaagacaggcgggaatgtgctgatatctacagggagcaaagaactgcatttgtatacccggataaaagattataaagaaagatgttttgcaagagtcctttcgacgcaggaggcagtcgcagaggcagtccgtcttggttttgaggggaaacatctgatcgcaatgcagggtccctattcggaagaactgaatctggcaatgctcaaacatataaatgcagcttattttgtgacgaaagaatcaggcggcgcaggcgggttcgaggaaaagaaaaaggcggcgcagaaagccggg

SEQ ID NO: 7702 - DNA, 1316 bp, Unknown
  gut microbiota DNA sequence
tactacgaatgttgcaaaaaaacacgcatgcggttatctccgtcggtgcctaagccggagaatccggacggtttcggaggaaaacaaaacatgcggaagtaaaaaaccaatttggaggaaagaaacatgggcgttatttcaatgaaacagcttttagaagcaggtgttcatttcggacatcagacaagaagatggaatccgaaaatggctccgtacatctacacagagagaaatggtatttatatcatcgaccttcagaaatcagtaggaatggttgacgatgcatacaaagccgtttctgacatcgcggcagaaggcggcacgatccttttcgtaggaacaaagaaacaggctcaggatgcgatcaaaacagaagcagagcgctgtggaatgtattatgtaaacgagagatggctaggcggtatgctcacaaactttaagacgatccagagccgtatcaaacgtctcaaagagatcgagacaatgtcagaagacggaacattcgatgtacttccgaaaaaagaagttatcgagctgaaaaaagagtgggcaaaacttgagaagaaccttggcggaatcaaagatatgaagagactgccggacgcaatcttcatcgtagatccgaaaaaagaaagaatctgcgtacaggaagcacacacacttggaattccgttgatcggtatctgtgatacaaactgcgatccggaagaactggattatgtgatcccgggtaacgatgatgctatcagagctgttaagctgatcgtttctaagatggctgacgctgtgattgaagcaaatcagggagcaacagacgaagaatactacgaagcagaaacagcagtagaagctgaagaggctgttgaagagtaagaaaacgagagcttcagcctaaaaataggttgaagctttttgcttgtataggcgacgagcaaaagtccgggcctgcccgagaccttggcgaccgcttacaatcccggaagacgccgtttggcacttacggtgatttgtttaggtgaaaaagaatattgagaagataatggaggaaattatcatggcaatcacagcaggaatggtaaaagaattaagagaaatgaccggagcgggaatgatggactgtaaaaaagctctctctgaaacaaacggagatatggatgcggcagtagaattcctcagaaagaacggacaggcaaaagctgagaaaaaagctggaagaatcgcagcggaaggtattgtaaaaacagttgtaaaagacaacaaagctgcaatcgtagaagtaaactctgagacagacttcgttgcaaagaacgatgaat

SEQ ID NO: 7703 - DNA, 205 bp, Unknown
  gut microbiota DNA sequence
gaacaatttcatcaagattaatggtttggtcaagtagagaaagaaactgatatttgtcattatcgaatttattttggcaatcttcaaaaacttctgccaaagcgagctgcttatatggtatcatataggtacatctcctttcgggtggttggtttatagtttctaggcaactctattttaccacaatccgttgaggagatgtttt
